United States Patent Application Publication US 2008/0114160 A1 - sequence listing, part 18

SEQ ID NO: 6232 - DNA, 7711 bp, Oryza sativa
tcttaatgttaaacaagcttgcaacaatggtggttgtgtcccttttaagttttaggttctcactgtctgcaaaacatgcatcaagaacatgttgccgatcctcatctatcaaccaagttcttgtactagtggtcacactttcatgttctacatgactgacatcatgatctatgttgtcttgtccccctcctgaaattgtgaggcaagaatctgttttcaaatgtgatatatacttgcaaaatgtaatttaaatgggctgcgattacctgaatcctctagttctactccataaccaatatccacatgattggcataaacggcaaagtcgtcatctattcattggaacaaaaaataactttcagcttcaaactttgtaaattatgcatactgattatatggaggaaatagatgtgtttatcataaattgtgaacattgtacacacattaagttgtaaaaatgatttgatacctggttgatactcataatcctcctcttcaacctgcatgttaacatcagaatgacgagtagcgtcaccatgatattcttggtcttgtggcgcttgttcttgctcttgttggacttcaccataagattcaaattctacaaatatcaaaatgtgtcaataagttttaccttgtcaataagtttcacactatgataatgctttaattatttatggacataactacatccatctcgttgttattatgattaggcctattgtaaccatacctggttgatcttgataatcctcctcttcgacttgcatgttcagatcgaaatcatgcatgttcagatcgaaatcatgggcaatagtgacatgatattcctgtatttgttcttggtcgtgttcttcaccttcttcagcttggtgggattgttcttcatcttgccatgagtacattacaagtatagtgtaaatgaggatgttagatttgttacatgccattcatatgattctagattatgtcaaatgcatttttagattccaagcacggtactacgaaaatgaccatatactactactacttgctgggttttggcaataaggtaggagaagtccgtaaacttgtacactaaaatctgatttcccccctatattatttttgagtttttaacattgctgccattatcatgtcttgtcctaagtcctgacagcaagaaagaagccttgtgcatatgatgaaaagcgtcaacaaagccactcctctcccgatcagaggtatgcatatactactaagttcaacttatgcatggaaagcaagctactcatgatccctcctgatactaaaatccttagcatgtataatcttcttgtctttcatatcactggtcatgaaatgtgctcatcacaatcaatatcatcatataatccctttgttatgcaaaaacttaatcatgttctttataacacatacctggttgttttccatacttctcttcttcagcttgcaggttgagatcaagttggagggcagcattaccatattcttcgtcttgcacatcatcttgtcggagaccatgttcttcaccgcactcttcatcttcttgtagtgctaggttcagatctatgttcattgtggcctcgtgtatttgttgggttgtggatggatggtgttgagttctctcttgatggatgttgtggatggaggagagtgttttgatgcttaagtgtgctagcgctagtgatttttgagcttggttttgatttatgtaagcaggcaagccatgtgatttggcacgccttcagctgtaatatttggcgcttagcggttcaaattttgttttgtctatcgcttgtgattattgagtagatttttaatgtgttcacactttagcctctatattcagtttgtgctgccactttatttgtacacgccagtgactgacgcaactggtttctgccagagcatatcatggagggtagtatggtctatttattggcttccttaatagctgtgcccaaggctaaagctcgttgtattctgggacggagggagcatttcttttcaaatattatggttgctctaatatttaaagattagaaaacagttaagatgatgtgatttcatgaggcaagagaaaaagaaatatcattaaccgtactcgatatagagacaagtacggacagtttttttaaaatttatagctgttgcagccagaagaagaagaaatagtcagaaacgtaaaatttattactagtactggtatacctaccttatcctcgtcgagtgcggtggactcgatacaaagaaaaaaaaatcccattctgtactgtaccctacgccgcggctatagctccccccaactaactccccttaaacccctgtcagacgcagccggatggataggtagcctcttctccctcctcacgccggagttttccccgcacgcacccacaccaaaccaaactctactcgatctccacggccgtacacgatttcccctccctggagccagcgcgatgggggcggaggcggaggaatcgctagatcatcctggtaagctcacgagttacttcttcgtcgtgttttcttttttccttttgagggggcaaatctgttggttgttatggtgtttgcaagaattgatgtttgtttttgcttgatctgtgatatctgttccacggagtggcggtggggaatctgggtgctgttaattttcctccggatttttccgttttgtgaccgtttcgttttgttttgatttttttttcggagcaggatctctgtcggggatgtcgccggcgacccccgacgttgcctggaagccggcggagcggcggcggcggcggtcggaggccgacgcggaggggtcttcttgctgctccctttccgctgctacggcggcgtgggttggcgccggtaatgtggagagtgacgacccgtctgttcgttcggtcgccgccggggagcaatcccgctccgtgtctcggccggaggaggaggaggaggaatgcgcgtcatgtacccaggattccaccgtctctccgccggtgagcgaatgcggcgacaggactgcgcagcaggaacccagcacccaggagtacaccgtctcgccaccgccggtgagtgagtgtggcgacaaagttgtgcagcaggaatccagcaatcaggagtccaccgtctcgccaccaccggtgagcgaatgcggtgataagattgcgcagcagggatccagcactcgggagtccaccgtcttgctgccggtgagtgagtgctgcaacaaggttgcccagcaggaatccagcacccaggagtccaccgtctcgctgccggtgatcgaatgcggcgacaaggtcgcgcagcaggaatccagcacccaggagtcgaccgtgtcactgccgtcgagcgagtgtggagacaaggttgcgcagcaggaatccagcacccaggagtccaccgtgtcgctgccgttgagcgagtgcggagacaaggttgcgcagcaggaatccagcacccaggagtccactgtctcgccgccggtcagtgaatgtggcgacaagattgcacggcaggaaggtgctgccagtgcgatccctacgccggagaaagtggaggctacccctaggagacccaggaagaggtcaacgaaggggttgactcgattcaagattatgaaagatcacaaggcggcccagagaacggcaacacccgttgaagttaagatcaagaggaaagctaaggataatggtaggcggccacttggtgataaatcagtgaggaggaagttgaattttgaaggcgatgcggtggactttgaaggcaatagggagttcagcagagccaagctgatggaggatttgaggtgccttgccaaggttcatggtctgcgcgatgatctgggtgcaggcaagcgaagcaagaaagggaagaaaagaaaaaagatgactggagaacatcaggacaatggcgaatcggcccttgtgccttaccagaaggccccagctgccacatcatcatctgcgctggttccaattcagaattctacgcaacttgctattgtacaccacagaaatcacttgaagaacttgcggacaaaggttttaggccttgatgagaagacattacaagtgtataatgttctgaggaagtgggatgagactgatagtgagagtttcgaaggtgtagacattggcagcgggcctgaatggaatgaaactcggcgtcacttcgaacattacgtggatgtgtttattgctactgtgcatggtttattgggtaatagtccggattctagaaacttctttttctccttttttcttctcttcacatgtgtgcagcacatgatagaacataagaagtatagagacataacaagcaaaatgcactactagtttgatttctctaagtaggctgggagatatttgtagtttggtttgtctaagtaagccaggagatatttcagtatgcacatcacacaaaagcactgaactttttatgttgaaaatctctactgacatgttagtgttttgtttggaataaaagtaagcgcaagcttgaagatttgtgaactcttacaaaaactaagcaatcctggtggctcaaatgatatcttagtaagaaatgaacttattgatgatttattagtctacagttctaaacaagagaacaatcaataactgcgccaagttgtacactccagattttgaaatgcttaatttaaatgtgaccagctgttttattttccatctcttagtttctaaattggggtgaaattacttaaaatcaatcaggtgcatttttctgagcaaacttggaagcacatgtatgaacatcacttgggtaggtcggtgagaaaaaaaaaccaatcagcatgatgtataatttgatcaaatcatttacttcagtttttgtctgaaaaaccaaggaaatgaaatcagcagcatttttcatcgttggtacaataattattcctggttaatgatttcaaagcaatagagcctcacgtccactttatacaacatatgcgtatgggatgaaacgagtcttggaatcctctgcttcattgaaacatgcagatttaaattggattctaaatccaaactacttttctgtcaggtcccagaagattttctgaatggggaggatcagtaactgattctgttgtgggtactttccttacgcaaaatgtcgctgacaatttatcaaggtaaaacttagacgcaatctgatgtctactttacatgtttgtgctggagcgaatctatcagctgcatttcatgtttctgattataattttcaataaacatgcagcaatgcttttttgaacctggtggcaaaatttcctccaactaagagacatattaatgctgaagcatgttcaaatttgtctctgttgatagatgacatgagacggaaattgaatttgaatgaacaatctaatggtactgattctggtagttcagattttacaaaacctgtcgattttgagaaagagaatggttacaatgaggaggtaaaaggtaattatggccgagactacagtacaattatagagaattttatatctattattgagaaacatcataaagacatgtctacgtgggacaatgcacgccttgagaacatggtgaaggataagtctggaactccagtatgttcccatagaaccttgagaaagtttatggacacatttgaggagaaagacacttctcattgggataagttacgggaggaagcatatagtaagggatacaaaataaagggaaccggaataagtgattctgctgattgggaagctgtgctacatgcaccagcagttgagattgcaaattccattgcagtcaggggacaacattatgttatagcattgcggatacaggtataaggttgcaagatacacgtctatttgcttgtttaaaaaactctgttctaacattagtgtagcaggaagatattcctgaataccttcgttctggcgatgaacatattcaccttttgcaaaattgaacttaatcaccattttgtatcatttttggccagcatatcggattaaatatatctgtagtttcaaagtggtttatgtattcaatattacttcattactagtttagcatccttttttactaggacattattcttaaccaaattcatttccttaagtaggcatttcaatcacttactgtctgttttcatgtgtgtctattgaaataagctttgcttacagcatgtctacataaataggtcttataaatctgaacttaaagatggaccgttttattactttgtttcatacattatagattatacattgtctcatactaatgacataacggactaatactttgcatttaaactacatttttcaaataccctggatatatggtacatttctattctcgcaatatgtgtggccagtggcattttagaacatttattgtttaaattttaaaatgcccattgaaagaacaattttactactgatgcaattaatagattcatgatcaaaagtgcagtttacagaccatgttgatatttgaaataccttttattttcttatccacataattgtatctattaaaaatatatgtgatccaataagaaaatgattgaaacatcagctatgatctaagctcgacctccttattcctgaaaaaaaaactccacactttatgcaagaaaccaagatttacctataatattttgattttaacatcattgtcagtggaaagatcatttttttccatgtaagctatggttttgatattactggaactctcacatatttcttgtcttcttcttcttgtgcatttgacacacagcactaaaagtattccttttccttttacaggcttttctcaagcgtgtaaagaaagatcatggaaattttgacctggattggcttagatatgtaccacgtgaaagtgcaaagtatggacatatttcataaaaacctacactatttttagtatgttcttttttttacgctatgtacaacgtgaaaatgcgaagtatgccttttttttaaaatgttgaactgacagtaaatagctgacaatggtaattctattccgtatataagtttagaactatttcccatatttgttacgttgaacttcagaagtattattgaaggaaaaccagggaacttgttgtagggagcttctatcaagctagctgaaaataacaattcgtagttgttgactgggttacttgccttatattttgcttcttcttttttggcgggcattagaaattacctcatcagtattctggggcttggagataaaagtgttgactgcatccgtcttttgtcattaaagcataaaggtttcccggtaagttatatttttctaaaaagaaaaatcaaatattgtcaacagagtacgtttcattgatcaatctcttgacaggactgcatgctcctttcaggttgatgtcaatgtagctcgcatagtcacaaggctaggatgggtcaaacttcaacccttacccttttttgcagagttccatttagttggcttgtaagattggcctcacccaaatttataaataatgattacaattctctgcttatacatacatatatatttatatatttcccttttggtgaaggtatccaatcatgcgtgatgtgcagaaatatttatggcctcggttgtgtaccatttctaaggaaaaattgtaagtcatttggtcctctcacaaaagtttgtcatacctttggtttccggcatcccatctgatgaacgtgatacgataggtatga

SEQ ID NO: 6233 - DNA, 7572 bp, Oryza sativa
ctacaaatataccactacactacaaatatgattccctctatgaaattgtatatgattcattttcttgtatcacttatacacaattatgttgcaattttttcttttgcaggatatatttgtgttagaggatttgatcggaatacaagatacccaaagccaatatgtgcaaaattacacgccaccaatgaaaggaacggaacaggtgaaaatagccggaagaagaaaaagacatcacaagaggggaagaagattgatgacaaatcttcctttggcaaattagaaattaactgatatatatatatcaccattaacaaagttgtgtacaaattgtagttggaaggatgctgatagcctctgctagctctagtgtatcatgtagatcagtagatttgcttagggcggctgcatgagtaaatatttggttgagatctcttccacaatgcgccttgtatattagtcaaattccttttttattatgtgtaaacaaaacatcccatcttttatgaggcaaaatcgcactatttagtcttaacgggcgacacatacgcatgagaaaagtgccacttaactaggtttggatgaaaagctcgtggctagttatcttgctcgactcgtgtctggctcggtttgtttgaatttgttaacgagctgagccacggttttagctcgttagctatagagccaactcgagctgcttaagagccaaacgagcccagcccagcagttaacagcctaatctcaaaagcccaagtgcaaagccccacaaagaaagagcaaccctagatggatcgatccctcttttccccttcttctctatactgtatgtgcgtatgccgatatgtgggcccaatgatttctgggtccacatgttagtgataaaggcgcggtgcagtcaactacagcatatcctaatcccatctccattccctgtctccctctctcggctaatcgtctctctctctcacacgacatcagcagggtagcccttcggccatcgccgcatctgtcgccccactccacgcttgatgactcttgcctcgccatcccctcatccagctgccgctttgctcagtaatggagcaaacaccgccgccgttgtgaagttctgaatctcgaggattcgaggattagtaatcgttgtctcacaagtgaatcactagtgaagtgttagttgcatgtgtccattttcttgtgtggaattctgatgacggacttttggttcatcagtatgggtgaatgaacggatgatgggtcatgtatttgctgttttacttgcccggaagtatggattacagacttttggttgatttgcaaaataattcctgaggaaacaagcatcgacaatcctccagcaacattgttgttcccatctatagcattcatacaagaaattggctttacaaaaggaatatcagtgtccacagcctccttttgcaagtttgcaccatcactacggatttcagaattcgcagaagccaattgcacggcacattggcatacctcattcatcagcttggtaacaaaaaaggcaggaggttggatctggtatgaatggatacatttatcctcaaccattttggaaaccttgtctaaattaatggagaacctcaaagggtcgaaattgcatttcagtggcatatatcttcacctcacccatagtggatgaagctacatcaagttccacaaagtgtcccacttgagtatcttgagaagaggaagatccaaactcattcttgcaacctccgactctgagtgcatggaggctgctgtgagcctgtgatgaccatgttctcggttagctgcccacctgaaggatcccaacaataaatcatacaatcagaacaagcagagaggtaacatgcacattttaatgaggtaactgatagtttcgacttttgttacatacgcacgcaatggtatgttcatctaggaacaaacacacggtatatacgaaaagaaaatattgatggaatcgaatacctgaagaagcaacgatgacttgttaagactcagccatgtgctgctgcttctgctttcctcttgtaatgtgacctgcaatatatattatatatgtatgtatagatagatacatagcactactcaacaagagtaaggagtattagcataagaacacacaaccactactacaataaggattttcccgtgcagagcattcgaccgtctggaagaaagtgtctgcgaaaatcacgattttttcgtgcgggcgacgcgggcgcttaagccgccagcacgggaaaatgaaaaatcaaaaaaaaaagaaaaaccaaaccctaaccctaatccagccgccaccgccaccctagtcgaggcccgccaccgtcgcccccgcggtcgccggtgccggatccgctgcccgctcccatcgctaccggggaggggagagggaggggagaagccacgggccgccgtcgtcgccgccacctgcacccgccgccgccgccgccgcccccatgcctcctctccgctggatctgcaagaggagggaggggaggggaggggacccgaggggagtagaggggaggggccgtgtcatgacccaaatattttttttccgtgacagtctaccgtatccttatacgcatatatactaatatttatatatgtccataaggatacaaggcaaaatgcaatgtctaaccatcataactggagcttagacacctacagtggttccatttattattattacttttttttcaccagctatattgcatattacatcggttggttcacttaccaacttattgtcactaggacgataccctatacctagcatgcaagtatgtcctctgggatacctctaaagtctaagtagaccacactctccactaggtctgcatgtcaccatttccctctgacatctcatcttgactagtttctgcgcacatcaaatagtaatatactcaataagagtaaatttcacaaaactacaggtattttgcacaatttatcacaaaactatagatttaagagcttgtttcacaaaactacagatttagtgccttcatttatcataaaactacaggtactttgtacaatctatcacaaaactacagatttaagaacttatttcacaaaaatatagttttagtgtattcgtttatcacagtgctacacatttagtgtcttcatttatcacaaaactacatatctagtatctccattctcacattgctaaaacgtgtagttttgtgagaatggagacactagatatgtagttttgtgataaataaagatattaaacctgtagttttgtgaaacaagttcttaaatatgtagttttgtgatatattattcaaagtacctgtagttttgttataaacaaagacattaaatctatagttttgtgaaactagttctaaaatctgtagttttgtgatagattgtgtaaagtatctgtagttttataaaatttactctaataataatatatgagtatgttatacatacttagtaagattagtacatatagctatatatatgttttaaagacaaaagaaaatactactacctatagatattaacaaccaataaataataaaggacattgaacatagtaaatgagttaaatccacactgcagaggtattaaaataatcgtagtaatctcgttcctttaacccatttttctcttcaactagtgataccctcatctgagaatcacgccgccgggttccctacttgtgtgaggcattccttatctcacattgatatcagccgacccgatatcgttatttcaggtatcggctgtctcaggctaagtatcacaatcacgttattattctcactgataaaatcatcaatacattattcgggtgttcataatactttctattagattcttagtatcaccatttcaatataatattggtaaacaaatttagtcatagtaaaatagttaatgggtgcggtcttgctttgtcttccgttgttctttctctgcgtcccacctaatcaaatatatagatcttcgatattaatttatatctatatttttcatgcagaacattagccactgacataagctactagcaccatagacagaaagaaaaccaacatggagtacagctgcttgctagtaactactagtctctgtactagccactacaagtactaacctttcgcactaatatatctacctcctactacatttagtacacaggatcataaaaagcaccctaaaaaaatatggtaagtgtagcagcctactagtaccacaagaaattttggctaatctagctagcttattactagctacttgctagatctgaatactattaaaatgtaacaatacacttgccctgtgctcacgctggcttctatggtgcgagtagtattcctaggtttttgggaggcttttataggagaagcttcattcgggtctaaggagacacatgcccagtttataagaggaatggatagctttcacctcctggacatttatttgtccatttttttaactagtccctacgatcctattcacaggtgcatgtctatcatatcccctttggtcagtaaaatatactaccctctccattctttctgtttctatctttttcacactttaagttcacaaaataaaataataataataataataataataataataataataattattattattattattattattattattattattattattattattattagtagtagtagtagtactactatactactactactacagcaggccacacgtggtccgccaccgccacccccatgcctcccctccgccggatctgcaaggggagggaggggaggggaggggccgctgcgcaccgccgtccgcctccgccgctgtcgccgtcgcctgcgcccaccgccgggaggagatcgaggagagaggagtgagagagagatcgagagaggatagagaggggtgagagagagatcgagagaggatagagaggagtgagagagagggaggatagagagagatagatcaaccggataaataagagagagagggggaacttaggcccacgcggatgggggagaggagagaaaaaggaaaaattttgaagtgggtaggagggaaactattttcccatgcggttctcttgatagatccgcacgggaaaatcggcgcatttttgcgtgccgattttcctgtgcggtgcgagttaccgcccgccgcaatctaaaagggtccatgtccaggaaaatcttttcagtagtagtgcacagaagtagaaaaaagtttttttttcttcccatcttttctggacaacgactgatagagcaacatcattgagcgcaaccaaatcaaaccaaactcctcccaacacacaagaaaggttttgcgatggattagggggagggggcgagagagagggagataaaaaaagcaaatgtgcatgcaattagaagggagcaatgtggagtagggttccttctccctctactctcactcgcagcacaagcgctgccttgccccgccacgaggaggaggatgaggaaacccattaatctttatctattataaaaattgaagatggttctgtacttatatcttcatcttttttttcgttcgtcatgatgtctccgatacaaagtagtttacttttattcggtcgtatgtatgaaaaccgcactttattgttacaggcagtcgggctgctactgctgcctgctgctatgcatgccgttctgttggcttgcctatccaagtacaggcccatatggccctcagcgatagtccatcagggcgtttggtaagacccacaacccacctggccacctgagagcgatgcgtctctggctgtgctcatatgtcaaggttaccaactctccctccccattttcggcacgcacgcttttcaaacggctaaacggtgcattttttataaaaagtttatatatgaaagttgcttaaaaaaatcatattgatccatttttaaaaaaaaattaagagtaaattgcatattgggccaccttttttaccattgtttcaacttggaccaagtacagagtaaccttttcactttggaccacctatatatgttgtttcattttggggcactcttccacctttaactccatcgatcttctctctggcctacctgaattacatgtcgcactcattctcaagctctgtgatgcctcgctatctcaagtcccgttgttatactctacctcgagctggagtttgacctcccaacaaccagggagatcgatcttctttccaagcgcgtggaggtgacgctgatggagcttcggtacgagcactgatgatcacttgttggtttgctcatggtggttcctctagccctttgcagtcaagaaagagagaagaaacaaagataagagagagggagctggatgtggaagaagaggcccaaaataaaacaaacatgtaaatttaggtggtccaaagtgaaaagattgttctatccccagtccaaattgacacaatggtaaagaaaggtggcccaatatgcaatttactcaaaaattaactaataattaattaatcatgcactaatgaactgcttcgttttctgtgctagagggatggttcctaacccaggcaaaagaacagagcccaatatattggttgcaacaactcaatttggatatctatcatcttcctcctatgtcctatggattcatggaatgattttcgactgtacgtgcatgataatacagatgcattacgttaatttgttgccctgaattgattaatttgccatgtgtctcaacacaagacaacaaagtggcattgtcgcataagagagaacctgcatattctgaagtgtttaaaagctgggtggatttattgttggctcatcgtggggtggtgccgtggtggcggcagatccgtccgttgtagagtcaacggcgttggcaactctcgccgcccgcaagcttcttccttcagccaccagttgcttcttccccaccacttcatgggggcgggggcggcggatccacccgccgcagagcccacggcgacagatccgcctgccacgacgccagcggcatcggcagctcccatcgcccactagctactccctcgtggcattttttggggccgacgatggcagatccacatgttgtggtgccggtgacatcggttgctcccaccaccagctgctcccgccccaccacttcgcgggggtcggcggcggcggcggatccgcccgccacagggtcggcaacatcggctgctcccaccgcccgccaaacagctaccaagctctgtcccgccgccccgagaagatgagcagatacggagggagagggaaagaggggtggaaggtagagatggcaacggggaattcaccacctggggttacatccgcgtccacgtccccgtcaccgtggtgttaaaaatttcacccaccccgtcaccacgcggtgaattaatccccgtggttactcccgtagagagaatcaaagaagggacggcgtgctggcgagtggcgagttggcgacggcgtgtgtggcgcgaggacagccggaggcggcacaagctgcaagagacggctcaagccatgtccccatcgatcgatctatctcgcagtgaggc

SEQ ID NO: 6234 - DNA, 11242 bp, Oryza sativa
ccgaatcctcagacaacatagaacaaggcaagaaagattagtcccaaataatagcctaaaatgtttgctcaaacatacaaataattatttttttaaaaaagcgtagcgattgggcacttcgtccacactaattcatcgggagaaccaatcatcaccgaccgaccgactcgtcgtcgtcgtcatcagcagcaggagagaaaaaaaaaacgaatcaaacatatacaaccgatcgatatattacaggccgggcgtggaggactccgggcgggcaaattacctctccgatccgcgagcgcgcgcgggcggtcggcgaggcgtacgtgcgggactccgtcggccgcctccgcctgcgagacgacagagagataagaagcgcaacgtacgccgtcggcggcgtgtgctccggcgggcgggggtgggggggactacccgtgcgtggaggcggaggcgtggcacgcgtggagaacgcggggcgggagaagcaaagacagggacgggaagggaagggaagggaagcgagacttgtggcgggggaggtggccaacagcgagcggcggaggggagagagagggggagagggagggggacgctttttaccgttggaattgctacggccgcacgaaagccagaccccagaccagaccacctctcgccgatgccgggccggtctttgggccgaatgggcgacatcgataagaatttatttttatttttaaggatataagttcactttaggtctgggaaacgctttataccgcgcgtccgagcgaatcggaaatatcagacgcctcagcagatggattagacgaacttctttcctcttctttttaaatattttttcttctaaactacttatccgatctacaaaccgatcacaccgttgtattcgtttcaattaaatctttacaataatatatcatatgtgttgacgtttgatgtcgcgattccggtatttccatagtgtggggatcgttggtactaggatatatgtgagactgagataaaagagatggagacggggatttttatacaggttcaggcccccgaattatcaggtaatgaccctacatcctgttggccgaaatcggtgttgctctttattcatctggatcacacaagtacaatatttgaggtagcatatctaactgttgtcgacatggcggtctgaaggtctgactcgtagtcgacaacagggtagcatttctcctcgaatccgcatccggcgagatcagagacagtgctatatctctcctgacggtatccgtaggctccgtaggggactagccatgcctgtctctgaagtcgatatctgtcgtcttgtcttggcgtatgttggcttgtatgttgtggcttctgttgttccgtgtcccctctcctcctagggggccttgtatttatacccataggtgtcgccttgtccaaatagaactagaaaaaccaatatggatacaatccgagtagtccttgtcgtttccatgtagaactcagttgtctttccttatccggaactccatccatatccgaaggttgtttccgtataagacattgtatgtggtgggtcctaccgagatttagtcaactgctattaggtatgtggtatccataaccctgacaatatgattatattatatcaaaagaaaaacatatgtttcaaaccgttaaaactaaatgtttcatacatgacagtgatatgtttcaatgtgcgtctgcagtgtgttttacaaaactcctgatactacctgctactactctctcactcctctctctctccacttcatccatgcacacatgcatgtattttagcaagcttcaaaatgatttttctcaaaaattacttatccaatatatgatccgattagaccattgtattcgttttaattaaatctttataacaacatatcgcatgacttgttgtttcatacgtggcagcgacatgtttcaacatgtatcttcaccatgtttcataaaatatttaaatgtttcagttgctgattttttttttcaccatatataacttaatgtttcacttgttggtcaactgcaacatttgaccgtctgattttttgaggagcatcggacgtccgatgggtagctttctccctttaggtctctcactttgtcaccgagtcttagattcgatcctggaccacaatacccagttctcttctccaacaaaattagataaaattttggatacttgtggcagtctttttaaactgctaaacggtgtgtttcgtgcgaaaactttctatacgaaagttgctttaaaatatcgaattaatatatttttttcaagtttgtaatagttataactcaattaatcatacgttaataccacatcgttttgcgtaaaacactaaatcttcatctccaaaagaaaagaacaccacccgtgtaaagatctttatggcgggtccctcaactccccaaaccaatgtaaagatcccaaggtgatttggacgacggtttcggctgacgtggcacctatgtggtgttgacaaagtcagataaaaccgtggggacccacatgtcagtgagggttcaattaaaaataaaaaagttgcagtgggacccacgtacgtagtggagtgatctctacaaggaggtggccggagggaggtgatggggtgcaccgtcgtgtcatgctgcttatcgtttgtcgtggtggagcttgttgtcgttcgcggtgccaccgctaggagaaaggagatggacgagctccacacctaggtcgacatcgtgaggaggggctgaccccctggtcagcaacaaggcggacggaagactggtgtaggtcggtacggcagtatagattaggagacccaagacgaccacggcggctgctagcgtagccggttggagccagtgttggtgagctgggcggcaacccagatctagagcctgttgagggaggcgcggcggaggggatgtgctaggggtccagggcacgccgaccacggtgaagtgactcagggtgcatgcgaagatcgataggtgtgctatttttgttaattcaaatctctcagttcactcgtggccgttgacatgtggagcatcgcatggtggttctcgatgacggaggtgggtgaatccaccgtcgcggccccagcaaccccaccaccaccacttgaggaggcggcggaggaccataggggaacagttgtactgatagagtacttgtggggacccccggttttatacaccggtaatcccatgtgtcatacagtgccactccctggatcagtaggtggtacacacatagcacaatataatatcacaactgacatcgtttacatgtatttctacaataaaaatacaagggtaatctcattgggtcccgaaatagaccaagcatggtcacttacaatacaaaatgccaaagcaatagatagaacagcggaagcgaagcagcggcggtccatcgaactccacaagcaacgactggtgaacctatggtccctaatccatcatcttcaacatgtacttggcagcaacatggcataaatctaatcgacgccaactcctttctaaaagatttaattaagcaagagtgagtacatgcgtactcagcaagccaccactaagaaatgaatctagtgcacacaggggttcaaggatggcttggtttatttgcataaagctagttttcacaatccatttaacaaacctacgacatagcagttttaactgaaaaacaatgttaatgttgaagttgtaattacctagggttcatccacctctccaagcctcgcttggttcggtttaccctcacatttcatcttatatcaactctactatactaacattcccactctttgggcaaggttcacatgtctcttatatttactctaagtaggatcaaaatctatgagtctagtcaagggtattagccgcgagcacggctattcgaatagattggtttactcacactgcagtggatgtacgcttttaatcccacactccgtgacgcacccagcacatgagacttgtcacggctcgatttttcagttacccttgcatggcggcacccgctccaaggactatgaatccccattgcacccccggcgccacattcctccctcgagccggttgtgaggggagtcctggcgctcccaagatcagagattacattatacatatatatagttttgacgtcattaaaccacatacttccacatttccataccaatgtccagaacctaccatgtctggggtgccaccccacgagaataacctagtccaccgggtctaaccccgctcaagaagtgtggtcgtactcggttcgtttcctgcttagcttcttgactcggtccttaactgagcagggtcggcgactagccgttttcagaaccacccatattctatccatgccaccccagtcgaaattattttggttttattaagttttcgggtttcgcaaaggttttcatgttatgggtggcgcttatgtctccacccaattcccaataatcactcccatcgagtgatcagtataaccacatccacatattccacatatggagtgtaaaacgtctatgtaagcagggctaagcagtaagtaaataatcacgtgtaacgtaatagacccaggtaacaaaggtatgtaaatacataaggataacaatatcaaaggtaggcttaaacaattgtaggtaattttataattagcatgcaattttatttgtaatcaacacatttataaaaataggatcaacatgttcaaggagggtgcgtagtgacttgccttgctatcggtcctaatgtcttcgagataattgctccagttagataactagaattcccacgatcgaagaataacccgggtattcgcgctcgataaacggctaaataaaccacacacaatcctaaaagaattaaaataaagcaacattcaatacaactaatggtgccgttaaatagatctcgattttagagagattaccgaagttgaacggagttgatcggaattacagttggaaagatatgaattttcgaagttgggaagggcttataaaccgttgagggaacactcctcggttagggacttgaatcagactttatgagaggctcggagttgaatagaggatgtaacatggactttagtggaaagggaggccgacggttggctatgcccgaatgttagggaagggcattacctagactttgatagcagactcgatcctttgggcttggacagagcatagggaggtgatatagacttccatgggggaagtcaactcagtgaggaaggggctagaacgtgggtcccttcagtgggtcccactcctttcttctctcctatcctctttctctttctctcgatctcatccgctctgctctctcgtttcctcctcgcgagcgccagagggcgagcggccatagcggcggcttggcggcggcctgggggcgacggtggcagggcgacgctcggtggggaggcggcctggctagggcgctaggcgacggggcggcgcggccgtgggcgacggtgtccggcggcgcccggagggaaggcggcatggcggctgggcggctgggaagtggagagggccggcggccaagaggcggcgtgtggcggcggcctagcgcagtgggggaggaggggccggcggctgggtgacggcggcggcctggcacggttggccggtggtgagggagggagggaaggcctgtggtgggaggggcgacggcctggggcgtcgtcttggaggcggcggtggtgaaactggagtggaggttcggcggtgaggagatggagaccggcgatgggaggcagtggagatggaggggagggccggctgtgatggggacggagagggggcggtcgatcggcatggcgccatggtggagggaggcgacaaggcgacggctgattcggtcaaggcgtcgcggctgcggaggtgaccgtacgtcggcgctcggcccggcgccatggcggcttgggtcgggcgaagacggcggtgtaggttaggaggagaaacaatgatgccgcgcgtatggcagggacgatggcgcggccactcggcggcgtcctgggcgaggccaagacgtcggggggcagcggccggacgtgtcggcgcaggcgatggcctagcgacggcgcggcggcagccaggctaggctactaggcggcgcggccgggcgcgtgggagagggttggtgtagtggcaggggagtgacggtgcgcggtccggctaggcgtcggccacgcaaggaggtggcgacggtgcgcacgatggtggcaccgcgccgagacggcgacaagtgagtgggaaaacagagagagggcggtcgacaaaactaggaaagggagagcatggaagggaagggggaagatgctcacattgcggtagccgagtagcggcacaccgtgcgtggtcgacgggcgtcgacaaccggctcgcggatcatcctaggcttgctgttcgtcctcgcacaccatgtgttcgatcgtcgtcaacaaaggaatacataatgctaagggacaacgtcagcgggttagtgcaaggtaagagttagggagttagaagttagcgaaacggaaagtaaaggagtcagcgggttagtgagttaggggttagcgaatccaaaaagaaagagttagagagtcagaggttagcgaaactgaaaatggaagagtcagtgaaacagaaagaaaaaggttagctggttagtgagtcaagggttagatgttaaagttagtcgttctcgggtgatcaatggtgcggcagcctatccgtcctcttgctcaactgaggcccagccggagccggccgcggcggagcaaatggagggatggcagcttgtgcacgggactgaggagtgcagtggcagagctcgagcgtggaggtggagaagaaatggagaggagccgagctgctgctgtctttggtggggtttatataggtttgctggctgcctgtgcatgggaggcgatgtgagggtgggcagggagcagtgccaaaacgtcgacatcgccacactaccaggtacgcatggcccatcgtacttggctttgccacctttcggtgtgatcttggcgttgcccttctcagtgaacttggttctgtggttgcatgtatttggtggagggttttgtggattgggttcatggtgaatgtattgctgctgttggggagggctccagggcatttgatggctgtgaatgtttggtgcaagactctgtgttgtgccggcaaaagtgggtgtgaaaccctgttgtggcttgtgggcaatttatcgaacatgttctgtgcatgctgctgttctgagggaggcaaaatagacttctggtggttggctgagaaagagagcatgagtggctgccaggtcggctggggagggaatacagactttggctgaggaggttgcttggttggctgcagctctgagcttagggaggcaaaacagacttgttgtgagatgagctgggctgacagggaagggaggtagcctggttgcaataggaacttttgcatattgcagggattgaattggaatgacatactatgtattaatgcaacttgtaatttggactgtatttatattttggaatgtataatctggacatttatttggctctgtacatcggactgtgcttgtatggtactatggagtgtatggttgtgttcggtatagaaattccgttatgcacaaggattgaatgattggactgcaatacgaggtttggtatttacggaacctgcattgccaaataggaatctaggcttaacgcctgacgaacgaattcatcggtcgtcatagattattttgagaatgctcgtacgaacgaacgacagtagtgaattaaggatttttagggacgacgtgtggcatacaaatccaatcatcgtggtaggaatagatttgaggatattcaaatcaatgtacgataaataaatacgtcgatcgtttgtagatattcgagggaattatcgagtcggaatgatataacggtttgaaataaccggagggtaaaaattgagaaagatatgtcgtgttgtgacataagggaaggttttcgggttatatattcaggtctgtgatttgtttagtaccgaagcacttaataaatcagaccgtgaagacaagggaaggaaaggacgttggactgagggcgtccctttaagagataagatttaatcgagatctttggcacacaacctaaatacacacaaatgcataataaatcctagcatgcaaaaaggttttaaaaagatttttgattattccgaatttttaatttcgtattttagaatcgaaattttcagggtgttacagtactccaagcccaccaccaccgcgacggaagatgccatggcaagaggaggagagagatcaaaacaccaaactagttgctgttgtggcagccgtccttcaccatcccgcttgaccccatactcgttggggtggcacgccatcataaatttcacgactgacagtgacctggtccttaaatcgcccgacgagagagtgtgcagtggggagagcagtggcagtgagcgaccaggcgcacaagtgtggaaccaacctcgcgagccacgctcggagcccaccgcggttcctcctcgccgcctccacctctgtgtcggttgtgtcccgacgatgatgccagtgacatgttgttctcgtcatcttcccctcacctcgtcatcccgattctcaccttcctttttgtccacctcgccaccgccatcattagagtccgtgggcggggaaggtcttcgtcgatggtcactgtcagtgtccttcctccttcgagctagcttctcctaccagttgccattctcctaaccactcgccgctggccttctcctcaccgctcaccgcctggtgagatgggaacaggggaggaagagagagataggtgaagaggtcttgatgggcccacactgactcggtactattgatttggatgtcacgtcaaacaaaaccacccgctatactatcatgggacctacattgcatcagttttgacaattgagggactcggtgtatatggtatttctgttgaaggatgaaaatcgaacttgctgtcaagttaagggactaaaatgaacttattccttatttttatagtttgtgtaaatttcacaaaactatagatattttaaccaaattattgcaaaactatttaaggtattgtgttacaaagcagcacattagggctaattttatcataaaaggctaatgccataaaactacatatttaatagagtaaattgcgtgttgggccacaaattcttaccaaagtttcacttttgaccaccctttgttttttttaaaaaaaataggctaggtttttttgccaaatgtatcactttggaccggttggctcatatatcgatgagactataacaatctctattgtccatgtgtcagttacatgtgggccactcgatccaaagtgcaatttggccataatacttagtccaaagtaaaaaaagaacacagtaagagtgatccaaaataaaactttggtaaaaatatgtgactcaaagtgcaatctactcaatttaatattgaagttatcacagaacaatgatcttagagttcaaatccctaacaccaccattatgttgaggttataaacgttctagttttgtgattaaattggcaccaaccttgtagttttgtgataaaatttgctacttaatatatagttttgtgatacttcattttaaatctgtagttttaaatttgacgctaatatatatttttgtgttaaaataccttaaatatatagtttttgtcaaagtatatgtagctttatgaaatttactcttaaagtttttttaacactatttaatatataaaactatatatactcctctcatcatctagaagggttaattttcccatcatatactgtagtcttgtgaacacagcacacctatcacttgtcccgtaataagttcattttttataatcattacattaaaatttgtaaaaatagaaaataactatatgagagtagataaaatgaggaataattatcttgagatttaataaaataggggtattcaagtcattttgattttgtattggtatgatatgtgaaaaataaactttttcttaagaaacacagtagccttgtgaacacatgcacacctttcacttgtcccataataagttcatttttgtaatcattgcattgagatttataaaagtagaaaataattgtatttgggatagataatatgaggaataattatcttgggatttaataaagtagggtagggatttaataaagtagggtattcgagtctttttgattttgtattggtgtatgcgggataggtgaaaaatgaacattttttttagaaacatagtagccttttgaaggcacacacgttgacaagcacaccttatgagctgactatgggtacatcacctattattttagaattagctgtaaataaaaaacgttatgtctaagacttaaatctgggtaaattgatttcaccataagtatcctaccaagttgagatactttaacctaccgaaggaaacagaaaagccggagcttacggcgtccacatacggtgtactaaggaataagttcactggaggtccctcaacttaacagcgagattttttgacgtcccttaaccgtaaaaccagaaatcttcatccctaaactatacaaaaccatccaattcaggtcccatggcagtagagatgcctggtttcactgacgtggcaccctagtaagcaaataataataataataataataataataataataataataataataataataataataataatgtggggcccacatgtaagtgagaggaaatgatgtgggccccatatctcctctttcttttccttctcttatcttttctccttccctcacttctcttgagctggtgcgacagtggagcgggcaaggggagagagacggccacgcgacggcaccggcaggacggggggagagaagcggccagcgcaaccgcacgcgacggcgagagaggcgggtagcgtgggcatggagcgggcacgccgacccatctgctgggcggcgtgggcagcgcagagagggggagagaggcggccggcgcgaccactcctgacgacgagagaggcgggcggcacggagcgagtgcgctgtcccatccgccaggcggcgcggagagggggagagaggcggccggcgcccggcgctaccgctcgctccggcgggagatggggagaaaggcgctaccgctcatgacggcgggagagggggaga

SEQ ID NO: 6235 - DNA, 26602 bp, Oryza sativa
agacactaggagcacggagaacacgcccctttttcctcggcgccgatctgaacctgccaccgtcgctactgccgaatccatcctctccggtgagccattgctcgattcctcgcacatacgccaccatagggacctcactaacacttgatgactgcatgcatgccagttcttggagctgtcaagctatcatcgtcgacccagaggagattgccgccgccgagcagttgcacgagtcgccgtcacccaccaagctttgccagtcctgtctagcatctcggtgagcatcctggactccttaggaagcacatgcatgcatgtatctagcgaaaacgaggccccaaagcagcatgcagtagcagcctaagcacagccgtcgctcagacccgccgccggcgctactccaatgtcccataaccaagaaaactagaggaatggaatcgcgagagcttggtcttcattttatcttttgacctcaacctcaagcgagccaccgtttgccgccggcgagctcgagatcgacctcagccatggctagctctgctgtgtctagagcagagggatgacttccgtgaattagattaagcgcagggatccgtttacaattgtagaaacacactgacatatgggcctaggactgcgggttgattcctagaaaccccaagggcctttgtgcatattggtccctcacagccatgtggaccccatcctttaaaatctgaagaataattaagaaaatgcccaaacaaatatatgtttagcagaaaaatgcacaaagttgtaaaatctatataaaatcaaatatagctcattttgaagtgattccagttgctgtagattcttgaagttatgaactttattccaggaatataaaacttgacactcactgtacaaataatgtctctaaaatttatctaagataggtcatacataaaacatgtacaaacttataaaatacatagaaaattcatctcaactcattttgaaacaaactcaaaaactgcagattcatcatcatgcactctctggttaggtgaaataaaagtaattacttactttgcataaaatgcctctaaaactattatatctaaaatgattagttttagataagctaaactttagaaattcatgtagaacccaatttagcttcaatttgaataaacttaagttctataggatcaccaaaacacgtatttccatgttatgaaataagattatatacttactgtgtagtaaaagtctctaaatattcatataaggatttactaacatagagcaacctttaatttgtaaaacttgtagagaatttatttttagtccaaatgaaatgaacaaagtttctatagaaccagcaaatagttagcttcaacatagtaaaataaaatttggcaccttttgtagagaacatagatcaaaaccttaacttagtgaaataagaatttaaacacatagtgttatttaagtaatacataaacatgtataagtatatatacactttaggtataattaaacctaaataaaaacttgattgaccagtgaggccatagttccatactcatccactaaaacttagaagaacttaactcatatgacaatttctaggttaatataatatattgctagtttagattagagcatctctagtttataaaatatgaaccatagtagtacagaccataacatgtgaaataaaaatgttttagttaaccaaattattccttttattcaacttaaacaggaagtagcatgttctaaacctataactcaaaagtcatgaacatataaaacactatatgcctaaaacacgttgtaacttgtaaaatctataagaaaatcactataactccaaaaattgtgaaaccaaatgtgttagtcttagaaaacacatctccacacccctgtgaagtctaatataataaaaatcactttacaaaagtattttataacactacctaagactactactataaaccgataaaaattctaaaattcataactcccaaatggaataagataaaatagatattatttcacctaaattcattttagatcagtaccaacccactgtgcataaatcatgcattttagagcattttggattttcagctctttcggtgtttaattgcataacgtgtcatttatatagataattgcataatcggtgaaggactggattaggtgctaacgtttctctgatcaaggcaagttttctcctcccatcctttgaacacattgaatcccatgatttgaggaatgaaaatatttgtttgcaaagttgcatgtgaacttagactatatcggtatttaaaattgggttaaggtagttatgacctatttgctacatacccccaccttgaataattgatcctcttgctgtttgaaaccctagaaatggttagagtacactctttgtgctcaaatgggtttatatatgctctatgtgcaactacttgcttagccatgcttagaaatatgcaaatgctcattccatctataattaaaatgtgattttgatacatgaacctttgctagaataaaatgaatatgatgggtatttgcgaactaaaatgtgtaaaatgtgattttatacttgggcggcaagtggtgtgcatatggtgttagttgcataccgatagggggagtgtttgcccaagtccataaggaccgaacttgtgtcacccatttaaagttattcgtacatccacatgtgctagtatgggatggtctaagctgattaatctatttaggactagccttgcattctggtaggccggtgtgtatgagttcgtataattcagaggagcttcctatttaccccgacgtggtagtttaggtgactaaacatgtccaatacaacggtattgtgccacgtggtgggttcccgtcgtgtccgccaccacggcgttaagtttaaggcgtgggcccaccacttaacggttctagacatatttccaagtatgcctaggatggaggaacacgtatcgtgctggtgcaaggctagattctaagtagtgtaaaggattcgttgtgacctctagtccgcactcataatgtagagtgtgtggtacttggccggcactgaaccaactagagtgtagcctctaggcttctatcatatcatgtgggtaaaggtgtacaaactctgcagagttctttaaactaatcgattagccgtgctcacagtcaagagcgctttggtgatgtgtcatgagtatttaaactaatcgattagccgtgctcacagtcaagagcgctttggtgatgtgtcatgagtatagactatgttttaaaaatgtaatcatgtgacattggtttgaaattgataaatgtgttgagttgtgtgtgtggtgatacattatgacttattgttaagtatgacaataagagattgattatgatggaattatgaagaagttaataatgaaacttaaaacttgtctttgttaattgaagcatcaactcctttacaaaagaattgcgaaacaaaacttgctttatgctgaaattaaactacatattgccttcctttgaatatatgtcttacatgtagtatgataggattgatttgtgcttgccagtacattaaacaagttaacttgtttaatgtactgacttgctgttgatataaccttttgtttgcaggtttagatttagtctttgagtgatgcgggttccgattgcttcttctaggatgagaacttaatggggtaaacccctagtcgatgtgcttgtgattgggtagtcaagcttccgctgttctctaataagtctatttggccggtcggtctatgtaattattaagttgttgtaagtcttaagtttcttttatcttagttgtgtttgctatgtataatcatgtttaagatgaaagtgtgaatctagtgcactagtgcacatcctgggaactagatttacatgagtatgagttaggaatatttgagaggttgtagatctttagctatttttgtcaagtttcctgaatgtgtaacacatctggtcgccgccttcgagtggtttgacgggcacatatcaggctgaagttgactggcaggctaagggcttagcaatgtcttcaatatttctctctcgaggcgtccgatgtttcattatgcttgtttgatgacttgaattattcacttcatctctcaaatataatggaaggtctggagagcctacgacactcttaccgaatcactatcaaatcgactcaaataccctactctaattggcaatgatagtcattctaatataggcccagaccgagcacaagtcatatcatattggctgtatcggccatcagcctcataaaccttgatcaacttacactctgtcttctagcaaatacggtatccagccgatgcgcaatccgactccaaattcaactcgattccacaccaaatctgcttcgatcttcttctttcttctccgaatttgatgcaaaattccgttgttaacaatattatacaaaatctctctgatttgattttgtcttcgacataagcccccataggcttttatgtgggcttggcttcacttttatataatgacccatgtatatatactccaggggtgttgattacgtgaagaataacaactcaatcatgttaacatgaattcttgaggataactcttcaacaaggcatagtgctgaagctggtcaccaagcaaaaaaaaaaagtctaaaacaactacttataaaggtaaactaatactatgtaagtacaacgttattatacaatatttaattctggtagcaacaatattttgtgttgtatacatataaacccaagacttcatatttaccacttaagcagctattagttaggtctactatatactttttggacacaaccattgtgagccttatgcattatattgctgagtagatgttctcatcacttgagcatacggtacagcaagtaatggcattaagacctagaagaagtttgcttgtgtagaagaattccacaagaataagaaaatatctcaatgtgaattctagatgaacattaaatacacaagaagatgacgacgtgataaaccttgaactccactcgatacgctcacggctttgattggcctgatctttcggtgagttgagataactacgatttgggagcaacgttgacgatccgactacaaccttacaagacgtcgttgtgttacgccttagcgatcgatacacctcccccttggttgttgatcttgctggtgcagatcaatcttattcctgcaagcaaatcgaagaaacaagtaagaacaagataaaagcaatatgatattgcaaataggaattgaataaacatgataagttggggttctgaagacgagcaattaggtggtatagccaacacacgtaactacaaggtaaagtagcaatggctaaaactttaatctaacaaaacccgagaaattataaagaggtcctgttgacggtcgttatcgatcagtttcgactgtcaatattactaaaatagaggagaactagtgatgcttgcaatggataaatatattaaaataataatattccactagtattaggtatactaacatttttcagagaatgaccataaagtggaggagaatcgacatcaacacagacgataaatcaatcggacgatgtcgagaaccagacttatgtatgaatgggccaagaactcagaattgacacgacaaactgagccaaaattcacaagtctgcggagaaaaacaacagagtaggggtgggcataaaaaccgtgaaccgaagaccgaagccgaaaaaaccgtaaccgaggccgaaaaaaccgaatttccagttatcggtcacaacatcgtgtgttaggtctaaaagaccgaagttctttcggtgagttcggtcatcgtcgttaattaaccgaaaaaaccgaaggaccgatcaacccaactgcatgtattcttttccaggcccattagtctattgcgtgtgtacagcccacaagctaaccctcctttaaagagaaaaaaacaccttatcacttatccccatattcccctccacacagaaatcacggatgcggcatctctgcaagctctcactccgccgccgacggaaacgagaaaactgcatcccgcagtcacgcctccgcttcttcccatgagcttccattctcttctccccttcccttctaagcttcaattgctccactgcccagtgcccatgaggccatgaaccgaggatctgaggggtgaggcaagaaacgccgcaggcttaggctcggccacccgcagttggtcgccttggaggcgcggccgcgcggggttgagcaatcgtccgcgaacgaggagggttgagcaagctggtgcgccggaggtaggcaagcaacagatgccggcttggggtttctggtttattgatttagtcaatggggaaatgtaatctatgactttatgactttttgtttgagattttgattaatctctttgtgaatttgtatattcaggacgtaattgataattttgatgcattcccatgtttggttgttctgcttttgcttatttacttcgatgtgcaccttgttaaatcggtcagctcgggtaaaactgaagaccgacccgacacttcggttacccgaaatgtcggtccatgaattttttgttgcaaatatcgggttcttgttttcaaagactgaagttttaaaaacccgaacaaccctggccgatttttcggtctagaccgaaagcccacccctacaacagaggaggccgccagctgaaccatgggttggttgggccggccccaagtttggccaaacttctctcatcgccgctggatgcagggtttcttctggacggtgtggattagctctcaatgacggttggagggtatttctgaccattccaaccgtcacaaacatcattggggtgctatataaacccctcaccttctcacttcacccacacacctcaagcaatagctctctcatttctctcaagtttcctcaccttctcacttcacccacacacctcaagcaatagctctctcatttctctcaagtttagtttagtagtatctagctggtggaataggaatagagtagaaatcaggagtccggaagccttccgaagagttcgggtatgactctagtagcttttctcttctcttttgtaagctttgtacttttattagaatactcttctttatatatttatggtattaaaatacttgccgaatatatgaatatctactttatattatgttcatgttatactgaatatacagctaacttatctgggagatgctttggtgcgggtataatgtttacttatgcaattactctgtcatgacaatgatattagagtagtatctggtagtttaggcgtggtgtctagattacgggatattattatttggggttatatattgcggatgagaggtgggccgctgatggtgacagctcagtacgggtattcctccgcgccggtatataatcctaagttaattccctggggagggtattcctccgtatttagcccgggttgtatggtcatgacggactgtcgtaaggaactcggcagtcagtgatggcttctcgaagtaccaggaaggcatcgaatagagggtattagctagtatatcagttaactataatgtatgtatactatgtatattagaagtataggaatagattatctttctcttttctatccacttaggttagatgatatattatgagaatgagtagttaatgcttgtgtgtcactctacccttagattatcttaacccctgcttagaatatgattatcacaagtaatatataaattattagtcaatgttctctctatatgatctttccacgggataaaataaatacgataccattggaatactctcgggtgaaatgctacaatgttatatccgtgcgcttgcggatgaactctgtaaccataataaaccaggagtatttttgcgtcattgctgggaattatatttctagtaatgtcgttaagaaatactaacaggtacctagctatttaaggaggctatttaaggagttgggatgatgaccaaggggtctctaaggtcatgctccaccagattggggcgcaccccatatgggtcccacttaggctagggtccaagacgaagttacgggctcataggcccattatagatgacacaataccttgggcggatgactaagatggaattttaagatgaggttggatcctttggaaagaggactccgagatctttccatcaagtaatcacaggccgaaaacagaggttgtatgcatatttggcggccgtttgaagtcagcaatgtagcaggtggccgaatcagattccaaaactcatgtggcttgatcttgatgtctcccagttgagctatgatgtgagcaacggttgcatcaatagtggctatgatcatatcatgacggtaggttatttatgagttataaggcatgggatgttggccttaacatgggctggccagacgagacttaattactccccaaagtagattgtcatattgcgagcagctcgaatggaattttgacatcaatttcatggcaacagtgaagcacgtccgatcaggacagtctgactaggtcttgttaaacttgttgggattagcatgtgtatccaaggaaaaactttccttgtcatacaattgttctatataccactggtatgaaaggtgaatgacatttagcatcaacataattttctttatgaaaaatgttctaaaatgctataggtaatagtatatgcatgttttaattattccatcatatagatagtcctagaatatctatagttccataaaaaaaaaattagagcgtgacatttgttatagatctaatgaccataatacactgtaaatattgcttgggtagctttctatttataaattgactatttattatgttatacatttttaaactagaggtaaaggcgtaaatagttattttctattttatatatatatatatatatatatatatatgtatgtatatatgtatgtatgtatgtatatatatatgtatgtatgtatgtactactaccgggagcaactactcccatcttatctatgtggcagtgcaaatttctgctatttcggagtccccattggcgtgttaattagccatgtcatccaacccgtttagaatgataaccattattttcatgggatacaaacaattttgaatgcatgttagttcatccgccagaggagcagaatatggacactacgattggcagaaaccattttttctcccattgatgttctgttccgtttccaaataatgttctgctcctttccaatcgatgttctgttccgtttacaaataatgttatgctcctttccagttgatatttttctgcttctttttaatttcctgcctttcttaacgtcttctgcttagtgacgattttgttgaaggagcagaagatgtgcttctgttcaaattagttttctgctccctttctaaccgatgttctgctccttgcctcctttcctaggtcacatactccatactgcttcctttcatgtttctgctcattttcaagtcttataagcttcatatagacgatgagattcaatttaacaggcagaaggtattctgcactttttattccttgttctatgcgttcttacaaatttgaaatgacctgaatggacacaacagacgtcacaaattatgggccggggagcaaaagatgttctgcaattgtttctgccgagtcctatgtctaatagtgaatggaatcggtttgtgaaagagcagaagatattctgttatctctaccatccattgattcaggagggggattatagctttctgctgcacaaattctgttatgccgttgtgattaaaaagagtatcatccctcaactcggctgtgttgtacatccataccaacagaaactatcctgagcaaaatataacatacctatttaagtatgtaaacataaactgcaattagtaatcaataggcagaatatgaactgccgttacatagagaaaaaattggtatttgttctgccaacaatttgttttttcgatgatgttctgccattttctttttctgatgttctgccatttttttcaattggccagctacatatcttctgacggttagaagcagagcatattctgccaaggcgagcacataggaacaaactccaaccgaatgttttgcatgcagccgatgatttagcatttatttgaactaataaactatttagttaattacttaattaaacaacccggtctgcagaagtttagtagattcagggttattccgttaaatcgatccgttaagggaagggttactcccgggcaccatggtatcaaatgcacaaaatcattcaaatatttcaaaattttcaaattatgagtatatacctagttataagaattcgatttatacctacacctaacaacaaaacaactcaaatttaactttatctcacaatccatgattacatacctaactaattatatgtttggatgctatatacctagaatcaaaatctaacaaaaacaagttcaaattcagttcaaacttgctttgaactagttagtaaagtagttaatgttaatatctaaatatttgaaaaagtttcatactcatttgaattggatatatactcaatttcaacaatggtgcccgggcaccatggagcaccaaacaaatttataatatatatatatatatatatatatatatatatatatatatatatataaacatgtatcaagtgaagtacataaattttataatatatatttttttatataatataaacaatacactgctaatgactatacttacttaaaaagtaatgtagtagcattaaaataaataaaatttataatagtttaataatattatgtaagttttcagatttcatattaaaagaacctacgaacaagaaaatcgggctgcaagaaccggattttcttctgaattatctaaaattcagaagacaaaaataatcgaggaccaaacaatacctagcaagaagttgcttaatctctagagctatgatctttatattggtttttgccaatctaaactaactcatcacaactaatgaaaatctaaactaaagataatgaagggatgaattcaagagattcaacgcaatgatggaaccaactaaagaaatagattcatcgccggttgaagcgtcccgtctaccgcttctgcttgcgattcttgatatgccccgtcttgctggtgtcagcggcggcctgccaattcaagccaggaggcatcgctatctgcgtccccaatgatgctgcagtcaccttgcgtctccaatgatgctgcagtcaccttgaaagaggccggacacaggagctgctcagctggaaccgggaccacttctttttcttgtttgtcatcaggagcttcgagaggtctggagatggagattcttccgatcgtcgccaagctcccctctgctgctgccgtgcgccctccctctccttctgattctgcctgcgcccactctctccctcgctctctcttctactaattgacgatgaaagaataactcgaggagaaaatacaaatcggtgggctcccttcccctaccttgtaccattactagtaatgtaccattatatagagcgtcttgattcagcggcttagtttttctctctaactccaaataccacccttgatatcataaacttcaaaactcatttttttatttttctttcaattcaattcgttagtgactcaattatgcttccattttcattttcaattcaatttgttactgactcaattatgccaatggcgccctcggagaaatatgaatcggaacggaaggcagctgttctaaggcgatgtggcggcggagaggtgtactagctgcgctggtcaccggttgctacttgcggctcctgcatgcgcgcggtaggatggcagattggttgttggtggcttgatgactgtcattccgatgagggccggatccactggtggcgctccaaaaaagcttcggatctgatggtggtcgttcagggaggtacggtagtgacgctgacggtggccgacgtccaggctatggcggtgccgcttgatggctatcgaccgatgtgatggtggtgatggcgtcggtggtggccgagaaaggtggcagtggaggtggttaccggccggccttgcactccgatgatgtgtggccatgccgccgtggacgtggtggcagcgaggactagcggcgtcggcgctcttggtggtggcgacatagtgatgttgggcggtgtcgggggctagtcctccgatccgtccattcctcggtcacaggaggagagggctggtgacgacggacagcggtgagggactagccctccccctgcaacggcggctcaactaatgggtatggtgatagtggtggttggttggttcggccatggcagtttgtgatgacgatggcggatgctcttggtgttggtgtcctagggatggcggtgacttggcgaggtccggcgctggttctgaccatgaccaggtgaggacaagggatggtgatcatcgatgacggggctggttgacaatgcaatggtcgttggctcgcccgatgcagataaggacgacagcaacgaaagtttttgatgactgcatcataggaaaggttgctaccaagcaaacatcgacgcaaaggtctgggtacggttatgtctcgattgcagtggagcgtcttcgacaagtctttgattgtagaggcagtgcatgtcatgctaaacggctccacgacgctctagaagcgacagtgatatcgatggtctacagaagatggtggtggcgcagcaaggacgcttcgtgacgcggtaagggcgttcagaatgcggctgcagcttaggtgttttggacagggcgtaaggtgttttggatggcgatggcagacagaaagcataaaagttggcagcagatggtgattgtgttctgcagagggagagatgatgcgaatataggtagctcggactagttctaattctcctctttccccgtcttgcactgcgacggaaagaataagtcttcgatgaaggttggagctaagtcttctcgcttttttttttgtgtgcgtgtgtgtgtttgtttcttttcctcagtgtgaggtttagagtctatgatctcgtgtatgtgttttggctatgtatatcctttgtagatatagagaccggattaatgaaaaatctattatctaaaaaagatttgttggtgactagtattatgacaattatgcttccaatttgttacgatttcactacatgttgtacgagccaatttatttgaaaagcatccgtgcttgaccacaacattttcatcctcccaatcgagatgaacgtatttacaagttgtgcacttgtgtacacacaattgcaacgttttctttttccttttcaatactttgtttgtcggtaccaacacttgaaaattttgaaaaaacgccgccgctagcgcaggtgtcctctaacatcttcctgatcatgcccccactactgatatgttttttctttgagaactactactgatatgttcgtcttgtttttttattcatactagaaaggtaaagatcatttaatttgtatacatgtatcaacggataaataatcagacatgatgaagaaaaagaacatcaatcatacgggaaagcacgatatgtcgtcctgctttatctcaagtagagcaagaattgacggaggaattagcaactttaatcaaccttttcagttggcatattcttttagaaagtatctacgtgtcctgttaaccgtttggtataatacaaatggaatcagatgatacaaaagtgggcaacgatgtacataagatccacacggactttgcgagtctcgttcgcttgctatctccacatccacacggactctcgttcgcaggttgctcgcgagtcatgacccacgcagtctcctacgcataatgggaattggacacggatgacgtaacaaaagttttgacaaaaatatcttccattttataatagtatatatctatacaaatatttaacatttataaaataatttgattaaactttagaaattttgatcaccaataattttttaagtgtttagtttaaaagcagaagaaaatatatacatagttaaagaagtactatcaaaaaaataatccagttttgaaatgaaggggagatcatctcatacctcccgtttagtgttcccattagaatttagaactgtccatagtcatgcatgtgtgtgttggagagctgccttgcttgggggctgggcgcagcaggctcatccgatgggaacgatggacagaaaacccaggtgaccagggaagagcaaggagccttcggctgtgtctgggaaacaggacttatttcaagaccctatcacatcggatgtttaacattaatttagagtattaaacatagattaattacaaaatacattctataaccttggactaattcgcgagacgaatcttttgagcttaattacattatgatttgacaatgtaatgctacagtaaagttattataattatggattaattaggcttaaaaaattcgtctcgcagattagctctcatttatgaaattagtttttttattagtctatgtttaatactccaaattagcgtctaaacatccgatatgatatggactaaaaaagttttagccccatctcttcacgtacaagagggatctggggaggaagacgagtccgatcggtcattatctaaaagaaatatttctatgcatgccaccatgctcgctactcacatgattcctgagaccgactcaatgatgaggcaacgtaccaagcttccagcaacaacaattttaattgttataatagtagagatatgtgagatgagcggaaaatgaacttattttaggatagagagtacatgtgtaaccacactaccataagaaacgttatccatatgaatatatacttacttcgtccaaaaagaatcaaatcctaactataaatctaaccaaatgcttgtttaggggttcatagccagagttcgaggttttttttggacggattacatctcagtggaaatctgacattgtagtatctctgaactcaaatattgtcaaggttccatttacaatactactattgtacaaaacaaagttaaagcacatatcgacacggtagagcggaaacgcctaatgccgagtttcatcatagtccctaaaattttcaaattctacgagaaaacaaagttctgaacaagattgccaaacagcacaagattgtgcctgtctgcgtatcaatcggtgtaggacttttcaagtcaagtttattcagcatccactagcattttttacatcgataagccaaaagttttcggtactacatgctagctactagactgtgacagacgatctgggcgcacacttcctccatcgagacaaatttcatcatctggtagcggcggttcattccccatatccctagtcttgtgcaggagaaaagttcctgcaacgatggtcacaaaaccacataactgtgttgcaatctgtgttgcattccgtgagaatgaatcctggaatagaaaaggcaacgatggccaaatatatcagacaaaaatggcagattgtcagttgaattggaaatacaaaacagttatttgaactcaaaacactcttggtcattgcaagagaacatcaagctgaaaggataatgctgtaactgctgatgggatgtaattttgaaatagtaggatccattgaagtcagggacacaggccaaagcaataagtgatgaacaaccttgtggagttgtggtctagtgagtttttctttttctttttttttatttataaagatggtctagcagattaatttcctccaaatgagttatcatggaaacacctaaataaaagcctggaattcctacacccagcaaaacaaaacatgatcttcagatatagaaaaaaaaaactgaagttcaacctatacatttgaactcgtgagatataaacaaaccttaactgcctaaatcttattatctgcagagatacctggcagttatcataatgcaattcaaaaaacagtttaaacttttttataattctttaatgtacattcagaagaaaataagaaaaagtaaagcaaaagcttcatatattattgataagtttttttttcaaatatatagcttattgctaaaaagtttcttctaatttgtggcacagtgccagtcagtaccagggtttgcaatttcggttgccaccgaaatttcggtggttgccgaaaatttgaaaattttgtgatttccgggtttttcggaccgaaattatttgaacttttaacatgttttgactgaatttgaacgaattttgaccaaatttacaaatatttgagaaaaaaacagaaaattttggggagatttgtgcttgctggtgggggccgaaatttctgaaattttgaaccgaaattttaaaccattgtcagtactaatctggagcgcattttctctcagggagacaaacactacaggaatcacatttgcagatacaattttaaagctatttgaaagtaacaagtacatcaccttgtacataatcatgttagcaaaaatagtaagtatggtgaacatcacgtagtacacaggagagaccacagctgtattaaatgagtccagtgcctgcaacaaattaaatagtcagaactcaaacagagttcaaacacatatttctgcagcagcctttatgatttagaattatcaataaatagtactacgtatctattttagaaataactcacaatttggattattagtgtacaatcatatcttctcctttactttcagaacaaattattgacttgagtagttatgctttgatgataaggattgcaaaaaaaaaaaagacatattccaaagtgtgttacacctgcacttacctttggaaaaactaaagcaaataaagcatttgccatactttcataggagtaaaaaataacaagctggccgtaatatgctagactgcttgcttagtataggttatgaaacaaacatagggaaataaatatatttgagtaattgaggcttaggtcatgtcagacattatagagcgattatttgcatattgagttacactttttgacataagctgaaatgaaattggaagcatagaaggtttaaaagtttgttgcagaatagagcacctcatgcatggccaaacatgatcacccatttaagcaaactcacacataaatgcaaatttacacaaatggcatcaacattatgaatgcttaccttatttaagtagttcaactgcaccaaacaacaaactataacaactactatgaagaaccatgtttggatgtagatgaactgatttgatccaccaaatgacagcttcaaggcaatggcaactgcctttacactgataacctgttccaaaaaccataattgtattaatccacaatcactaaccacatccattcaattaactgaatccaaaggtgatgtatgtcttatataccgtgagagatcccattgttgaacagattgcaatataaacaagcatcttcctgtgtccagaacgttcagcaacccagaaaatcaaaaatagaacagacaccacagccacacatgaataaacaataaaacctgcagaagttatccagataacaaaaccttgtggttaacattctataagaagttccattcttagaacaagtgagagaataagtaaatgctcgcaagagaactttaagatcattattattgggatatattacccaaagttgcaaaattttgcgatggttgtagtcttgcaattttccatagtattggtcaagtcagggaatacattcagttttaccccataaaaaggggaaaaaattaaacatccacattggatacatcgtcctacaattagcagatttagtaataaagcttcctcacaaaaaaaaaagattatgtagtaacacatgaaaatactagtgttttttaaaatgttagcagtacaaaagtatcctacggtatacatattatattaatacgaaaagataaaaatggatcctgttggttctttattgacagaagtattcaagtagtttacctggctcagtagcaagatgccatatttcatctattgaatcaatctctctctcctttggggcatgcaaaactataccaacagagccaacaacacacaagatacagccaacaacaccaaacatatggagtttttctttcaagacgaagtgtgcgagcactgcactgcatgaacaaaatagtaaagaaacaaaaaacatactttgatgcatgagtaaattatagaatgtggtatggatactacctaaatataatgctaagagctcctagaggagtaacaagtacagcgggagcaaatgcatatgctgcaaagtttgctacctcgcccagaatcactgcaaggtaaaacaagatgattaggaataacgtttgagcttccggttcatatcacaaatattggttcacatctaagtatcagtatccagtatgttgatttgaactctgtattaatgagatggctaccctttttgaaagtgaaataatcagaaagggaaatgtaaataataattataataataggatagatcgcagcagtgatattgaattgcagggcatgatgctcataagcactactccctccgtttcacaatgtaagtcattctagcattttccacattcatattgatgttaatgaatctagacatatatatctatctagatttattaacatcaatatgaatgtagaaaatgctagaatgacttacattatgaaacggagaagtactttttagcgattatattctgcagataaattgctaagttgaaaaccatccatgttttttttaaaacaaaggtcctaatctgagtatcaagtgttcagaattaagctgatccaagatttgctttttctcaaactttgcaaaagtacctactccggattcctgaaatcctgaatcatatgataatttaattgaagtgatgtaaatcatgtggattggccctaggattactgtactggtggtggatctacacaaaacttaatgctataattatagcattcagtgattatgcttcacactaacccatcatccaccatttttttcttctattttttatggttgaagtaaacaacaaaaaagtgaaccagtacctatattcaactaggacttattactcaaggtgtgtgacacaattcagtcagtagtgagcagcaaatccacaatgcagaatacttgattttttaaaaaacatatgactagaatacttcaaaaggcatggttctaatacacacttactagttatcatccccaaccaccataatggctcatacaagtatgagaacctccagaacctacagtgcatattaaaaaatatgaacaagtaatactacataaaaggctgaaagaattcaaaactgcacttgaaaacattatgcaattctacatataaaaagcatttgtttgcaatgtcaaaagttcattcagtttatatagttgctggaagatgtacaacctgctcttaccccagaatccccagccttcttgagcccaattttcttgataataaagcttgatccgataaatgcacttgatgatatggccagggtcaaccctctcacattgtctatagatgttaccatgccttctggaatgagaacctatgaacctatacctacaatccaaaatagtctaatgaagaaaacatttcatatattgaacttgtagacagtgatgttcaacctcaggttgcttttgcattaactcccatgtaatctgtagagaaagtggaatagatgcctcaccaatgtggggaggtgaactctcatatatatatatagcagaattacaatcaatactagggagttacataagaccaaaggtctaggagagtaactatctaggagtgtaaaagtttaggagataaacagcctatagattaataaataatcctaatacccgcccacggtcgcagcgggaggagcacgaacgcacagactggaccgaaaatcagtaaataactgaaccggcaagcctttggtcatgatgtccgcgaactggtgcgatgaagggacatgaagtacccggacttgtcccaaagccaccttttcacggacaaagtggatgtcgatctcgatatgcttcgtccgtcgatgatgcacgggattcgctgtcatgtaaacagcactgacattgtcacaatagacaatagtagccgaagcaatcgggacatgaagttccagtagcagttgccgcaaccagcagcactcggcaacggcatgagcaacggcacggtactccgcctcagcactggaacgagagacagtagtctggcgcttggaggaccaagaaaccagattgtctccaaggaagacacagtagccggacgtggaacgacgagaatcgggacaacccgcccaatccgcatcggagtatgccgtgagggactgaatcgggccggagccgatgtggaggccggtggagaggctgcccttcacgtaccggaggatacgcttgaccaaggcgagatgaggctcccgcggatcatgcatgaagaggcagacctgctgaacggcgtaagccaaatccggccgagtcaacgtgaggtactgtagggcgccagcgatgctcctgtactctgaaggatcggcaacaggcaggccgtcggtggcggagagcttggcacgagtgtccactggtgtcgatgtagaatggcactcggccatgccggcccggtgaagaagatccacagcgtactagcgctgcgagaggaagaggccggcggaggagcgcgtcacagagatgccgaggaagaagtggaggtcaccaaggtctgtcatggcgaactcggagcggaggcgagccataagctgctgaagtagtgacgtggtcgaagcagtgaggatgatgtcgtcgacgtacaacagaagataggcaatatgatctccatctttgtaaacaaagagagatgtatcggacgccgaaggcagaaatcccatctgtcgaatgtacgtggcaaaccgctggtaccacgcacggggagcctgcttgagaccatacagggacttctgcaatagacagacagcatcaggggcagcggggtcaacaaacccggagggttgctgacaatagacggtctcctctaggtgaccatgaagaaacgcattcttcacatccagttgatgaattggccaagcacgggatgcagcgatgctgagaacaacccgtatggtggccggcttgacaaccgggctaaatgtctcgtcgtagtcgatgccatgctgctgcgagtaaccacggaccacccaacgggccttgtgacgagcaagagtgccatcagagtggaacttatgcttgaatatccacttgcccgtcacaatgttggccccaggggggcgaggaacgagacgccaagtgccgttgtcaaccaacgccttgtactcatcagccatggcagtgcgccagttgggatcagccaacgcactgcgataattggccggaacaggagaagcagcggtggcgtgggtagccgtgtaggtcagcctgtcaaccggccgtaaggagccagtctgggagcgcgtcaccatggaatgcggctgaggagcagtagccgtgacaaccacattgggtgaagatgatggcgggaccgtcacggtgggccgacgggtgtagacatggcggaatggtgacatggtgccggctcgggtggcaccgaccgacagggcagcgccgatcgaggaggcactgaccaagggcgtgccagctgagcgggcgtcacgtgccgcagggacggtgtcgttcggcaagcgtcggccgaagaggggaacgtacggttgctcaacctccgtggagggagccaccgtaaggcgtcgcggttgctcaacctccgaggagggagccaccgtgagaggtcgcggttgctcaacctctgatgagggagccaccgctggagggagtccctgcaacaaaaaatcaaaagacgagggagcagggggagttgccgcgaagggaaatcgtgattcgtcaaacacgacgtggcacaaaatgatgatgcggcgagtggagagatccagacatcggtatcccttgtgggaggccgggtacccaagaaaaacgcaaactgtcgaacgaggggcaagcttatgtggagtcgtggcactcaagtttgggtaacaaagacagccaaagacgcgaaggtgggagtagtctggggtggtgcgatgtaggagctgaaaaggtagtgagtggtgaacagaggaggagggtctccggttgagaaggtaggtggcggtggcgagagcctcagcccagtaggaaggaggcatagaggcctgtataagaagggtgcgtatggagttgttcatggtgcggagcatccgttaggctttaccattttggggagaggtgtaaaggcaagagagtcgtagctgggtgccacgactagtaagaaaggaagtggtggctgtattgacaaactctctgccattatcagcctgaagggttttgagtggtaagccaaattgggtggaaacatactcggcaaactcaacaagatgacgatgaacatcagatttgtgtcggagtggaaaggtccaacagaaatgactgaaatcatcaagcaccactaaataatatttaaaacccgaagtactcaacaccggagaggtccatacatcgcaatggacaagctcaaagggagcgaaagtgcgagacaaagacctatcgaaaggtaatcgggtatgtttgcctaactgacacacatgacataaagaggtgtctattttattacaggaaatagaggacatattccgaagactgtggatggcggctggaccagggtgactgagacgacggtgccaaagcgtggaagaagtggcgagggagcaggacgcggtgttggagggagtggcagctggaagggtgtagagttccccgtgactattgcagcgaagaatcacgcgccgggtctgaaggtccttaacagagaaaccaaattcatcaaactcaatggaacatttattgtcgcgggtaaactgacgaactgaaagtaaattacgaactaaggaaggggcgacaaggatgtttttgagtgcaaatttggtggttcctatgggtagaaaagaggtgccacgacaagtaacgggaatagtttgaccatttccaacagtaataaaagtgtaagagttaggcaagcgtgtaacgaggataccatcagtggaggacatatgagatgtcgcgccggtgtccaaaacccagttgtttgggctttggaaggccatctggttcagtgctgcaatgaggccagcttgctcccaattgggctggcctgtaggagcagatgtgggcgacacaaatggcccagcatatgtggtattggcctgggagtagtgggccgtcggagccggcccaagaaggccggccgaagaggggcgccaggcctgttgctgggccggccaggggttaaaacaaacccaaggcccggccagcctccagctagggttggccacccagccggtcgaactccctccagcagagaagccgccgccaccagaggaaacgccgccgccaccgccgccagagaaggcctggcgagcgccaccaccacccccactgccgccgccgttccctcctccatttccaccgccacgtccaccatttcccttgcggttgcggcggttcgtgttgccgccggtgcgggcctggccagcagggaagccgccgccaccagtcccaccgcccgggaaggtctggcgtgcgccgccaccactcccactgccgccacccccaccgccagaggagatgcagccgccgggagggcaggaaccggagccgaagccgccgctggccaccagcgccgtggctgccgccaccctggcttcgttggcgatgcgcaactccttcagcaggagggtgttgcgcgctgaggtgaagctgggaggacggctgcgccggcgatgttatctccggtgttggagaagcgctcgttcaggcctcggaggaggttaagcacgagttgggattcggtgacggcgtggccgacgtcgcgaagagcgtcggcagcggtctccatcttctggcagtaatcgtcgatggaggagtcgccttgaatcatggagtgaaactggtggctgaggaagatcgctcgaggctctttgttggcgtggaacatgtcctcgatggcgacccagagctcccgcgcggtctgatcgggctccatggcgaggtcaaggacgttgtcggcgactgacccgaagatccagctgcggatgcagcagtcggcctgttcccaagccgggtcattggggcgtggaggagcggaaccgtcgatgtgagccatcaacccgaacttgccgcacaaagatgtgaagaaggccctccatttgttgtagttcgggtgggtgttttctagggtgatggggacgtgggatttgacggcgaccgtggcgtaggggtggaggaattcgctggtggtgctggaagaagaagaaccactcgaggccgaggaggtggaggactgagttgattcagtcgacatggctgggatgcagctgtgatggcagcgtgctagagcagcggaaaagaaggtaagagcctaggctctgataccatgtagagaaagtggaatagatgcctcaccaatgtggggaggtgaactctcatatatatatagcagaattacaatcaatactagggagttacataagaccaaaggtctaggagagtaactatctaggagtgtaaaagtttaggagataaacagcctatagattaataaataatcctaatataatccttaagctaagagggaagataggagcaactagatgttggctgattacaaacaattgtttgtttgaccttctgaagatttcataatcaaggaataaatttgatttatttatgtttttcaatgaaattatttatgttcgaatgctatggtgcaaatccattatgagaagaaactggtttagaaagtgatacgtttctctattccttgctaaagcaacatggaaaggactgtaggcttcagacctctccaactcatagaacatgccagagaaaagaaacacttaaaggaaatacttgcataaaatcgaatggtcataaatgtgtacagcatggaatggggaagcagcttttgcctgttgatactacaaccaaaatgtaaggaaactgaactttgagacaaaactcgatctgtctactgagaaaaaaaagtagtataataagcatgacggaaaaatatcaaatcgtaataagcgttctacatggtgcagaacatagaagatgacaaaatccatgttttgtgcaaaattcttctttggtagaaattaaggagatctgaatttgtatttcactcgacagaaatgaaatgaggacatatagcattagcaagacacagggcaacaactttttttttttagataatggattaaaaacccggcctctacaacagggcaacaactacaagcaaccctgcggaaaaagcttccccaaggcagattgctgcttaagtgataatgccttacaacctgcttcatcgcatatttgcagcacaaactactacaagtagcagactttggcatatgaaaagattttttttgtcctttgagaaatgtttcctatgaaagagagaattttcttcttaatacatgtacagcacatataaggctgtactcatgaatcatgatcaaagcattcaagatgccaaaacacgactatggcttttagttcatccctacatgagttaccaagaacactacggcacgataattaaatttacgattacaatctagcaaaggaaagcacaagaaaccacacggattgaaattcaagaaaacactagtgcccaatacttgtaagataacagaaagaaaaatatccatcctctacgtcaaaagattacgcaggcacacaacccaacattaccatcagaatctccttacctcgaaattcagcaagaaaggaccactagttccccacaagctagcaacggaaagaaacgtagatgagattatgagaaaacaagagcacaaccggttgataaccacaaggattaaagtgcatgttattgccagcgattctgagagctggcacgtgaaggttaagggaacttttgaccacgccagccatgcacaggaaagaggagaaagctttaaatagacgttaagaatgtcaatgagcacgagaatgagggaagaacaagtggaaattaactgccggctacaattaataattgctttgccagattaaatcaaatcttgtgcaaaggaaacggagagaaatgtgtagtagtaactaggatcattgctttgagcggttaattaccatcgacttcaattttaaagcaataacgaaattaattatcaaagcacggggtgagaaagaattaaattcccatgaaaacgtttgcttgctgctgaaccatccatgcgtaaagcaagccaaaaatcacggaacaaaactgacgtgaacttgtaaccggtggaaggcaaagcgttcgaaacgaaaaggggataatccaatgaagaaactgaaaattttaaaatccctcggggaaggaaaaaagaaaacaagaataccaccgaatcctcagacaacatagaacaaggca

SEQ ID NO: 6236 - DNA, 20361 bp, Oryza sativa
tatataaaaaatatagtaataatatatgtcatacaaatatagatatttatcaagagaaaccacgttggctttaatatatttaactgatttctatataaacttgagcatatttatttacattttttcaaaccatcttattttaaataatatttgtagtatcgtagagatcgtagaatcaggataccacctaagatttcgtaggatggtgtagtaataaatagtaggatcgagctactatgaaaattttgatactagataggatcggtatcattttggtttagtaggatcgtagtatcgtaagatactatgatacgaatcattgtgtggaagtactatcttttgcatgcaggtctcctagctatccatcggcgaaaataaaaatattttataggcaggccacgatttttgcattcgggtcttgtctccctcgggaccgatagtattggatatgttactgtccgtctgtgaaaaccatttctatagcagtgattgcctgttggcgtaaacctctagggatgtacggagtacatagcaaaagggaaaaacaaacaatgaataagaataataattatatgtaacatgaataagaatagtgattatatataagaatataaaatactatttggatatcccattccaacgccattgccctctgttctaaaatataagtattttttgttgacatcgatacagtcttcaagatactactttgaccaacaatatctataagaataaaatattttaaataaaaatagttgcatattataatattttgattaatgataaatcgagtaacatcaattttacatgatatatatatttttatttttttactattaatagttaaagttaaaaattgttaacttaccattatgctaaaaatgcttatattttgggacggattgagtagttaataggagtaattaaattgagaaattatgatggaggacgaatatgggctgtcataggccttctttctgcgcgctaaggcccacacggcccacctagaatcggaaaataagaaggcaggccaaggcctccaccctccatcggatcggaaaggaaaccctaagcgaagcggaggagagaaagcaatggcatccctgagcaagcgcggcggcggcggcggcgagggggagggcatcctggcctccttctcccggtcttcggtggcggcgcatgggcgcgaggcggcgaccatggcgaagaagctgctgcggagcacggggaaggcggcctggatcgcggggaccaccttcctcgtcctcgtcgtcccgctcatcatcgagatggaccgcgagcagcagctcaacgacctcgagctccagcagcaggcgctcctcggcgggccgccaccgcccgcgcctctcaaatgatccatccgtccatccttagcttctactgctgcctacctatgtcgtcgtcgtcgtcgtcttagtctttttcttcttttcttcttctcttagtgtacactgctgctactagtgtttttgcctgtctagtcggacaaatcaaaactttcttgttttcatcatcgatctatgctatgctgctctgatgagatgtcgctttttctttcctgctgctactttattttcacgctcatcttatcatgccgaataaatcgatcggttactatatttcattctgtgcgattcctgtgccgtttattctttctcgtcatatgctgttgtgatgagatttcaatttgcatcaccagggttactctttttcttttatggattgacatctccatgttcatgaacaacagttagtataataattaaggtttttttaaaaaagaaaaaacattatagtctgtaataaaaaagagaacattgtactccagtttctaatgttggatcacaaatgggaacttaagaggatgatttcttattcataagagtaagactcgagcaatgcatatgttggtttgttacgcccccaaaactttgggaaacagtcatgtgtgtgaaggtaaccaaacattttgatacaaacagcactactttattgcattttgatacaatcaacactggagtactttttattgggtactcctacttcctccaaataagtgtactagggtttatatgaagtaaaaccataataattcgtccataataattgtattccttctgtcacatcagaagaatgggagagcaactgagcagagcactagcagagcaagtaagctattctctcaactctcatccttattcatcctttttttttctgaagtaaagcagtttctaacttgtatatggccataaattagagatttggtgtttgttgttattggatgcacaactatttactataatattttttagaactatacatggcgctatactcaaaacaaagttgggaacccctctcattttactctagctctgcccctggctcctgtggtgcaccgccgttgcagtcaacatgtttcgggggctcatggccgaggccttctgagtgcttcgcaagctcaagctgcccggctcatggccgaggccttctgagtgcttcgcaagctcaagctgcccgtctctgggtatgggatgaatattacgttggtcgaggtaggaccggtggtgactggtgagggaggttgtgccgtggcagcggcaatgctggggctgactgaggtaagtttctgtttgtccctatctccaacttggtgttgaaaaagaaaaggatttggatggtgagatttggacgattgattcagtgatttaccttgctccctgttgtttgtataaagtttgtaatctgcgaatctgaatcattagacagcaagatactaagttgtataccattaaatagtgttgaaacagaagcacttccctcataagtcttaacaataaccatatttctccattgtttgctctgctaacagtattaattaagattgtaaaactgtatttattttatgtgccttagttctaatcttatggagggggaaaaccataatgtttacattttaagtttggcaggaaagttggccgaaattgcagcctacagattttatttctagattctatagtcattgttctcaacttgataagagcaaaccctgctctatttgatagctttctttggaaatgcttctttctaacatagaattgttcagctgacatcagtgttaaatgggaataggatatgcacaaaagcagaggttgaatccatacactcaaacgatgtagatttatacagaaatgttttttctctcaagctttgcaggtcggtttttgccatttgttactaattattctgatgcataactgcatttgattctcatttttataacaaatgctgccctgctttcttcaagtacagaggccaggatcatttttgtcggccatgattgtggatataatttctagaaagctgccaatggcatcaatgctcttcacaagctatgttttcttaatcctgctaattttctctcaaatggacattctaacaagaatctccctgtttggagcctggttttgtatatctgctagcttcacaattgtatacatatatgctggagtgcgttcagttctctctcacatacttcactgttacttgcacatagtagtattttttgtgccactgttctgacaatgatcatttattggtttcactatacttacatgactgctgcccatctcttcagacttcactccctgaggagattcaccataacaatacagtgagtttccatatatttttggcattgattttgttacttaattatgggtttaggattgattggacaacctaccttgcattgcttaattgaagtgttactacattgttggttacatgattacttgtatgccattgtagctttgatttggggcctaggaccctatttcaccctctgtgccacggtgcaatttctgatatttaattgtgtttgcacttgtttaccagaatggcatcttaagtgcaggtttcgtcttgttgaagaattcctataagctttgtcattaggattacagcttggctaagctattgtgctattgaccatatcaaggaacatgtttcttacctctcccacggattagctgcagttgtaccgtgttgatgatgtgagattgggtagcctcttccctgtcagtcgaaggcctctcccgtgccttgtcgggttggtcctctggattaccaacctgcggtaatgtgtcgatgtcgttgcccagccaaggcggtgagggtggatcttgtagagcatcgacaaccctgcgcggtggtattataagtgtcaaaacggtcgagtaaatgatggattttggctgattttgagatgaagttgcatatacgcagtcggtgttcttcggggttgaatgtagggtttcttgttgctttggggggggggggggtgatttctaggttcgggtgacttgcgagacgctgtgacttcgttgaggagggaaaacgaagtgctgtggaaggaggttcaacagagtagggcatagggggaagaacagaggaaagcggtagatgatgtaaggagtgtggttgctctgaacaaagaagaaattagaagtttgaaggccaggaaccaaaagctagataatgagagaaatgtgcttgtaatttgtgttttgtcatgtctgtttgtggtgtttgtgttgttgtttgggaagaactgagattatttgatgtgtggtctataatttgtgaacaagatcgtgtgtttggtatgcattggaaacaacatgtttttcatgaactatatgtatcctgagttgtggtaaccatttggaatgaatgttgtgaatgaatggtttatatgtgcaatttgtgcagcaaacctaaataatacaccaaatgttcaatttttgaacatgacaatggcatatgtttcagctagttgcaaacaaggcacttttggtatttgcaaacaagcagaaagattggatgatattgcataatggaactgaaatatttttctccatcattcatacaaaagcaactgaaattgtctgacattacatctcagataggtggcatagttagccaaattgtctggcatcacaacaaacatagcagaagttctaggctaataggtctgacattacatcacacatagttggaatattaacccaaatagtctggcctcactacgaagaaagctgaaatactgggctaatttgcttgccattacatcataaaacaagtacttccattactctaacagtagtaaacgtgccatattcagagcttgttagtttcccatgggggcagaagaagaagtgccccaccagatttcttctttttcttggtttgtgtaggttcttgagttgagacacaaacagatgctttgccaaatgtgagtctcacatatgaagttgtagagctctaggaatggggaactatggcttgcatatcaactctagctgaaccaccatgttctatagaaactttagccttggcatttaaccctgaccagctcctgggtctccattggtgcctgcagtcaaatatatttgcatatgttgaacttgtagtgattacaagtaaactttgcaagggagaaagatttgcacataccttgttcttggtttttttttgggccatggattgttgggttgtacttgttgtacacagggtgactgtcttcgtcttcgtgctttgagcagaactccctgctgtgcttgacaacaccatttgctgaccttgagatagagctgggacttgggccgtgccgggctagcacggcccggcccgacccatcgtgcttcgtgctagaatgggccgtgctggcccagcacggcctgctaatcgtgccgggccatgctaggccgaggtggagaagacaaggcccaagcacggcccaaagacatgtcgggcctcttcgagccgtgccggcccaagcacggcccagaattacctgaggagtcgtgtcgtgcctagggttttcgccggggcccgcgcggccgcgccgacccgccgccgccgccgcgtgctccctgcggcgctgcccgtgccagccgccgacgccgagagccgccgcaaaggaccgacgtcgtgcggccgcacatagccgctgtcgtcgcgccgcgcggcccgcgccgagggcttcctacgccgagagccgccgccgccgccgaggaccgacatcgcgcagccgcgcatagccgctgtcgccacgccgtgcggcccgcaccgagggctgccgacgctgagagccgctgccgccgaggaccgactcccgacgccccgggtgcctagggtttttgcctctgaccatgtgctttgcccgatgctgattgataaatgaaataataacaggggaaaaatcagggtaaatgagagaggaaactgaaataagggagggaaaaaataagagaggggaaatgaaaaaacaatgagataataatgtacatggcttaatgaacacaattagaattgacataatatcgtaaataacttgagacaataaaattgggggaaaatatatatgttaataatttgaatatatagttgttgcctcgttaaaaaccttacgccctaaagtagggttccccgtaaggaaaaaagagtacaacaactattttacattataccatcaattactccagatcaacaccaccatcatctttggtaaggcaaatttccgccaatgcgtcttccattgcatcggcaaactcttgatcatgtagacagtgttgcgttagttcgtctgcttccatccagtctttaagacaaaatattgacttaaccgtctcgggtgtcaggcatgaccattgttcttcaataattcttccagtaacgttgaatgcttgctcggaagagacggaggagctggaaccagaagaatatctcgagcaaagtgagctaacacaggaagagttcgctctttctctttccaccacccaaggagatcgacatcgtggccatcaagcgtcggatcatgctcagtatgattggtggcgaggtagtggttaagctctgaatccgggttccatgttgatttgttctctgaggatggagaggcttggtcgttgcctatatactgcatccacaaatttactgcacttgacttgcttgctttcttttgtgaggtctgctcaggaactcggggagtaccaccaagcttggttcggtatagacggaaaaccctatagagctcatcattgacatgttgaaaagcttcagaataatcaagccccactgcatcacctattgagttcatggcaaccttggcggtttccaacttttgcgaggatcaagtatcaaagcaaagcaataaaggtgaggtatagcggtgaagtatttgagaaatttttcttccatgggtttaacaatggaagacaatacgatcagaacggttttcatcaaaaacaagtgccagcttccaaatccactcaagcaccaaacaagatgtaggatagtaaattcctgataattgagctatagcattataaaagggcttcagaaatttatgcacacgtgtagcgatctcccactcatgattggtgagaatcacaatctcaccatcgccgttgtcatcggtatccttcattcatatttttgaaacagtagacggtaggagatctaccggatatattagaagaagagagttgaccctgtttataaggaaaaccgggccttacaactgcatggtttgctaaggggaaactggcaaacccttacacagaagacacaaaaaagcctgtaacaaaactacgaaccactaaagagaccgagggaagagcatgacctttaaggcgaagcctccaaggaggtgaacaacgaccaaagccattgttgacgcccgcccaaaagttggactgggttttcacccaaaggtgggagagagtccacaaggaaacacctccaaggagggaatggcacccgtaggagtcgatgttgctgatcctgaaagaccaggcaaggcttacacccaacactctcacaaaaggtgcaggacctccaagaagccaaagtaagagtgttgagtgttatcgttgcccagctcatcagctgacccgatgcagcagctccgactccgccttaacacaagaactctcgcaccctagaggtaagcactccggtccaaactcggaaatacagcaggttcacacggtcacagggcacaagaagcaccggcgaggcccaaaagccctgattacagtcagactggaccaaccccacggacaaacaaactcctcaaccactgagagactccacggccggatctggaagcagactaccaaaagaagggaggagcaacaaggaggaaaggaggcaggcaggcctggggaagaactgagagctggaagcagggcaaatgggcatcggtgtcaaccatgtaaccggtgaggagctccaggcttcgcgggatgaacctttcgactgcagcaaccacctccaacttcaccaccagcacagagagaggggcactggggtgatcagcaaggctcctagacaactaagaggaggggggcggcctccccaatagcttgtgccaagaggcggcaaatagagaagagagaaagaaggaggaaggaaagggagacgcatgcctcccccaactgctagtgccgagagacagcagcgagaggaagagagataggagggaaggaaggagagaagagggtggtttcaggggaatgggggtggccggagacgctagcacaccccccagtatgacccgatgtgccgcgaccgcaagagccagctgccgccgcagccccacaagagacggcctctgccgcccacatgccggccaccacccacatgcaagcaacaccgccgccgcacaagccctcacgctgcaatagccacgccgcctcaccccgacgcgccgccgaccaccggagctggcagccgctgcaacggcaccgcgagcgccggcaactgaccacacgcgtgaacaccgccgcctcaccacccatcgtgctgccccgtgagccgccacgggccgcagcggccaccgctgcatcgcgccaccccacgatgctgccaccagagctttcccagatccgatgacagcggtgccggatctgccgctgcctaaccgggaggcctccctgactgcactccttgacaccagcgaacgccaactcccccacgtagagagggggcgccgccgcggaagaggccctgccgccgccatcctagcttgccagtcggctttgccggcggtgagctccggcggtggtgaggtagagggagggggagaggggagcggcggtggcggcggtagggtttgccccccgtgtcgcctgcgcgtgggcgatgcgggggggggggagggggagggggacagactctcggataattgtctagttgtatccttcattctgacatgcatctaattgatgaaaacagaaattaactcctcctacccttttaactgtcgcagcaataggtatgttttgttccacctatgtttgacatcaatgccaaacatccgtccaggtttcttcttcgctttacagtagtcctggaacctcgctttgaccactgtgttacctcctatgatacgaacagaatgacgaattttgtttaacaatttatccggaacaattatgcctgcaaaacaaataggtcgcatacattaaaataaataagcaatatgccgcatacactaaaatcaataaattattaataacattactacctggttgaacgatgagattgatgatgtgacaaatgaatctctgatgaataacgaagcctccaacataacttcgcagatccgactccaaaatcgatatggccgttgtgtttgctgatgcattgtcaagagtaatagaaacaaccctagattgtaaattgaattctctcaatacctctaggattgtcgtggctatggcatctcccgtgtgtgacgtcatgagttggaaccctatgactctcttatttaatgaccgattgttgtcaagataatgaagaacaacactaaggtaagatgttctttggtgttgggatgtccagatatccgatgtcacagcaaatgaaaaactagtagtactgaaagtttgcttcaacacactcaacttagaatgatatatagctgtaatatcgttcttggtggttttcctagaaacctttttgtactgtgggcaaaaagctttttggatcattctctcaaaatgtttgctttcccccattctaattggtagatcctcagcaataataaacttagcaatctcttctctagctatttttggatcatagatccatgtacttacagaaccgtcagagccgaaggacaattgtgtctgtcttgctcctgccggtgccttgttcttgagatgcgccaagtaatgccggttgagatggcctgtccctgaagaagtagctgcagacaaaattttgtcgcaatatttgcattgagcacgaggtatacttttaccgtcaaccatctcggtgaatacttcgaagtgctgccaacactccgctcttctggcagatggctggttattggaatttggtgtgggcaacgtcatggcgttggtgtcgaaggagaagttggcctcgctaggagatggctgatcatcgtcgtcgccctccagaccatccatgtggcgatcatgcatcccgtagtcatcgatgcccagggatagctgtcgggcatcgaccgacctctgggatggaccggttgttgactcgtgttgacgctttttggacctccgcatattttctatgaaaaatagatacggtggggagatgtgttgaaagaagaagaagtgtgttgaaatcaaaaaaaatgggtatggtttatatagggtatgctagggctgggcgccaggctcttcacctctcccttgcctcctcggttatcagccggcgatgcgtctgaactctgaacgactcctcggcggctcgacgccttgactgatgacagatcgaccaatggccatgccgtgccatgagcccatgacacgtgactaaacgactcctccgtgctgaatactgatcgaccaatgatcagtcatcagtcgacacctcgaccgttcgatgcgtctgaactctgaacttccacgcaaatgaacatgctttccataattccatgcatgcaccattgcagtaaacaaggacacaggtaattagccatttaaaaagttgaaaaaacacaaacaaaaatttaattgactagacagtggatatacacgatactaatcgccaatggtaagtgatcccagaattaattagccaaaaaaatcatgctttccatgcatgcacggctctctgaattctgaaagactgaaagcactgctcataagttactgatcagtattcagcgcagccgccggctgacctcatcagttactgaacgcatcactgaagtctcaccacgcacgcacgcgctcggcggctcggcgctcctgcctcctgatctcctcccggccggcccgaattgcacgcactcctaactcctcgcgcgctcggctaggctagagctcgggccagcctttgggcctttttcgtgctgggccggccttcgggcctacgagcctttttcgtgctgggctagcccaagcatggcccaactacgggccgtgctagcccggcccattgccgtgtcgtgctgggccgtgctttccctcgtgctaggccattgtgccttggaccggcccgagaaagcagggcccaagtcccagctctacctggagatactactggttaagaaccaactatgcctaaaccggctataagttcaagtgccttaatttggtttcggtgattaatgacaaatctaattatatgagactaacgtttttatgagcctttctttgactagtctcatttggatatggaagtaaaaatgatgagaggtatgtattaaacttcacatattctaacttggtctctcttgtggatccaaaatatagtgtgagcttcctatttgatctttattgattatgtgcatatgtgttccttcatatccatatgtatgcacatcttgagggggagcttattctatattttgtttattataagatttctatcttgatttgaaatcatttttcatctcatctctctgtattgtttatatcgggttattatccatcaccaaagagagaaaagattgaaagatcttggattaaacaatttgtgtaattgttactttggtgatagatgataaaccgatgtttatgggattaacctctcttttgcataagttgtctactaggttatttcccgataatgagatgtggaagacatgcattcttttgtgatggaccttaatcatgacaaggatgaaatgcatggagataaaacgatatgtaccacttcttatctcctactttttgataggttcatatatatgatttccatgttattgatatataagtgtgagactaatgtttactcgaatgttatcttatttagtctcatttacattgagaacatggagatcatgaaggtataagttttatgttggtctacatcattactacatatgccttctctatatgtataggataaacccccattggtcattctctaattatgcatacacttgcatctcttgtatatttatttgtatgcatatatttagggggagcaaatcctatacatttattgtgcatgttctagatccatgttgttcacctattatttatatcggatctttgcacttgagcttgcatacgagtatatgacacttgtgaagttaatgaatactcaacaaacatatccatatctttcatatgcaaccggttggtcttcaagtgaaggatgacaaccgatttgttgagactaatgttctcctttgaggtgtgaaaaggaataggtcccactatgatgaggctaatgaatgacaccatgggttagtggtcatcaagccaaggacatcgtcatgttaacaagaatgaagtcaagcttgtgatgagaataaagtcttgacaaaggatggacaagacctcagcataaacatggttcaaccggatggtcacaagtgttgatctcggctcaagcttgaccccaagatggatggcgcaaggcaaaggtataatgtagctaagaatgttttcttagtcttttcccggtcttggtgtttggtgtagaccggatttgctagatagacgtcgtactatcaagaggggtctatgaagcgagcttgtggatgatcttgtgccatattagttcatatgcatgtaggtgcattttgtgggcttgtctaaccaagtgtgatgagttttctcaagtcctaaaccaagagagaagtgggcatgtccaataggagtgagtgacatcttgtgggtatgtccggtggatatcctttggagtgtgagccctttatccttgacttaagttgtgtttcttggatggatttttcatgggttggatggccctttgaataagctttccatagagtccaagaacgccaaattccgagacccgagtcaagagatatcgccgttttactaacggtcggttgagctgaaaagtgacctgcggtctgaccgtgggcattaggccggtctgaccgggtctgttagccggtctgaccggcgtggtaaggccggtctgaccggccccactggtttgttgcactggtctggtttttggtggcgatacagagctgccagagccgcaaccggtcagaccgagccgacggcggtctgaccgagccgtggacggtctgaccggccactacactgcggtcagaccggccaggttgagtgggctcaatgattgccctgtaacggctagttttctagccgttacaaagtagtccggtctgaccggcctcacaacggcggtctgaccggcagagcacaaagttggggatttcggttccaacggctagttttggtggttgggggtatatatacccactccccagcagcaagggtaaggttttggcactccattgcattatcttgaaccccccttgcaagagctctcacacccttgtgcacttagtttatctagtgaggtgttagagagtgagttaagccaatccaagtgcattgcttcattgttatagctagtgtggcacttgatcatcctcggcaagcatcctagacttgttactcttggaggttgccgcctcctagacggcttgtggaggtgttgcccggtgacctctccgaggagattgtggaggaggcccggcaccgtttgtgagtggtttggagttcaccaccttcggagtgaaggaagaactaccccgagtgatcgaggcttgggtagtcctctccgtgggccggctcccgccttgcccaccccttgacgaagggggcgtgcggtggcttcgtggttgagcggtggagttgggctcgcctcaacggggattaggaaaccggcgagtttccgaacctcggtgaaaaattccttgtctcttgtctcatttatttgttgcatttacatttgtgctatttacattcatagagatatatttgagcccatatcacttaggtttgcaaaacttaacttagtttcttagttaaccttgcacctcaccttgcctagcaacttatgttagttttgtttaagtgccattaagttttaaaaccgcctattcaccccctctctagtcggcctccttgatcctacaccggcaacattatgctttgcataccaagatttttggtgcccaacctgcttgcaccttgtgcatctggtcactgtcccaaacttggacatttttgttggcttgggtggtttatgcatttttctgctccttccagtccttggtatgcctggcatctttatgtatctaggagtattgagtggctctctatcatcctggggccaagaacatatgtacttctgaaggcttccacagagtaacaaggtacaatgtagtcatctagctcgttggttctataaaagatgcatgatattacatagggcatggctaccagtaactataggagcattctttcttgtccatgtgtactgtaaatctatgttcatggtgcttaacctcaaaacgatcacctccattgcaaatggcatggcagaaagctgactcactgatgtatacattaagtttttttcagaatacctaggcatacaacagttgtccatctagcaccatttgttttctgatcactgatcctaaccatcatttttctcctaattttcttaagcattgtgattattagataaaacttagattctagtttccatttgttgaaagattcacacatgttgttgtccactaagtcacagttagaatctaacctgaaccatgctttgcttaggatgtgtgttgaggatgggttgtgctccagcctgaatcagctgaacaagttttgccctagcaaggttaaataacatcccgcaaggagcatttgcacacttccaaaacttcttttggaattgcttgtcatggaagtgtctcttccgattagcatgtgcctagcgcagttcctgtgtttagcctcaagtgcccatttctgcacagcattaaggataccctgcatagcaagtaaaaaattgagtcaggaacatgttatggaaaatgagaggggactgaattagttatggaaaatgagaggggactgaattagtgtgtgatcatattacctcttgttggtctgaaatgaagacccaaccagctccagtgtcaatttttaggtcactgcaaagcaaatccataaaccaatcccattactcattgttctccttggtaaccactacccatgcaataggatacatctgattgttagcatttctccctgtagcacatagaagctctccattggttgctcccttgaaaaagcagtcatctagtccaataactctcctgcatccagctgagaatccttttttgcatgcatctaagtagatctaaattctcttgaaaacttgtggattcaagccaatttccctgttcacaaccacaatgctaccagggttacttctgagaagctcaagttgataattgaacaacttttggtactgccccctagtagcatctaagtgtttcttcataaaaagccactttactctcttcagctttgaaacagaagcttatgcaaagattgatttgagaatccaaaatagagccctacttatgacacatttgcacaaattttacagcaaagctcatgtaccttgggtaaatcttatttggtcctcttattacaaggacacagttcctcagattgtgagaagttgtggttcgttttggtggagggacatctttcagtatgatatattgtttagaggcattgcaaaacaaattataggctctgggatagctattcttttttgggatgatttatgggagggagttatacgttccgtcaaatatccccgtttatactccttcgcaaagcacgggaatgattctattgcacaacacttggccagaggcccccaagatcaattcttcctacccctctcgcaacaagcgtttgatgaatatatggacatgcaagaaaatctccaatctcttaccttacggaggttgatgattcatgtacattcatttggggatcagggaaattcacttcgcagctctgttacaagctcagttttctagctctgactcccccacctactatcaaatggatatggcagtccaaagtcaatatgaaaataaaggtctttaggtggctcttcttcatggatagggttaatacaagggatctccttgatagaaaacactatgcgccacccaatacttcagtcctttgcctctcttgctcagctaatgctagagaaactagagatcacctgttcttcctttgtccttttagtttggcttgttggagtcgtctgggatggacatggaaccctaacttggattttcatcaaaggatccaggctcaaaaagtggctgtcttgcatccttgctttatggagctattcttaattgcctcatggaatatctggaaggagaggaatggacttattttccaaggcatccaactctcagtgcaaaactggttgatgaacttgaagttagatttgagcttacatttaattaggctcaaagaatgttataggcccctagttcaatcatggatagatcaattgtaatttaactgttttttccttcccttttttgcctttttccttctttgtacatatttctagaaaattaatataccgtgggggcctcccccactgtctttggttcaaaaaaaaacagaagcttatgcaaatatttcttctttgactattgctttcatgtcagccaggggccaagaaggattgacagatatgaagttaccatacttttcagcaatcctaacagaggtaaccatctagttatccctcctaggtggacaagcatgcaggttctcaaatataactatctgccaactgtctgaccttgaattcttggaaagaagacatacccggggaatagctaccccaatcacaatttgccctaaccctcttggcatcatccctaacaaagttaatgactttcttctcagcaagagcatatgttgtgatagctttcttcaattgcttcttgcagttgaacttcatcccaggttcaaatgtaggaacacatgccttcttcttgtaccttggatgttgactacttttcattctcacctccccatcactaccaatttcctctactaactcctcttcatcattgtctgcatatggggttccattcccttcttcatcactagcttgcattgtcggttctgacctctggctttgcaagaaacaatcatctaggtcctctagctgccctgccttcacctttctcttagtctccttgtagtgcttctctatctcagcagcctcctcctcatcatctgtcacacccagaaattcactagtaatttccgaacttatttgtgcattaaatcctcgtccaggaatcagccgaggtacacaaactgacaatttaatatacagattcatcataataataacgtaaatacttacaaaagaaaagaaaaacaacagcggaattacggtctagcgaagctctggctccactcccacaggcagctcaactggggtataagccaaacgttttctccttcgcaacttgtcttcaactgaggtttgattgattattgcaaggtgagcatatgacatactcaacaagccacacagcaaatatgcaagtgcacaaggataccaaagaatggcataatatagggctcatttgcaaaagcagcatttagcaaacatttgaggattataaaacagtagagtaattaatcatcaattttaatcaacactaaacagcacacccatgctgctcaggcccaaccatcctgaacgaccatacccggctgtacagatctatctccaaaccaggaatataccattccaaaccaggagctaatcaaattattaccaattatagcatcatttattatggtgagaagtgtgagactaatcacgaaagacattgttagacccgcccataaccgcgggcatggctattcgaatagttttactctggccagaggtgtaccactgtacccacaagacacagccccacaacatgtcaccatgcgcctcaataccaccacggtacctcggaaaggagctgtgacagtacccctcgcacaacacaatccaccatagcgcaccgttcctggatcataatcacccccttataaacaaggcatggactccccagcgacccccgtaggcttatctccgctacttctcagtctgatgctccgcaatgaaccatgctatacaaaaggtaaagccgttgtccacgctggcttgtggttggcacggttaatgtttcacaaccgaaactcgtgaaccggtccttaattgtcatgagcacgaccatcaaaaccatgtgctcacaacccaccattatcaagttttagttggcaaattaattaattaaccaatcacgatcaaccatcgtgagcttccattaaatatccataagtgatagtgaagcatgatttatcccattagtgagctattgtttctaagcatggctaagcatctattataagcatctagctgaaccaaaccaatatataaggttctagctaatcaaattataacccataggaaaataaagtcatctttggccataattaaatgggaaaggctcaccacccggtgacattcgaaaataaatgcacagttcaaataaatagagaatttaaatataggatcaacatgctcaaaggaattgtgtttgggatctgtgtgacttgccttgcaatattcggtcttcaattagtcttcttgaatacttccaacacctcacgaatccttcgaaacgacataaacgacaagctaacacacaaaacgaggaaaaagactaataaaaaccaaataaacagtacataaaagtaaacaaacatgtagatcatgattttagataaatttagagacttgaacggtctcattccgatttcgtatgaattaattacgaattttacaagatttaattccaattaaacctattaaagaaaaagactattccacattaattaaaccatttacagatgatttataacggagatgaaagattaaaacaaacttcggaaaaagattagattatatttggtagatgacatatgataaaaagaactaatatgccattggaaagagtggaaatgatttatattgattttgggcggctgagattaatcttgaccgagtcgaccaagatcggatgacttagattgatctggcaagcgagcctcatgagataccgactcaacgagtcaactctacgtgacacgggatcacccaaatgatcaaccgaaaccggcgaacggaaccagcggctctgaactaaaggacgactcaacatggacgaacgaacgaagcacggggaacacctcgttcgaacaaatgagcgaacgactcagcaacggctgcaactaaatcggtgagctagacacaattcacggtaaagccccggtacggcaaacgataggccggcaggaatttagggatgcacctacagctagacaactcaactaccgagcaacgggctaaagcggcggctaggtttaagcgacgcacggctgcgacacagtacagcagcaatggcacgtcacagcacagcggccagacagcagctagcggcaagcagttacgcacagcagcagcaacacgactgtggcagggagcggcacaacggcagctagacgactagcgcagcggtgacagcaaacaacagcggcacatccggtagcgacggtgcacgggctagggcagcagcgcggcgaacaacaatgcaacaggcacggctgcggctgtgacaaagcggcttggcaagtgcggccgatgggttgaaatctaaaccaaggagacacggatagacgtcccaccgaaccaatcggggagagatagatgacgacggtgaaccggcggcaacacatggagatgacgacactagggccaaacaagattagattagattagatgggattaagaccctagggataaactacactgggaacggcatgggagcggcggttgccggcgaatcac

SEQ ID NO: 6237 - DNA, 57538 bp, Oryza sativa
cggcgtcatctattaaaaaacggagggagtatgtaatttataagtagataaattttacaatatttagtataaactaacagatatcaagactaaaaaaaatatgtacctactggtaacttaaatcactcttgtaattagtagcccaacaactccctgtatgtgtggtgccggttcgataaaaaaagaaactttttgtctatatggttaaaatgacatgagttatctcccctaaagagaaatatattgtactctctctgtttcatattataagttatttgatttttttaaacttctttaagtttgattaaatgtatagaaaaatatagtaatatttttaacacaaaataaatgtattataaaaatatttaataatgataatttcatattttagatgtttttaaatttcctataaacatgatcaaacttactaaagtttgactaggaaaaaaataaatattttgtaaaatgaaatagagggagtactggttggttgggtgaggaggcgtggggctagacactagacaaatacttccttcgtttcacaatgtaagactttctagcattgcacatatcgatataaatgttaatgaatctagatatattatatatctagattcattaacatctatatgaatatggacaatgctagaaagtcttacgttatgaaacggagggagtagtatcatactatcatggcgtccggctccggtctcctggaacatgcaaagcaaagagcacagcactggagcagccgagcagaacgcacatgtagatctagtgatcacccacctaagcaagcagcatggccggcggttggtctacgccacagatggtgctttgcccgatcatcgactgtctccctccggagtccggaccctcccggccatgcggacgtgggccaatgcccaatgcctgcatcatggcgatcgagtttgtggaaatccggccgtttttgctttggtgtcccatacgaccatacgcccgtacgtggcgaccgagcaagctacatcccgcgaggcgcgcgcgtaaacaaagaagctgctaagagcaggtacaataagtctagtcagcagactatactaatactattgaccttgctctaaaggcaaaagccgcgtacaacctattggtccctggcctctctccaacaaatcatgagacgcgtgaggaccctcaaaaaaaatataagaaattataaacatgttagaaattaaacacgggatatcggattaaaacgtcacacttcttaccactatatgtcaaatgcatcttgtgagacgtgaggccccgccggttgagagggagagcgagagctgctccggatgcgcgcggttgggttcactgtggttgtgattctcgtgtccaacattcaaccgtctctcttatttgatgaatttataaaaatatatttaagaacaaaagtcacacgtaaattactattcatgttttatcatctgataacaataaaaatactaagcatacaattttttcaaataaaatggaacagtcaaacattgaatataataccattttttaaggtaaagttgccaaaaaaatatctacatttaatttgttgctaaatttgctaaatacataaaaaaatcatgctaaaatttggtaagattattttaaatataatctagacagtccctaaacaatgtaaaactatggtcttttttagggagggtggaagtactgcagaatcgatttttttttccggagctcctgtagctgacgtccactcccacagtcccactcacgcgaggggcatggccgcagccgcggactcctggtgtggtgtggtgtggtagttgggaggctcgatttctccaagaagttgccggttttgacggtcgtggccgtgactccgtctagttgcgccggtttactactctacggagtactactaccacagagagcgcggcgggctgcacgagcgacgactgaccgaccggcgagattagcgtcaatttgcacggcggtctcggactctcggtccagtatacgacacgactcggttaatttactttttacctcatcctttcagctagttgtctggtacagctagaggggcaccataggggaaaagcgagacactcatgttttatgttatgttcatgatgatctcatcagtacagtactttctctctcgatcggaatctgtcaacacggtacaaaaacgtcaaacgcgtgcacaatacagtatatactatagtagtacttgttaagacaaataatcataagaatcataagtttaatcatcagtaagctactgacctactgtactgggacagaaacagtactacggctgcatgggcgtgatcaagccactgttcattcctgtgcagttccttcaccggcgaattttcctgcatgcgagggtggaaaaaacgtgctagtatctacttttaatttgcctagcttggcgactattcttcaggtttggtggtggattctagcagggttcagagctcagattgtcaagttttggcagtttcagttttcagacctccagtcgcttcggtgaatttagccggttaattaacttcctaaaactggcgtacagctcgaacgtgataaagcacttgagtaaaagacctgttagctgcatgcggttaactcgcaaatggggttttctagaagagcacaaggacgaattagaacgcaaattaagttcattgcttgcctgtaaaaacgggactcgtgtatgtcaattctcatcaggatttctgcttccgttttccctcctttttctcccatcaacaacggcaacaacgaaaggagatgtgcactaaattattattaaggaatattacgtgagatttactgtgtacaccggtctgcaatatgcgtcgcttgttactccagctcatccgattggagaagagggacaggtagtgaaatactccttactaaagttttcggcatgcatcttttcccctaaattaatcaatcccgagagccgacagtgactcctgcatgagttatgatatgctgaaacaactccacacgtcgaaaattcagacaaaattctcgcacgatgcaggagaataaatcgtgcacccgctggacccatctccaatgggtgctaaatcctccggtgtgagatgccgcccgcgtgacggaaataacagggaatattcacctcgtgttccgttggtagcacacgcttacacgtacaggggattaacgtggtttgggcactctgatcaatatttaaaaaagtaattttttcccttgcagccaagttattaatttccttatcattacttgtaagattcaattcccacctgataattgatgataaatcagccttgctacctacgtactctctacgtccaaaaataaatcaatctaaaatatgatataaccctattctaaaataacgaatttggacgaattcttttagggctggaggaagcatactgggtggtgctaggagtgcttccagtaaactggagatgttaggtgtccacttcactgccggatcatgttctgcactactagtagtactatctgttggtgccattgctttccgacagggcaaacaggacaacgggagcatatgcagcataattggcacttttggcacttttggcacttggacaccggagactactcgttgtcggtaaggcgaccggccatgaccggcgccggatgcagcccacaaaagatggttgccaaagtgctactccgatcctgcactgcccaatacccatctatgtgcatcccaccagccttttactatttgctattccacgaacgccgcgacgactaattcgaaagtggcatactcttatctttgctttgctttctttctttcttaatttctttccttttgttcatcactttttttcaagtttcttttgctgtgtgtaatgagcttactggcggagtatgtagggctgagtgctaatacttcctccgtctttaaatatttgacatcgttgatttttttaaacatgtttgactattcgtcttattcaaaaacttttgtgaaatatataaaactatatatatacataaaagtatatttaataataaatcaaatgataggaaaataattaattattacttttttttttaataagacgaacggtcaaatatatttagaaaagtcaacggcatcaaatatttaaggacggaaagagtactatttgttattcaacgattgctgtgacgactaattcgaaagtggtatactcttatcgttgctatctttctttctttttgttcatcacttttttttcaagttccttttgctgtgtgtaatgagcttactggcggagtatgtagggctgagtgctaatattatttttcaacggcgtggagggaacctttaaccgaaccgaggacctagctaggaccatagtggcatactggcatagtgactgaatcttgattcgatatggaccgccaatgtatgtgggaaaatgtcgatgagtggggattaatttgggcattaggagtactttttaactttttggtgcctgtctcgcaccgaccttgcacgttcttgaaaagatggtttggtggtagggtagaacattctaggcctttccaaagccattacctacgagcattccaggcaaattaattgatttctccggaaattaagcagcatcgacgtaaaagaagatcaacattcagcaaagaccaatttaggacaggagcttcattagccgctctactgaacagtttgcacctaccaacatactgtgacatactgtatcgtcgtggtatcaccatgcatggcccatgtgtacccatccatttatttgctagtagtaaaacatatcctaacacttataatattgttacagtgccacagatcaccgaggatatgtattctttaagagaaaaacggaaaagaaaatggcgatatggatctgattgatacggcaactctctgagtggcaagcatgcccctagtgctctgcttcctgtctcctatactcaaaaagcttgatggcgaggtgcaaccaccaccatccttagagatccatagcctgagtctgggtccagaagggtatccatctgttaaaaaaaactcaacctaaataagaatataatacattctaatagaacgaatcaagataatttgctattcagatttgttacactcgaatggatcatatttctaaataagaatataatacattctaatataatgaatctagataatttgctattcagatttgttacactcgaatggatcatatttccttttaggtaattttttttaaggacggagagagtctaatcacaatctcaaatacttcacctataaaaaaaaactctccatacgagcaggccgggccgaacaatggtgtgaattcggcccagtattgggccgtgacggagaatcacgcgcgacggcccactcacctcccgacctgggagccacggcccacaatattacgagagtagtgtttttgctgggccggatgcggctgcgtgtgctcgtgcgggctccgggccgcaggcttctgatgggccaattgccgataggcggcccaggcactggcaacgatcaatatttgggctctgggctggatggcggagaaagaggcggcatggcccaataacacctcgcctagatgggcctcaaactctcaattccgctgatggggaaaactaaggccctaatcccaaagacaatgggggacattcagattcttggtagatgaagtcaatataaaggaacatgacttaatttttaaagaaatcatggagcacagtgcgtttttgcactggaagtttggaacctgacattaattccttctttgattggaatagattatatcctagtagtattaggtatacttttttttatctaattaattactctagttttcaggttgagggtgacggggaatgtcaccccatatcaatttttttggcatgttatccacaatgctattgcattgtttaacatttcctttcctgctgatgaggatcctaattcctaaactgaatcgtcagatatcattaactgtatcagaggtcatcatcaggggatgataagatatgtacgcagccgcacgtaaatcgtaatatgatcatctctgctcgcatactgagactccacatttgttcacatccatttgagtatttgacctctgagccaatcatattctgacttatcatccgtttctgaagcttcaacgtaagctgctcacgctacctgtttattcaacgctaattaaccggagttaattggatggtgactgatccagccagagttagccgctgtgcacacacacacacacacactgtctaatctaatcatctcttccttttgaccatctcccggcgttctttccggtgacgagacatatatatacacatatcgcacacacatctgaatcatctcattgttcttcttctttctccgtctctctctctctctctctcgctgtctttccgagcagcaagcagcaatggcggcggcgatgattctctcctgcaggtatctgctcatctgcagcgcgacgcttgcgctgctgctgctgcgactgtgcagcgggctgagcctggacacggtgagggagttcctcacgagggaggaggacaccgtcgtgttcggcctcatcgagcgggccaagcacccgcgcaacacgccggcctacgaccccggctacctcgccggcggcggccatggccacgacgcctctttcgccgagatgttcgtgcgcgagtccgaggcggttcaggccaaggtgcggccgtttttgatatctcaactctggactctagcttgctcctcttctttcttgctcctgtgtgttcttgttaggattcgaacttgcaatgcctgaactctgaagcagtatttgagttcatctcgtttttgtatctttttttatgctctttgttttgcttgcattgtcaaatgtcaacggtctgctatgtcatctggcggttgggagattaattgtcgagatgttgatgaccagaagttgttgtctaaatgttttgacttgagcgtatgaaaatcggagttggacaatttaattaattatctaggtgatggcctgaagttgttgctgtctaagtgttttgactagttgagcatatgaaaatcctagtcaaatgtttcatgctctcatcaaaattgtttgaataaaactaataatctctttcattttactctctccattctaaaatatagtagtaaggcttattagtttttggcttgttctccaacattttgctttgattattattttattttataatataattatacatcattaacaactactgaaattaacatcatacaaaaatattttcaaatatgaatacagtagtaccacttatattagcactaaaatatttgtattgttagtttcattattaatgaaaaaagttacaaatgttgattttctaataaatatacacgctttattaatcaaatcatgcatgcatgtctgatctgaaggagtgaagaactagagtagccatgccataaatgtgatatgtttactttaagcaaagataaagaataagcatcttgcagtggattcaaaaagcacacgtcaacattaaacggcacgttaccaatatgatgcgtgaattgtgacaaaagacatcaactaaacgttatttcagcatcactaatccacattttctgttggacttgtctacaggcaggaaggtaccaaagcctgcaggagattcctttcttccctttcagagtgcctttcacattggcacctccatataacttcacaaccgtaagcgttcagcttccatatcttttaaaaaaaatcatctagaacaatgctgaaaaaaatctcaaaatgatcttactgaaaccatggttcatataaatcgtaggagctgtattctgcagccgcattagttaatgtgaatgatgccatatggagcatgtatttcaatgagttgctccctctcctggccaagaatggcgatgatggcaactatgctgcaactgtttcatcagatcttgtatgtctgcaggtaacaatacatgctacactgcagatcttgaattcatatattcacatttcatcctaaatttacatggaaaggttcattcttattgtaggcactctcaagaaggatcaactatgggaggtatgtggcagaagtgaagttcataggcgaccagcagaactacacaactttaattcgtaacaaggtaattttatcatttcacctactcctacataataagtaacaagctgatcagtgttggagtgatcatgtacaacagtacaattattttttggagatgaatcatccaagtgaaatttgtccttcacaggacacggatgccctgatgaaattgttgacatctgaagcccaggaagatgtggtgaagagaagggttcagaagaaggccatggtgttcggtcaaaatgtgacattggatggaccagttgaaactggcaacagcaacagtagccaaacaagtttcaaagttgatccttcattagtgtataaactgtatgacaaatgggtgattccattgactaaacaagtggaggtcgagtacctgctccatcgtcttgattgaatcaagcatttatctagctaacctatttgttcaaagtgtaactaagttgtcacatgaaagattgaaatgatacaccaataataacatgcagcaaggtctgcagattgttcagttcatcattttttcagattgactagattggctcaataaagcattgccaaaatatattaaaaatagtatgctaaacagatgaaaagaaatcaagaaagaccacatcatcatgctttcaacaagccaactgagtgaaagccaattcatgctttgtagttcccatgtgagcagtacaaaatgagcaaaaaggtattaaagcagcataagatctttctcatggctactaacagttgccaattcatagcatcatatccaacaaaagatacaacatcagttagtgacaaaataatcggagtcctaaaatccctccagaacagatgttaacactcttgtagcttcgaaaactctggttagatgggcaagagacgaattatttcatccattacccagtaaacacttgcagaaactaactgcaacatcccctgttggtgtaaataagtgatgttcctaggacccatttgtaaatgttaagagaatagaaaggaggagatgtgggaacaggggagtaaccctgaaaaaacccccaaaattagacaatatggtatcagagccgagctcctggcgaccagcggcggcaaaaccctagccggcggcggcgctcgtgccggagcaggacgaagtggaagacggtgtggaggcgaccgctgggactcgcgaggtggcggcgcgacctacggcgacagcggctgagcggcgtgccggggtggtcggccggtcgcgcggccgtggcgtgggggcgacggcgcaggagtggtggcggagctgcgaccaggtgagccggctggccgctgttgcttgctgttgctaccccgccgcggctggttgctgcgccggcacggaggacgacaagaagggcaccggctgctgtttgctgctgctgttgcttgttgtttgctatttgcggctgctactgcttgctgtttgctgctgctgtggagagaagggactgctgtttgctgctgctattgcttgtttggtggactgctgctgtggagagaagggaaaagagaggagaaggttgctgttgcttgttgttggtagtgtcttgtgtgctgaaaaattacaggagcagagagcagtagcaggtgaggactaaggaagcttagaaagggggaggggaaatgtcttcaggggttggaaaggaggttgtagatgcctcctcggtggttactaagggtgatatgaaagatttgctagagaatttgttgaagatgggcatgataggtccgaagagtgtagcagggggattcgaactgaaactagaattgatgccaaatgagttgaggttggaatggagcaaaaattatttgagttggtgtaggagagcccaattaatgttgagagcaaagggggtggatcattttttgcaagagagttgtgaagagccttctgataaggagagccaagcatggagaatgtggaatacaacaaattccaccgtggtatcttggttgatgacctcggtggctccttctattagtaggatgatagagactattcagaatgcagcaattgtgtggaagacattgagcaacatgtattcaggagagggaaatgtaatgatgatggttgaggctcagaacaaagtagaaaatttgaagcaagaagggagaacagtccaggagtacgctagtgagttgtagcagttatgggcagatcttgatcactatgatcctctacagttgaagcatgaggaggacattgtgattggaaataaatagatgcagaggcaaagagtcattcatttcttaaaggggctgaacaaggagtttgaggacagaagagcggctatgttctaccaggctacattgcccactatggaagaggctatttctgctatggtgcaggaggagatgaggttgaaactgatgagaggtacaaatcctacaagatcagcatacactgtggctgataatagagaatgctacaactgtggacaagtgggtcatgtgagctacaattgtcccactcctcggaacattggcggtagggggttgattcgaggagggtatggtggatttggtggaacccgtggtggatttggaggagaccgtggtgactttggggggaaccacagtggtagaggaggtcgtggtggagatcgtggtggtggaggtcgtggtaggggcgaggtgctcctcaggccatgtagccatagaggagggtaaagctattaccttaacaggtgaacaggtgacacagtgggaggaatggcagaagaacaagatcaatgagagctccaacaccaccactcactttggtaacttcgccaactacgctcaagtgggcgaaggtattcaggcacaggcacttgcatctacatacagacatcctatagattggatcatagactcaggagcatcaaagcatttcacaggattgcataataccttcacatcatacaccccttatgtccactctgaaactatccaaatcgctgatggtacatccaaacctattcatggtatagggtcagtagagtgcacatcatcaataaacttatcctctgacttgcatgttccttcctttccagtaaaccttctctcagttagctcagctattgaccaactcaagtgcattgttgtatttgatgagaactctcatctgttccaggagaaggggactgggaggaggattgggactagagtcaggtgtgatgggttgtggtacatcaatcatgaggaactggggctagctgcggtggttggaaatgttgagaaggagatcagtttgcttcattgtcagttaggacatccatcttttgagattttgagtaagttgtatctagatctctttagtaaagtggataagcatagattggtgtgtgatgcttgtgagcttggaaaacatactcggtctacatatgttgggattggtcttcgtaactgtgagcctttcatattaatacattctgatgtttggggaccatgcccagttacttctgtgagtggttttaagtggtttgtcacctttattgattgccacactcgtatgacttggatttatatgcttaagcacaatagtgaggtccttcgttgctttcaggactttcataaattagtgacaactcagtttgatgcaaaagttaagattattcggactgataatggaacagaatatatcaataatgaatttgtgtcatatatctcagatgaggggattattcaccagactagtacccctcctcaaaatggtgtagctgagagaaagaatcgacatttgctagaagtggcaagatctttaatgttccagatgaatgtgccaaagtacctatggagtgaggctgtgatgacagctgcatatcttatcaatcgcatgccttctagaatacttggtatgaagtcccctgttgaacttttattgggtaagcgagagttcaaggtccctccaaaggtgtttggttgtgtttgctttgtgcgagatcatcgaccttctattggcaagttggatcctcatgcagtaaagtgtgtgtttgttggctatgcttcaagtcagaaggggtataaatgttgggatcccattgggagaagactgtttgtgagtatggatgtgacatttcgtgagtttgagccctattataaaagtaaaggagatcttgaccaatttcttgaggaattctcgactgtcatggaggttgatagtcgagagggggagatagagagaggtgacacacataggaaaaatgttagtgacaagaatggggagacagtggtggttggatcaataccatgctctattgacaatgcaagtaaagaagcagtggaagttattggagatacacaagacaaggatagagaaatggttcttcatgaggaggatggagaagatggagaagatgaagaagtggttgttgggacaattccatgtcctatggagcgagccgaaaaggtgaaacaaaaggatgtgctagtctaccaaaggaggcggtttgatagtcagggggagaaaagaaaagggttagtgcaaagttaagttgaagagttatcacatccagaatgcccagtccctgaatcctctcagaacctctctcctacagtctcattggctccccttgagataattggtaatactcctcccattcttgaacaagtagaattacctcttgcacagcgtagagagactagatccaatgctggtagacctcctatacgtcttggttttgagcatcttagttctatgcatgacattgcaaactatatcttatattctcatgtttcactggcatacaaaacattcattgcatcattatagacagtgcccataccaaaggattggaagtgtgcaaaacaagatccaaggtggaaagatgcaatgagagaagagttgaatgcccttatgaagaataagacttgggagcttgtaaaacttccaccaggaaaaaaggcagtgggatgtaagtgggtttttacagtgaagcaaactcctgaagggaaggtggataggtataaagcaagattagtcgcaaaaggctacagtcaaacatatggaattgactatgatgagacatttgcaccggtggcaaaaatgggtacagtgagaactttagtatcttgtgcagtgaactttgggtggcccctccatcagcttgatgtgaaaaatgcatttcttcatggtgatttatatgaggaggtctacatggagattcctccaggatttgggaatagccagacagttggaaaaatatgtaaactcaagaaatccttgtatgggttgaagcagtttccacgtgcgtggtttgaaagattcaggtgcgcagtgtgtgatatggggtattctcagtgtaatggagatcacacggtattctacaaacatagggggacatacatcaccatcttggctgtgtatgttgatgatatagtgatcaccggtgatgatgtagaagaaatcaggtgcctgaaggaatggacacctaaatgtagaaggatattgtgatgctgattgggcgagtagtatggatgatagaaggtctacatcaggttattgtgtgtttgttggtggtaatcttgtttcttggcgaagcaagaagcaggcaatggtggctcggtctaccgccgaagcagaatatagagctatggctttgagtttgagtgagatgctgtggatgaggagcttgttgactgaattgcgagtgttaagaagtgatactgtgatgcttcattgtgacaataaatcagccatcaacattggaaacaaccttgttcaacatgatcgcactaagcatgtggagattgataggttctttattaaggagaagattgatagtggggtacttatgctagagtatatcaagtcatgtgaacaactagctgattgtctaactaaggggttaggtcctagtgaaattcaatcaatatgtaacaagatgggtatgattgatatcttttacccatcttgagggggagtgttggtgtaaataagtgatgttcctaggacccatttgtaaatgttaagagaatataaaggaggagacgtgggaacaggggagtaaccctgaaaaaccccccaaaattagacaatatcccctctgccaactatatcttcaggtctgcaaccgcatctcagttgtatgcagtaatgcttatgcacggagcattaccacgtttgaactccttcctacgttctgttggtgccttctaccccggaagtgattctccaagtcagatgcagatgtgcaattagccttgcaagtgctgcaactccatcttggcacaaacttttggttcttttcaacaaactgcgccacttcctttgcatacacctttgcttccatttccttgtcttctctcttcagggcttctaagttttcttggtgcctcctacctcttaggtgattttttaagtccagttcacttgaacaattggctttgcaaataccataattccatgttggtggataatgccgtgtgacagataaggactctgtttctactttcttcttcgtcccaatagcttcctttcttgattccaaagcattgttttcctcgttcctatggccagcagagtgctcctcgaaataaaattcattgtgtattcacttggattccatcacagctccttggcacacatatttttttgttgttcatctggaaagtatctgcaccccttttcctcttcactccagatgacacctttctacgcatcttggcctgtgttatgatgaaaaattattagaaaatagaaattacatggtcaatcttttttgagaaaaggcaagaataatattgtttctatccttgacataaaaatcatatctatgaacatattattgggcaccggtaaagctaccgaattcagtaatatgatctgcatagcttcaggttacatttcccttggagataaatttcccttatctagttatattgttttccattcaatttcaactgccaacaaaccaggcaacatatgtgatcgttgagactgatacgtgtagcttccttgtagagctgaacaacatgcaaacaaaaaaataggtcacacttcatcccatacatgaagtcaaattctttgaaagtttgaactcacctgcccttttgcatattgtatccatagtctacatattagaaacgtcccatctccaagaagcatcgattcactttaccatattatagttaaactaacaacatttgtaaactgcattgcttgcctctagcgaaggaattgtcaagaatgcatacaaaaatattaatattattgagattatggcctcaattttatgagaacttcaaaactagggtggtattaactatcaaatgtcaattataagaagtacaaaatcaatggtccattgaaattaggaataacaaggactaccactagtaatagagaccagaaggcaaattgcttcccagtacagatgattcacatgagacacttttttagtgaaagatgcacaaaacatatcaaatggcctgcttagtggctagtcatatttttgcactacaagctaaatcaaacatagttaagcatgcatggtcaactggattagaaaacaaaagaaattgagtaagaaacaactcaacgctaagacaagtgggtggctccgagaatacaactaatatttgggaggacacaaaccaagttttcagtttatgtgattcagtgatcactgaggaacaacatagactattataactagaacactacagtttataaagtggatgggggaacaatcttgaacatggaacattatctattcgtaacatatggataatcgattaaaagttttggaaaggggacaaaaagcaaaaaaaaaaacaagataatcacagacacatggctcaccgcattaaaagatgcattctcttcatctgctgtcctatcccatggaggtcgataccattcctcgatccgatctttcacaggcactctaaacatggatgctcctgcaggcattgccatcggtcctcctaaccaaagctcaccatgaggcgaagggaatgtgtcaccgcggaccggctggaagctgacggacaatcgcgagggcacatcacagagcaatccagtatcgcgctggaccttggcctccagttctctctgctcagcaatttcagcagcaatgacctcctgacgaatgccctcctcccagagctcccggcggagcgcgtccatcgtcacctgcactgaaactccccaaccccaccgctgtttagtttctgcgcatgagtaatttactcataatttcgcatgatcaatctatctctcagtcaatagcacatcatttactcaccttcttttattattatcgtcgtgttcttataatatttcgcaggaaataattttgatcttgccataaacaaattcctcaggaaattgaaaaaaaattactactggaggcagcatagaagaattgtaacgggggtgaagctctagattagcgaaaacaccaaattccccccttatttcagaggatacgaacccacattgttccttccacagaatgactgaatgagaacagcaggggaaagtagggccgtattaccgcgcggggacgggtggggaacgccgcagccgtcgtcggcgtcgaccggggcggtggctcggcgagcgaactccatggttggggtgggtggggttagggtttggttgtggtgggagagatgatgcgggaagcgggatggcttctccgctgctgatgaacgacgcgatggttcagcttctgggctggggaggcgtgcgctgcgcagaggtggtagacgagcttcgaagccttgggccctgtgcacggagtgaccgcgagccgttggatcagacaagaggtcatctttgtaccgtcggatgggggaagcccatccgtcgcacggaggcgccggatgaaagaacacggggtctgatcccctacgagcaagtttaaaatatcgtaaaatctataacgagaggcctctcgatctgctcttaagcagcgacgtctggcgcggtcatccaatttagtcgagaagcatcagagtttagaatttgagagaaacataagagtgttaggcatccatgtcttttttcccttcttataaaattttctctcaaattacttgtctaatctacaatctgagtacaccattatgtccgttgcaattaaatctttacaacaagatctcgcatgattatattatgatgaaaaattacaaattacttttataatatatctaaattactttttagacatataaaagtaaatttaataaattctaaaagtaatgaagtaacttgagacaaaaaggaagtaactttgtcgtcacattagaaattaatccgttgtagggataaaaacataattctatctagaaactaaattaatcagcacaaattaacgaattgactaaaaacaataataaaagtaatcacttcatagcattatgaatgtataggaagtaatttaatcaaatctaaaagtaatttatatatatgataaaagtaacttagtatataataaaagtaattttcaaacatttttttcatcataatataatcatgtaagatcatgttgtacagatttaattgcaacaaacacaacgatgtaatcggatcgtatatcaaataagtaatttaagagaaatttttatttgaaatttagatgggtaatgaggatgcaaatggcaggtactactacttttaggtgctactacttttagtaagggcatccacaatgtagaaataagaggggtctttaagcctccaaagaagtctatatacattgtggaagtggtctatatagaagacatttggatgagctatccttagctataaagaccggccacaaggattaaaaaattggtacatcctctccaattctggtacttgccgctatgagaagaaagaggaaggcgggaggagcaccttgcagccgctgccattgaagccatccgtgagcgtcgacgtggatctgctcacgcgagctccgccatccgcgaacacaccggggatcaacgggccgccgcggaaccgctcgcgtgtgcaagctgttgccgttgtcgaccgcgagcgccatcgccgcctccttttacgagcaccacccgcggccgtcggatccgttgtaacggtgccgtcggatacatctgatagttttttataggtcatagactgccctcacagatcaacacaagtcttttctgcacactttgtcctcactcgtgcgcacccgggaagaatttcccgatcagtagcacgcttaaccctggagttctttggaaatcggcttccggaaaagaagttgcaacttgttgatatgagtattctattaatcctattaagccatgggctgggatgtcacatctgtggtccaccgccaacgagcgccgccgtcgtggatccgctctcgcgagctgttgccgtcctcgtctgccgctgccataaatgccatcgccatgtctttcatcgatgggttgggggaaggtgtggggaaagtggccggaggaaggggttggttgggatggtaggtattttattaaaatgtggggtccaccataatgccttcttcctcccatatacattgtggagatgaaatatatttttgtgggacccacctagggcccaccataaggcctacttatgccatatacattgctcatgccctaagaagggtaacgagttgatacacactatattgtttttggtaaaaaggatagtcgttggttagcactaacgagtgcatgcgctctctgtagtcgcgtccttaaaatatagtcaatccgcaccctcttgggtaccaaaccatatagagaaggcactctgttattttttgtactcgcaccctctaaccatggatcgtcccaaaatagaacagccttgccatcaccaagctgccatcgcgttgaggccataagaaaatccttctctcgccgtgaaactggcatcggcaagccttgccaaggcttgtctggtgctgtgcgaagcgaccaaagccatcttgtacggagcacaacccctaagaggtcaaggttgaggatgccgaggcccccaagttgttttggagtgcaaaccttcgtccaggctaggcggcagtgacccccttttgcctccgccgctccctgccacaggaacccacgtcgcacctcgtctatccccttcagaacccacttcgtttttatcctgctgtttatgcatatcgaatttttaaaatgcacatatatgagggctcttctacaaaaagcaaaaaagaaaattcgcattttcgaagcggagaagtattgcatatgctaacgtcgcaagtacattggcatgtttggtagcgaaaaatggaaaaaattgacttgccccatctgaaaattttaagaatttcgtgggattttcacaagaaacaacttagatactagaagattagagaaaaaaaacacatatcctcttttctatttccccatttctctatttcctttccaatcggtttgttaacaagcaaaatactatacaatgagaataggtaaagagggcagctctcgtcatgactcatgagaggaacaccaaaactaggagtggaggcaatttgagtgcactgtacggcgaaaaaacatttacacttgaatcaagcatctcctatcttccctaaacacaataagacgtactccctccgtccaaaaaaaagccaacctagacacggatatgacattacataatacaacgaatttagacacgctcatatccaaagttgttgtactatgtaatgttacatctgtacctaggttgacttttttttgggacggaggaagtaaggaagtgggtcttaactcacttggcaaggaagtgagcctaattcactcggtgagaggtgttggcatacacccctaacacccaagttagaagtattcttaggttcaaagacacctgtttcttcttcaaattctttacgcactgtgagatgttaactgcagcctgcacagcatcgccgctatgcattgtccccaggggatgttactccaggattttgtatgtacgctccatttttacaccgtgcctgtacatattgaaagcatgactggtttcttcaacttggattatcaaagtcatcctaaaactccttccttcagttgcatcagatgagtacggaggctggactcctgtacctgaatcaacaccatgcaaagattgaattgatgttagtacattgcacagttaagtaaggcagatcatgttgtacaaatgaagtctggggtgtatgcaaggacaaagtatttctgcaaatggccagaactatggctactgatgcctactagaaattgtcagtttccaatcagataagaaccagatgttcatcccatcaaataaatccaaatcagacaaggcatgcaactcttgcaggacatgctacagggattgtggatatctatgctgccctctggctgtgtctgcagactgtttctggcaggttgaccaactaaagtggttggattaatgcagaaaacaagtcgagtaaccaacaactagttttccaaaggtgggtagctactgtggagaactaatggttaggagtgcaaatggctcggctcatgaaagctttgtgcaagggaagctcggtttggctcggctcgctacgagcaacgagctaaaactaaggctctgctcagctcgttaatgggctcaagcaggtctaggagaaatcaagcaacattttaacacatagaatgtgcaataaagtgataggtttcttcaatatgtcatcccaacacataaatagacaatatgacaatcaattttaccattttcaacaaataaatagctagaaaaggtacaaaattattgtatatgaccctattgtactgagccaaatgagcttgtgagcggctcgtgagccagcttaggcttggctcatttcaaaaatgagctaggaaggagcttgggcttggcttgtttggctttcgagccgagctatgcgagcatgaaccaagcttgagcctgagtttattgtccaccctactaatgggggttttaaagtggaatgttctttcgaaagttcagacagagattcataaatacctgtagttttgctgccgtagctaagagctctctacactcaccaagggcaaccttttcttgccttgccatgtctgaaagttcagaaaccaaagacgtcctaccttcaacctggtacacatatcctaattaatgttactaaaagcaacaaagacattgtatcctaataaattgcgggcaaattagagtatgtactaattttaaaagttttagtttatcaaacaatattctgaaaaaaaaaattgaatgttagaacctgagctgctcctctttttttgaaaaagaaaaatatatggtacgtttatatctaacctttgataggaggtacaaaattgaggaactcaaagcttgcataacatcaaccgctgagcttatagaattcttaactgcaacagcatctgcctgttaaataacggtattgtcagcataccagacaaaccaagataagagtattcgatcaaaaaaggaacaagataagtgtaactacaaatccaagatcatttgacattaagcaatgatggcttgatcacgtacctgtgctcctgatgtaactggaaggcgaagtgtgcatgcttgtaaagcttcaatagccccaatcaaagtactaccgttctctccttctagtttcggccaatgttgaagataagcaatctgaatcacaacaatatggcgagaagtaacccaccaaggattttttttagatataaaaaaattgaaatgggctaaacaccccaaatcaccaaataaccgtactttaatcaaaatctgaaatttttcaatgaattcaataaatttcgaaaaaaaaaatcagggggcacaattaccaaaaaaaatcactgaaagattaaaattgacagtacttcttccctgaatttgaaaaaatgtcagccaaatcagaagaagatttttccagagggacggtattacccaatcaccaactttttttttgttattttcagccccatatttaaaaaccacattttttttcaaattttgaatgacttcgaatcaaatttaaaggaagcatatttagaggaaaatttcaaccaagtacctgctcttttaaaacgtagtacagtttgagctcttgttgcaggagttgaacatcaattcttctgactgtaacagaatcccgcagctgcacgatacttttccacacactgtaaagaatactctgttttacatgggaggagagaaatactatattagttgaacattgcttgcccaatgaaaaaaataataataaagagaatgcacccactaagaaacaatggcttcatcaggcacaaacttgagcaaagcaattagagaacagacaggagcaaaaccaatatagcatacctctatgctactcttttggaaggttagtgtatcttctgaacgagcatttacaaactgccactgcaggcatctattatacagcagacgtaattggtgaatattctcaaactggcttgcactcttcttccctttcctcgcatcaactatatagttaaacacaagaggtgcaacgcctgattgacttgttgaacaacatcgtgatcggcaaggtgccgaaggccttgtcctcaaaggactttgaaaggctgtagaagcaggggatgcagctgacaagaccttgtttggtgacgacgagcgatgtagaacaggtgaagacagagtcctgctcgggcgagtagcagctttagagttttctgatgtctgtgaagaaacatcactaccagattctgtcttatcctctcttctgctctcatgtgtagccaatctctttgccaatccgttcaatggctgattcagaccattggctttgacttcagctggacaaatcctccttggtgaaagcccccttgtagggtttgatggagtgactgacctgataggcgtgttggcaacaccattgcttctcgaagttaagacggcagagccacggccacccatcattgccgccggccatcggtgttgctcaacgaccctcttgtttggagtctctgatggccgagcattctcacattggttgccaatgttcctccctctaagaggacttcttttcctctcagtctcggtcacgtttcttgcctgcaccttggtctggtcagaagatgagccatcagcaagcttgtgtctcttcttggcagaggttgccattgccatggactccttctgaagcaatggaggcacgctacgagctgatgcccacaagccatcagggggctttgtactggctgcacgacgagagatgccatgtacctcggtggctgccgcaacacgcaccggcgtcctgggcctcgacgcagcgccgccaccaccaccggacggcgtcgagctggaagaaggcgtggaagacctcctcctctcagctgactgtgctctgtttgtcgatgctgtgccttcagctgctgaagccctgctcagacttggagacgtgcatcgcctcaccgaggaagcagcagcctgtggcgccggcgtgccgccggacttgaacctggaggccacctccctcctccgacctgccggagcagcaatgttcttctccggtggcaccagcggctgccgcaaggcgcagtcgacggtacctgcggccttcctcccctctgtcttcacggcatccatggagtcgagtagctgctccaagaaacgcccacattgatgtactggccagctatcaccaaagctacccaccactctcctcagcaggcaatatcaccagagagatctaccaaaagacgacgccaaccaccaggataaactgatacaaaaatccaaacatgcatgcgtgcattaaccttctgacacaataacacaaacaaacaaacatgaaggctctccgcctctcccctcccccaccaggccaccacgtcaaagaacggcaaatgcaggcaaccaaacagcatggacgattgcacattattcacaacgatggatgacgacaacctagtgtcacggccatttacatgcaaaggattgtccaatttgttgctactgcccacccggtccctctcgtcgtgtgggcgtaaagtgccccaaggaagaaaaggaaagctcccgtgtttgcttggttggggcctagtacaggattgcaacagtgcagtaactgcaaatctgcaaattaatccaacatggcctcttgatgtgaaatgcgaattgctgctgctacatggtactagttacatggatgagttcgaccaaggacgaggagagaattaggttcaccttttttttcccctgaagttgttggagccgacagggacacatgcgtccacgcaacatggatctttgtatctagattctagaaagtttattctactgctttcactacttgttttcttcatcggaaacaaacattatgggaatgggatcattcttcgaagagtaaattactctttaagagttaacacctcaccattccagaagaccagaactacaaacttgcaatgcatcgtaagatttttgtactgttcgatgcaggcaagaaaacaaaatccaaatctaccagatacctattcacatggcaccagccgatgcaacagtcacatttcactcactggaaaacatgagcagaatctccaaaattctccaaaccggcttcgcgatcaaatgtggcaagaaaacgagaaggaaataaatctagctcgatggcgtatataagacccaaattgaagggcctatccgtgctcacgatgtacagcgaatcggagcccaatcgcacggaaagggacgcttagcttcggcgcaaagggctcacccttttcaaagctcactgtacgtctggatcgcgacgacagcgcacgcacgcaggagcacgaacgcgaagcggctgggccaactcgaatcgtccactacccccacaaaaaaaaaaggcaaaattggttatatagcatcgaaagttcactttttagttttatagcaccgaaagttaccggttcactttaatagcatccaaagttcaccctgttcccatttttagcacttccgttaatttttccgtccgtctttatcattattgatccagccacacacatgatattatatttctacccctcattgacatgcattatacttgtacttgtgaggggtagaaacgtcatatcgtgtgtgtggctggatcaagacggacggaaaacgatcgagaattgacggaagtgttaaaaatagaaacatggtgaactttaggtgctattaaagtgaaccggtaactttcggtgctacaaaaccaaaaacgtaaactttcgatgctatataaccaattttgccaaaaaaaaaaatctccgtttcgaaacgtttcgaatagtaataaataaataatgaacggggttttcccgattactcggaactgtttcaaattgacgagagcgattgcggaatctttgaaacgagaaaaaaaaattgaaagccgtttggaatctcgaatgtggtgaagaatgctacaaacggaaacagatggaaacaaatttctccaatgcccccaaaaaatttcacgaatccctaaagcatttgggggtttaaggatgaggggattaggatttaggaaacgctgggagaatgcagcttcacgcacgaacccaatccgatcagaggaggcgaagcaacgaacaggacgcacgagcagtggagcagtatgctactaagctgcaagttgaactcacctcggctcgatcggggatcgcggcgcgaggagccccctccgttgccggaccggcgggtcgccgccgccgccgccgcctcgtcggcctcctcgccgcgcgcgagggatcggaggttagtggcggcgatgggatcccgagctgttgccgtgcggcgaactcctgcagattttctcgcgtgcagaggaaggaggtggcgtggtagagggaggaacgcgccgcacggttactactgagggtggtggtggggccgtggagaaaaagagaaatcgtattagggttgtgtttagataaatgcgtgtaaagttttagcgtgtcacggcgaatatgccggcatacatttgaagtattaaacatagactaataacaaaacaacttacagattccgtctgtaaattacgagacgaatttattaagcctaattaatccgtcattagcaaatatttactgtagcactatattatcagatcatggagcaattagacttaaaagattcgtctcgcaatttacacacaatctgtgtaattagtttttttcatatatttaatactccatgcacgtgttcaaacattcgatgtggcagggtgtaaaattttgcgagggatctaaacatgccctaagttcatgatggttttatcagggcttttttttgtttgtttttttaattttgagaaggatttttttttacccaacctctacattcaaccgaatatatgcagccatttaaattgaaaacttagccccgcaaacaactcaatacgaaatttgctcatatggaggtttaagctcaaggcccaatctgaaattctataggcagccattttaatcggaaacttagccccgcaaacaactcaatctgaaattcgttcatatggagatttgaactcaggacctaatctaaaattcacttctatggatatttgaactcataaccttgagccgctactcatgtcactgcaattactaggctacatgccctttttacctttggttttatatcggcatatcgcgaggacgaaatttaacgattttcaaacagagatgattcttttttttttcgagtgatgattctattgacctcactgaacttgtatcgtgtgagctaacgtgttcatgacagtgaactgtgaactctttttctatgtcctagctaaatactcgtgcattgcaataaagttttgtaaagagatctcatgatagtttcttaagttgtgttggttattatggattaggaactaaatctctacagaatacacataaaatgaagcggtggattaacacataattaattatacattagttaaaaaaaacttaaaaataaattaatatgtttttataataactttcctatagtatattttttaaaaaacttactgttttagaagtttgagaagtgtacacgcaataaacagagagtggaaattaggaaattagtacatgcaaactcaccctaagaccatttcttaggagtgtttcgagaggaggagaaagaactagatacgtaaaacgagatgagtcattagcgtatgattaattaaatatgaattattttaaacttaaagataaattaatatgttttttaaaacattctttataattttttaaaaaaatatacagtttaatagatcgggaaacatttgcatggacaacgagatgaatcatctctctttgtccctcgctcaaacgcagcctttctaatgacgaaataatatttgcattagtcgagtgttagagattaattttgacacgtttcataataaccatttctcatcgtctaataaagatgttatacttatatcaatcatattatttagtgattaacttgacatatggtccatcaattgtttgagatcttacatagcagtgtggtgagtaactgggagaatcactatcaccatcaccaacatttaaagagatgaatgtcttctacatccgagagaatgtcttcctcacccatactaaaagagaggtaaatgttcaccaaacattttgtttttaaaaaaagaaaaaaaaatctaccaatagcataggtacgtaccagtgtaccagcaccactgcattatggagagttgtttcttaacgtaacttagctaaggttgtgtttagttactaaaattgggaggaagtttggggaaagttggtaatttggaaaaaaaaagttgggagtttttgtgagtagaaaagttttggatgtgatgtgatgtaatgaaaagttgagagtttggggtagtttggtgtgaactaaacagggcctaaacttgggtgtgtttactttcatttactaactttttactttctccgttcttcatgtgcaaaatattttctgaactattaaatggtgtgtgttttttttaaaaaaaaatctatacgaaagctgcttagaaaatcatattaatctaattttttcatttttttaagttaatacttaattaattatgagtcaattgagccacctgttttatatgtacagggtaaaggtttccaacccctcctcccgaacacacccttaaccctactgctagcattgtaagggtctgtttggagaccttaagattttgagaagcagctggttagaagtcagcttctgagaatatggaaaagatgggtttccctacttctgacttctaatttattttctggattctacaactacagcttctcagaatttggaccaaaaactagactgattagggagcttttgattctgggagaagctgcagcagttagaagcttatccaaatatgccctaagtaggtactatttgcacaataagccatggaaaaataaagaaagcaatgggtaacaaagggtttttttatccgtgttattctaggtttaaaagcttcgtttcaaaattatgggcttataaaaaccaatgctggaaaataaataatagtcttaaaaattgaaatcaactttgaagttagaccctgttctgttctccaacaaaagttggattaaactttggatactcgtgacacgtttttcaaattgctaaacggtgcgtttcgtgcaaaaactttctatatgaaagttgttctaaaatatcatattaatctattttttaagtttgaaataattaaaattcaattaatcatatgttattacaacctcgttttacgtgaaacacttaatcttcatctttatctttatcttcagaacatttaaacaccataaattttacgatcaaattttgactatggagggtaccatgggagaggaaacatacggatcccacaattcgtacagtattgacttctcaagtcatctgcttctacagttccttgtaccaccaccttgttgttgtgtcctcggccgatcgagaccctcgagaattcgtttcagctctgatttcgcggcgtcatcgatgctgcattgctgcgtgctacagccacgcccttgcacatgccgccctggtcccgtcgtgtcccgtggactgtagcgacgacgtcccactcgatcgggcaaccgccacgaaagcccaccaacgctttggacggaggcgcatttacgtgccgcgtgagcgggcccgtcgtcctcccgtgcacatggcacgtgggccccgcgcgggtcgctcgctactacgcctacgtgaagttgctggtcgccgcagcgctggcttttggtgttggtggtctctggctgcaatgcgtacggtacatgggagggaggttgagctgcaatgcaaaggcacgtatggttgttttaggccatttctaatccaagacactagacatagtttaaataaacttcacattattaagaaactagtactagacaatatttttctaatgcaaacaccactattccacacttaaatttaatgctacttatcccacatgatgccttggatgttgtatagaaacagtgtctcatgcaagacatggtttccttctctttcctcatttattcacttgccacatcattttttatcttatgtgacagcttatttaatgctatagacaccatcatagtcattgggttgggaatagccttagttatggctgatttgatctgaagccctatcaaaatattgataatatccaaatctaaataagtccaaacactataagtagggtagatttttctattagttaggcaaaatttgatcttaatcaaaatactattaaagtactatttgaagctaccaaaaaattggtaagccacattacggtgctctttactagtagtataaagcaatttgaaccgttgatcttatttggccgaggggtttaaatctgtttgtaccaccaccccatttagtgatagtagagatgtggaggaacattattgtcaaaaaaaaaatatacgggtgacagtgactaaatccttttttttctcctttttggctttttcgattgaacgatgccagcggaatcgattaccacatattgatatagatatagacccataaaaacataaatgatagttacctctaatcactatattagtaaattactaatttacccttaataatgaatggttcagatcatttctactggtagtataatattaccagtagagagcaccggaacatcgctcatccaaacatgcccttagtttgtaagggggtgtttagatctaggggtgtaaagttttgacgtgtcacatcgggtattatatagggtgttgcattgggtgttcaggcactaataaaaaaaactaattacagaatccgtcagtaaaccacgagacgaatttattaagcctgataaatccatcattagcaaatgtttactatagcaccatattgtcaaatcatggaacaattaggcttaaaagattcgtctcgcaaattagtctcaatatgtgtaattagttattttttagcttatatttaatacttcatgtaggtgttcaaatgttcgatgtgatatggtaaaaaaaatttagagtgggatctaaacagggcttaagtaccttgatgtagatgtggaaaaaagctcgaagctcgtggtttggattggctcatggtgagctactgagctcgactctgattgactcaaacccatggtcttaatgagttgagccaagctagaaatttaactcttgagcttaatgaactagcttgtgagttgctcattactacaaaagatcaccacatcttcatatatacttagtgtttcttaactagcgagtagtgactagtccattagttacatcaaaactatttgtattttgtgaattcttcactagtgtttattattaagtttatatgttgtaaacaaataaattactaattataaaggtgatataaatacgttaacaagcttgacaagagccagctcatgattttttgctcactttttctctcacttctgtattcaatgcatttgctcttgtatgtgaaacatttcttgtttttcgttgtctctattctccacatgtgcttaaaataagtttaatagtatagccaatttctagctataaaattaacacgtcatctacaacaactctattagcctatccatacaatagtttatataaatatgcattacaccgttaatacttaacccaccttgcctacacacataatattgtagagcctgtgctacaactagctataaatctaaatacaactattcttctctctcctctcttattttagatgtgtttatagctaacttgtaacctgctattgttcttattatactcttatagttggcatagagccattaaacttgctctaaatccctctttcaaaaaacatttataattagcaacgacgaaaaacatttataactagcaacgatgcatggcacgtgtgtggtgacgtgcatgaataaataagtgtggcatgcatgtctggccatcttatcatatatgggcagaactgtttgcgagcttggatcgagcatcatagaactggtcatcagtatatgtgtagtgtcgggggtgccttagctagccggccattcattgtatcacgggcccccgtaagcatgtgccgcgtgacataatgacatggatgcaagaacacggtccaccggtcggtactgcacgtacgggagttgatcaacccctgtgcaagctataacaaaacaagcatggttgattgggtacgtaggcgcggccgcatgcgcgcgtattgacctcctcggccggctgcgtcgacgtcggcgcgtcgccatcgcgtccggtactccggtgtgcgcgcggccatgcatgcagcatgcacgtacggtcacgcgagcgaggtgacccgcgcgtgtgtgttagccaggggaggcctagctacgtacgtgtgtgttcatcgtgacgcgcacgcgcgctggaccacccggttaaattttgtccggtcgcctagcgagctagctagctatcggtagctcgctccgttgcacgcgggattaggtcagatccagtcattaaggagggagggcggtgggctatcaacttcaatttgtagttgcgcggtgttgctttccctccgttgttcgtaggcgatgatggtaggattagttttatttagcgcggtataattgaccacagccaccggtgactaaaacgattatacctccctccgtttgagattatgaaccgttttgactttgattaaagttaaactgtttcaaatttgataagtttgtttaaaaatgttttcaacacatgataaatatattcaacttgttgttttaataaaactaatttgatgttataaatattaatttatgtgtttataaacttagttaaacttaatcatataatttgaaacagagggagtagcttgtaagggtatttgattgcacactggtatacaaaactaaattatattattctacctttgtttccaaataaatgacgttgattagtgcaatttcgaactaaccggcgtcaaacaaaaacgaaacggagagagattatatatcaaggtgtgtatatcaagcacacactgaaaaaagactactaaaacgtctaattaatatagctgccagcaaaaaagagttgtaccaatcctgattctactgctaaatacctaattagcctgcctttattattcctaacaccactaaacagataacttctttctactgcagtaggccgacgtagtcgagatcgacggagccgagccacaacttgcggtccctctccacaacctcgctcagcgtcacagccctactagcagccgtcagctcctccacctcgacgccgtcgccgttgagccggacgccgaccaggtgcttggccggagaagccgccgccggcacgttgaacgtaatcttctcccggttgagccccacccagtagccccccttggcgtctcgccggacgttgtcggggtacccgggcaggtcggcgaagagctcgtactggccggccttggcccccttgagccaatacctgaacacctgtgccggccccgtgtgcgccaccacgaggtacctcccgtcgtggctgacggccacgccgttggcgtacggcaaccggtccttcagcaccgtcacctgcttcgtcttcgcgtcgtacttcatcagccgagccgtcgcgtcgcggttcctcatgatgttctcttggtatctgcatgcacacaactcatctcctgttaatgctgatgatcaacaacgcattgcatgcataatgcaaatttgaaagtaaattaatttggattgttctcgatctgtgtatacgtaccggcgtgtgatggtggtgctgctgtcggtgaagtagacgtcaccggtgtcctggtcgacgtcgacgccgttgaggtaattgaacggcacgccgtcggcctccgtggcgagcacgtcggcctggccaccccgcggcccaacccgcatcaggcccttgtaggcgtcggcgaagtagaggatccccgtcttgaggtggaacgcaagacccagcggacgcccgcatgtgctctccgtctcctcagatgacgacgcgcacgtagggttgctcctgcacggatatatacatgttagtctcgtcaaccaatctatacgtaagaaagtattttctacacctaggtctcatggcacctgggtatatacatgtaatttaaatagttatataaaaattttaaaaaatttgataagatatatagtacataataatatcacacaccatgcaaacatacaagtcaaaattctatacatgcacgtacgtaccggtaattccggttgtacgcgaaggtagtccagccggcggagtcgccgccccacttgaggacgcggccatcggagacgccggtgaaggggccacggttgctggagtcgaaggcgaggctctcggcgccggtgacgccttcggggaggcggacgtgggaggcgcgatttgtcggggttgtcttcacctgcgacgcggtggtgcacggtggggcttcgcagatcacgcgctgcgcggcgcacggcgaagctaggcagacaaggctgaggagcaggaaaaccgtcgagaaactagccatgacgacgaagcgatcgatctgaagaggctacgagaagaagaagcgactacttcgagggactaagttacacagatcgaggaggccatcgggacgctatttatttggagaagaggaagagacagcagccgacacgacatggcgaggagttggagacagagctcgacacgccagcggcggcgaggtttatctctggtttttgaagcggcggatgaagacgaggagacagagctcgacacgcctgcggcggcgaggtttatctctgtttttttttttttttttttttgaagctgtgcggatgaagaggaagaggagacagtgctcgacacgcctgcagcgacgaggtttatccctgtcttttgaaacatagcgaggatgaggagacatagctcgacacggtagcggcggcgaagtttatactgtttctcggatgagatcgtttgattcgaaaaagatcgtagacgacaagaccggatttggttgaggacgcggcgtcgtgggcactgcgaactcccggccggaggaggaagaacgagctgacagggtggtgagctgggctgggctttggcgcactcccgcgggccggattgctgggccaggccgggccggaagagagaaaagagaaacgggccatttttgcatctgtcctcgttcatcccccacactgccccacacatccatcgccggattcgcctccgcctctcccttcctctcgtcggcggcagcaagcggcggcggcggcggagctccggattcgaggggaccaagcatcgcctgcagaggaatccgcctgaagggtaagcacccctcagctcgacgcatcgcgctctgcctccctctcgatttcctcgtctgctctagccgacgtcgaatcgtgatccctagcatcgtgtgttgatgcggaatcgtggttgaacatccagattggacttcgattccgggaggatccccgcccggatccgaattttggccgaccgggatccccgtctcctccgccgagatggggagcacctcgtcgatgctgacgcagtacgacatcgaggaggtccaggaccactgcgaccacgcctgtgagtttgcgcgcttgtgtttctctctttcgattggattctgaactctcaacgaagattgatgctgtctgccgctgttcccctccgatctgacctgctgattcggggtgttttgggagctaagtctcgcagcaggagatcgtgtcgctgtaccaccggttctgccagctcgaccggaatgggggcggattcgtctccgccgaggaattcatgaccgtccccgagttcgccgtgaaccctctctctcaggttacaagacataactagcctgttcctcaataccttttcttattctgtattgagaacgagggattaggaaaggaatgaattgggtgattgggtagatgtttgaggaatgctatttgttaatcgatgcgatgtctctgtcagaggcttctgaggatgctcgatgggctgaactttaaggagttcgtggcgttcttatcggcgtttagtccccgcgcaagcctgcagcaaaaaattgaatgtgggttcccagttcgtacttaaattctccatttgctttctgtcccggatgtctagatgttctgagaaatatgctatgttttctctgtagttattttcagggtttatgacactgactgcaatgggaaggtggcatttgatgatatcttgagcatcttgcgggatctgtctggttcttttatgactgagcagcagaggcaggtttgtgcttaagatctttggtgccatatcatatgtgctaacatatccatgttcatttatgtccataaaagcttgtgtagttgcaagtaattgtaatttgttgattgctcatgttgttgcaactacaatgctgctaaaattggtacctcacatgttgctctgagctggtagtcaagtggtcaattggtcataactgttgatcgactctaaatgcggaggactactttttttttgttccatgatcacattctaggccttgctggctgggataatttttggaatcaatagcgaattctaccttcgagtcaatttaactaaagcgtaatagtaatgtatttttggtagagcactctacagaatattttttttccttgtaagtaggattccgtctggtccgtgcttctgccggaccagcataataggttaatatacatcttggtttacttcgtaataaaataacatcatttttttatggtaaagtatactgtagtccttttctgctatactgatgtatgccacttatgcatttcagaaagttttgatccatgttttagaagaagctggctatacaaaagattcaaattttactctgccagactttatgaaggtaagctccaatctactactttattcccttagatctctttaaccttaacagataaatattttctgcactagtatcaggagcatacacattatgcttggtgaatcagatagatgttctagaaggaaaatatcttgtctgtatttgacaggtttaattttgaataagctgatatcactaaattaaaatctagttgtcatcatctccttatttgttctaaatcgagcatcccattcacttggttttatggcatttagctttgaaatatctattttgacctatactttccataccatgttattttgttaaataatgtagcattagcatgtgatcattttttcattaagaaatgaatggttttgattattgcaatcagcagatcttcgtatttacttgattgtagctaaaaattttcaccttttgtactcacgaaacttgtttttgtttccagattcttgacaattctgatgtgaagatggaggttgaagttcctattgactaagtacttgtgtcattgttctgtgccccggcatgtatgtcagcttgagaagatggattaattagaccctactagtactttttttatcatgtattaagctgtaattagtgaaacatctgtatttgatcattttcaggcttaattaacttttaccacccgtgcatcctatgacctttcaggtactgttaccctgtaaggtccccttcattttttcctaacatcttttcatattgaaaacgtctgtgatattatggcttattaatcctttctagtaccttccattatgagtgaaaaaaatgttctttgttctctcgcatcgaggatatctgcaaattggagcaggaacaatttgggcttgcttggatcattgtcaatccatgccttaccaaaatattggcatgctaaattttttttggtggagtatgattggttggtttgttgccaagttgtttgagctcatggttctcttgccatttttttttgatccccagaggcccagttcaaatgcacgtctagcttctccagctactaatcttctgcatggcaagtttagaggcagtaatccaaaaacaagccctttatctcgtcgtacaatgggcaatgcaacaatattcatttctctaggtcaatatggctaaccaaaggtggcgacgttagcttaaatgttaacttgctagactgaaataacatgccagtatgatcagcactactccatccgtttcataatataagtcattttagcatttctcacattgaaatgctagaatgacttacattgtgaaacggaggaagtaccaaaaagtcactgaggtacaaaaccatgttggtctaacgtgtttccgacaggacatgctgctctggctttttatctgccatcctcatgtttgttggtattccaggcagactggtgaagagtaaataggtttgctcagctcagatgactccaaattcacatcccaaaaataaggaacaccttcctgtctttctccctctaaagttgaggtcatcaatgttttctcctattaatagacgctaagctgattacctgcacttctccctagcagggaggaaggaatggcagaaccattggagaattggatctttggctcatcgttggggggtttcaaatatcggtgagtttgtctgggcttcatgtactccaacttgtcgttgcttattcaaaatttgttttctatatccaattgttaatccagtcatgtcaaattttgtgctcaactagtggagtaataaattatcaccacaacatccctcaacacctctgggaatcgaatgcatgatctattgtattaaccctgacagcaaaatcataacagaattcttagtcaatttgaactcttacattagtgcttcgttatattttttcagcacggctgtcaattttagatactgaattccagtttttcaatttattgcaatacttttggcatctaattagcttttatttagtcaatgtgcattatgttatgagcatagaaacattaaccctccatagaaaacatatttcgttaatctgctatcttctcgacatcttcgtaccacctttgttttgtatattctttcctcttctttggcctttctaaatgcgcttgattgacgcttttcaaattattcatagctaccatgggctaatccatggaacagccaaatggtgctttttcttcaaaagcatattgtcttgcctagttttaatttggtcctccactctcaatatatatatatgatcctgttagtcaggaaatatgtggatcatgaggttatcatccttgccaacagttatttttatttaaatttttaacatgtaagattcaattttccacattttaaattgaatacgaatatatatatatacacgtaacatgctacgatgctattaatatcatctctttctcttattcttcatggcaggatcacacattttaggctaggggcataaatttaagcattataggatacatgatatgacttccgtagtgcgtacaatgtggatggaagttttaccctatgatagaaatattaacacatcctggattaagttttagtaggtgcaaaaactgaaactcatttgtgttatttatgatatcacatatacaattacataatcaccaaactactagaaaggaatcatatgtacggtaatattatttttatggtgcggaagaattgtgacagtattattctaggctgagttgattttacacttcaaaatcaactccaattttttttcctttttcagcttcatccaatcctcgcatgtcttcagagaataaagtgaagtttttttaaatattgcaggttcaatagatgaatttaatagattctaaggcaaatagtaaaccatatactaatcagagcctttgagaaagatggcagaaactgaagatactcagttacaaaaagcaatattcgcacagtacattatgatgaagaagttattcatggagttggaagaggagagagaagcttcagcaacttctgcaagtgcagccttgtcaatgattcgaaagcttcagaaggagaaggaggagcagaggatggaagcatggcagtacaagaggatagctgaggaaaagattagccacagtgacaaagcactggagattctacaggaagtccttcaacagaaggaactggagaatttttatctgagaaaccaattgctggtgtataaacacaagctattggatgttggtattgatgagtgtgatattgcagacgagacgataactaacaatataccattatttgaaagcaaaaccgtggagaatctttgtcgtagcatcaaaaggaatttctctctgccaactttgcagatgaagaaactttttgccgaaaaggacaccgacagaaatgttgaatcaacaaagagcagattaggtggctttgtttgtaatttgagtgaagatgaattgaagcatatttctggaaatgctagtgacttcaaggctctagaggttcagaaaagcttgctgacagatggggatgccacagaagaacatggagaagaaccaaatcctccaagcagtgatctttctcaacaacctcatctcttggaagagtcaagttgttcctcctcgttgttgagtaatcatagagatacatccagtgaaagagcaatacaggttggggaaaatgcggaagatacacgacatggtgatcaactcaagcagtcacattcaggcattggaaaggaagaagtacaatcacatcccttggaagagtcatcaagttgttcctcgttctccacatcgagtaatcacagagatatatgcagtgaaagagaaatacaggttggaagaaacgcagaggatgcaccacatggtgatcaaaccaaagagtcacattcaggcattgaagcggaagaggttgcagttcatcctataagtgacatcgttgacacaatcaagattcaagaaagaagccaaggagtagaagaatcctcatgcactgcaaatgaaatcatcacaaaggagtcagaactttctcccaaggacgttccgaaagagcggcggcctcaggctctatccaagttatctgcaacaagaaaagttggctccatgaacaacctctacaggaatgtccatgtaatcaccgataagagttcgacgccacgaggaaagaattcaacgccacgagctggcactgagaggaccagatcaaggctgaagcgggtgcagagcgagaagatggttgagatgaatgacaccaggaaaaacaaggagcagatcataatgctcaaggaggtgtacgagcagcttaacatgatagaatcgcacatgaggccttcgacttcacaggagacccctcggaatgaccaatccttggaatctgtcttggaggtaacttgttaaattttcaacttgttatgaaattttacttttgtagagttctaacatgtctaatcatgccaattttccaacaggcggctctgtccttctccttatagctagacccttgtggcctctactctaccatctgaacttctgaagcatatattcagaggccacctccagttttgaggcggccatctatcaggaacatctcttccatgaatacccaacaaggggaaatgcatagagtttttatatgcagtgtaaaactgcaaactcccatggtggcgttctttgagaagtctcatacacacactcatctatcaaggcctccttcgagcggaggattttcgaagaaattctgcaggaattgaactaattcctgtaaaattctgtgaagttttcgcgttcgggagtccaaatagaaagaaatctaggtgttgggtctgtgggctgtggcctgacgccccacttcggcaaccaggcatccgttgtagcaacgttcttttcacagtggcagcggccaatgcagccgttatgttacttgtgtgagaaagttttacggttctacagagacaattttttttaccttatcacactaaatatagttaatgccatttctctcttctctcgttgagctatatcatcttaattatttatggtctaattatcttcctcattttcttcttttataaagtcatgtcgccttaattatcttccttcttcttttcttgtcttataaagtcatgtcaccttagtttcttagttttacctctagatgattaactatattacctttttttttccttttctcataaaccacggcttttgaacaaccaatccatatataatttaaattattataaacaacatcatcttaatttatatgagaaggggatggcggggaggaattaataatcaaaacccttgtttcttgggtatactcatgcatatacttgtagaacttgattattgaataattaaagttagcactcatgtgtgattatatttatacgttgtcctataaacgtgaaaattttttgtaggcttaggcacacagcacacataccctctatatagactagtagtactaggataagtccattccggtactaggttgttatattctgggatgggacggagggagtatgtttgagcttacgggggagctatttactcgcaactacgaccacacgcttcccaaataattaaacactatattttctcaaaaagaaaactttctataaagatttctttggaaagatttttctttaaaaaaatattaacctttaaattttataacagtaaatatatttaattaattatctaatggagtaatattttttcttattttgcgtatggcttataaactcatttcaaagtttcaaactctgtttagaatgggcccttactcgatataattgaactggttcttcgtagcctttttagctggccttttttttctctctctctctctctctttcagaatttttcccatcacacaacataatttttattcagtaaaaataccactgtttgtgtgccgtataacaaagaccggtgatgtaaaacatttttattaacaaaataatctatgtgaaaagtgtacgtggtcagtcggaaaaatataaaacagtcattcggacaggtgttccgtgtcggcagtcagctgtacatttcattttgcacacgtgttgtttcacaggctcacagctgcactacgaaagcgaccaaagtgctacggcatgttgggcccctttgaatcaaagggtttatctagaaattttataggattcaaatcctataggaaattttcctacttgaccctttgattcaaaggattgaatttttccaaatcctataaaattcctatgtaatgacacattgtatgcggattttggaggaaatatagcaagagctttaacctcttggaaaattccttttgagtctatctctctcatccgattcctgcgtttttcctacgctccaatcaaacaaccattcctgtgttttgcaatcctctattttacacttcaattcctattagaatcctgtgtttttcctattcctctattttttcaaccctggacttgcaaaattgcaattgccagttcacatttcaggtttggatctactgatcctggattagccacttggtgctctcactcaacggatacgtgtagatcccttcgcacggcgcaaactgattcaggttggtcacctaaacactgccagaaaaaaaaggtttttcttttaagaatacacataagatttgtgtatctttgtagtattaagaacaaaaaaaaatggagaaagttttgctttgggcttttgctcagttgacttttaacacgtcaaattttgcacagttcgtcaactagtgatgggattcaactgcagatttgtcatcttgatctgtgacgacgaatgcacgatatgactatgtaataacaattttcatgtacgtaattgaaagctaaattgagtttccaattcagctgttcatgacccataactgatgtatgatcagtgtctgatgatcaattaattcctcatggaagtacattgattcaggtcatgggattgatcaattccatgccattttcagagactgttgctttcttgagtactttgaattcaagatcaatctaaccgattccaattatttttcctggagtcacgctctttctctttcatttaattgctgtattttataaacttgaatcataatttaatcaaagtcaaaacccacagcatctgatttgtccgttgtgctgtctgctacttggttacgtctgtgttgtctgctacctgaactgaaactggaaccggtccaggatggatgccttgttttcatgtcaaaatctgctggctacacacaatcacaagtaacccagttaattagtctacaaaaataaaagtaacctaagtctaccaaaaaaaagtaacctagttgatcagatcgagaccgtggcatgccctagcagcactacaggattgatcatcgatttggttgactgctcataaatcatcataactgaacaatgttggtgtaagttcatatttgccgccttctattctgacggccaaatttgttggaagttgctacggtctgccataaatcattaaattgtgcccatgctatccacaagaaaataacaggagagattcttttgtctgcgagattgtggaaaaacacaaccttatttctctttatttcattgtttcttgcaactccacgatagtgatgtaagtatggatgaacagtttgaaatataatgtataaaatcaaggaatgggaagaggagcaagaacttgaacatgacaaagacatgacaagagaaaatataggccagtcaaacctggtattgcttcaccgcatgcactcctcttactttaacagtctattttttttataatgtttgatagtctaattaggacggctatagattattgacgtctatttatttttaagtagtcattagatttttgtttattttaagaagcacatcaagatacacgtacagtcattagtcaaactcttgttgaacagtatggaaatgtccctcaggttctcatgcaaagattgccaactaagcacgcccacatttctctcccaatttccataaaaaatactttttttctcccaagcttctttgacattaatttattatactgtaaattataatatccaatgaatggtttgtgcttgacataatgaaaggtcagaatccgagcaaatatttttccttatctactgacccgttgtgataagaaaagaatttgaggatatctaatggccggaatttgttctttgtcaataaaagaagcacgttcagaaatgagcttctttcagtcagaaaaatggtactactaactgctagctagtactagcgtgcgtgtcaaatatgaattcacgctccgatcttccaatcctaatcagtaatttgtcacgcaatcttgcttcaaaacaaccggccgtaccgttcaatacggtgcatgcttgcaacattgacatctgaattaaggaaatgttcgcccaattctgttgatgttttgatgatgggagagccattcaatttagactcggttttgcaaagacgcatgctggcagcatgctcagtttgacatcgtgtgtaaatactctgcaaatttggtcatgcagatcagcctttcagatttcagctgcatacgtacacaagtacttgcatttactgatgatcgtttggactttggaacagatttgagaatcccgagtactgtacttattactacacaattaaccttaagtcaattttcgagggctagaaaattctattattttcttcggatcatgatcagttacgttactggacatataatactatctgctaatccggtcataatcaggcagtatagatcagaacagatgtgctactactgacggatgggtggagccgttaacgaaatgaagcggacagctgaaagttgcagtcagagacaagagaatgtcagctacactcatgaagtcttggaaatttgcagaaagtctaatccgtatactgctcctggccattattaaggaattaaaatgccggcctatttcagttaacccgtggaagtagtagtcagctagtgcgatctctgtagtgggataatagcacttgcgtagccatgtcatgggataatagtagccacaagaactaatttctcacaaaaagaataatcaataactaattctatgttcctcctacagactaatcctatgattctttaaaattttctatataaattgtttagaattgtaatagttaattttattcgtttataactctcgtgcctcctcgaatatcaataaaaacccgataattcatcatttattcatctattaaaaccccatgtgagatagattattctgcttcattataggaagaaattaaatttttaagaaaggaaaaagtccaaattaccctattaactattgcgacaatacaaattccctcttaaccacaaaaccagacatcattcaccttaacttctcataatggacgaattacccccctgagtctctttagagcggttttcgtcttatgtgacacacacgtagcagtccaatcagcattaaaaatttaaaaatagtgggcccacatatcatacgtgagcaatggaggatgaggggagatatgacatgtgggcccactatatttttaaatttttatgctgattggactgccacatatgcgtcatgtggaacgaaaactgtctagagagactagggggtaattcgtccgatataaaaagttgagaatgaaggatatctagttttgtgattcaggaggtaatttgtattgttgcaaatagttcaggaggtaattcagacttttctctttaagaaataaacttaacttgtactaacttataacatgtggtctaaacaatatcgagaatttttcttataagaaaacgtactggctccatattttcatattttttttatagatgaggtcactgatttttaaacatatgtttcactattcatctggtcaaatgaatggtcaaacatctattaaaaattaatggtgtcatctataaaataatagaagaaatgtattttgtagatacatagagtaaataatcaggtgaaagaacggaaccggaacaatcaaactgggacctcaaatatgctaaagatgaagattaagtacggtaaaaaattaatacataattagttgagttttaatattttaaatttgaaaaatcgatttatgagatatttataaaatacaccattttacagttttaaaaaatacattaataaaaatcaaaataaaatctgtaacttaatcaggtttaactgttcagagagtttagcaactactcccttcgtctaaaaaaaataaatctagtactgaatgtgacatactgtagtacaataaatttaaatagagatatgttcagattcataatattatgatgtgtcacatttagtaagttggttttttataggacggatagtttgtggctggtttttcagcaacattggggggagttggggacaaagaagtcaataattcaccgcaacactgccaccggtaaatccagagagagagagagacaggacacagctgaggagagagaaaccactgcaacccaaggctagccgcctcactccctctctctgtttcctcttcttcttcttcctcccgccggtcagctcagctcgcctcgtctcctccattttggcgacgcgagcgagcatattaaagctgtgccggcggctgcaactttgccgccatttatttagctccggctcttttaaaagctctcttctcctgctgccatcttcttctggttggcaccaccattccatatataccatctccctcctcctcccgcgctcgctcttcgccaatggccaagcgacgcagcaacggcgagaccgccgccgcgagcagcgacgactctagctccggcgtctgcggcggcggcggcggcggtgaggttgagccgaggcggcggcagaagcggccgcggaggagcgccccgcgggattgcccctcccagcgcagctccgcgttccgcggcgtcacacggtgcgtgcgttggctggccggattttctcaccggcgtacgttcgccgcactgggctgacagcgtttgtggtttggatttttttttttttggcgcgcaggcaccggtggacggggcggttcgaggcgcatctctgggacaagaacacctggaacgagtcgcagagcaagaagggcagacaaggtatcatcaccaatcactccattaatccaccttatagttgcatccctcgagctgctcgtcagacaatttgctcattctgatttcgctgcgttctctcttgttgctctgattttgcgatcggattggcgtggccggacgaacagtttacctcggtgagctcccaatctgaacattctgaaaccaaaatccatggccacgcagaaggattgtttgctgaccacctcactgtctgtgcgccggcgttgcaggggcttacgacggcgaggaagcggcggcgcgcgcctacgacctcgccgcattgaagtactggggccacgacaccgtcctcaacttccctgtacgtggcatacgcctctccaaaaatccatggcatctttctctgaactgaatcctctgcacaagcgttcttcggaacccttcaagaaatgcacgcacagtgcagcttgtttgattctgtttggttttctgaggaagattgttgctgtttttctcatgttggaactctctgcagctgtcaacatatgacgaggaattgaaggaaatggaggggcagtccagggaagagtacatcggatcgctccggaggtaaatattcagttaaccccatgttaccactgactttcaacaaagagaagttaattcagatcattacaaactttcagaaaaatccaaatcaaaacccattgaaatatgcttctctgatcagacatagtgaaatattcatgtctgagaagctgtgttttgaagtagttcttcttgattaagatcataaacctttttcaccctgcaggaagagcagtggcttctcaagaggggtgtccaagtacagaggagttgcaaggtagttaatcagtactaatctacactgaaggttccagttttctactgaacattgctagtagaatcagttaattaacagctgttttattcaggcatcatcacaacggcaaatgggaggctcggattgggcgtgtgttcggcaacaaatacctctacctaggtacttatggtaagtagtttgtgactttgttatatatgtatgcattaaaatgttcttaaactggtaatcagtcatctatcttgcgggtaaaaagctttgaaatagtataaattttacaatggaatagattcttcttatctgagtcagcttgcgttatcaaaaaggtagccattgggtgtcgttgttagataggtgacacctgttagttgcaaaggaaacagagaattttttagacacatccaagaacattgctgatgtgttggcttcaagacttcagacaagtagaacctaactactaactactcctttgcaaagacgaaaaggcacttggtgaagtaaagatgaaaaggcacattagagatagtttggaaagaatgtcactgaattcaaaagagctttcaaactatggctatccaaactaggattcgaagaaattgaataggataaagttcatgatctttgggataagattcgccgagttatgtttgaagcagccgatggccatactctggtagggccagttcatctgaatgccacagaaatgtttccgtacgctgtagctaaaagccgaccgatgcggtccagctctgactaggatggacgacctttgtttgattttgtgcgcaactatgtgcaaaatttccagcatgaactgaattgacgattttagacctgtttcctttcgtcaataattcataaatcaccatggcatccgtatgaattggccaccaactgttgtgtctagttgctgcagaaaccggtggcatgatgtgccgtgcatctgcacaaattcaaatcagttttattagctaaccgtaacgttgcctctttgtcacatctgtacaacaatacaagggacgtgcaatccagaaaaaaaaaaagtccacaacgaccggtatgttgaacaagtcggtatatgtggattatttgcttcacacttcttttaaaaaatgtggtgcatttcttcttggttcacttgctataagttacttactctgtcctaaaataaatcaatctaggtgacgatctgacacaatcacacaatctctttgtccagattcattgtaccacctagattggtttattctttatgtattatgtatttattaggtttattatatataatatttaagttttcgtataatcaagtagataatctatcaacatacatatgcgagcaatatgtttgaaacactaattctaaaagtacactttgaagtcaaggacggaggcaggagtttgctaagcctaaggctcaacaaatgtaacttgttagattttcaaaattttcaattttttttggatgaatttaaatgggattgatttagcaagcgcactttatagtcgttatattccctcctgtccgtggggcccacagacagacaggcaccaagcagtggcaactggcaaggccactggttcactgggcctggacgcaggcaggatggcaggagacaggagtcccaggcagccacacgccacagtgacccactcccacacccaactcagcaatgcacagccacaaaaccaaaccacgctctttctttcttcttcttcttttttttttccttttcttttctctttttttgcgggagaaacctcgctcatctcatctaagccaccatcttgtttttttctgaacgaaatttaccatttcatatggatttcctctgctatgttttttttatttgttcatggctcacggtgctcttttttccgtacgatctgtcagcaacacaagaggaggcggccgtggcgtacgacatcgcggcgatcgagcaccgcggcctcaacgccgtcaccaacttcgacatcaatctctacatcaggtggtaccacggctcttgccgctccagcagcgccgccgccgccaccaccatcgaagacgatgatttcgccgaagccatcgccgccgcgttgcaaggcgtcgacgagcagccgtcgtcgtcgccggcgacgacgcgccagctgcaaaccgcggacgacgacgacgacgacctcgtggcgcagctcccgccccagctgaggccgctggctcgcgcggcgtccacctccccgatcggactgctgctgcggtcgcccaagttcaaggagatcatcgagcaggcggcggccgcggcggcgtcgtcctctggtagcagcagtagcagcagcacagactcaccttcttcttcgtcgtcgtcatcgctgtcgccgtcgccattgccatcgccgccgccgcagcagcagccaaccgtaccgaaggacgaccagtacaacgtcgacatgtcgtcggtggcggcggcgaggtgcagcttcccggacgacgtgcagacgtacttcgggctggacgacgacggcttcgggtacccggaggtggacacgttcttgttcggggatttgggcgcgtacgcggcgcccatgtttcagttcgagctcgacgtctgaactctcaactccgaccagggtgtttcgggaggcccacaatcccagcctgttcccgtagatgggctggaaagatcgaatcaaatttgggcctattcaggggatgggctgggagaattgatatgggccggcagggatggccgaaagggaaggcctcccaagttttggctgtcaagaagctagaactgagttctctctcaaaagagagagagagagagaagctagaactgaggattagttgcttactcgcaaatactagtagtttggaggaagagtaaaatattggtttatttgttgcccatctctgcgaaggggaatttaccgtaataaagagtacatattgccgtttttatacgaaggctagtttatgcgtttcatcgcaagttatttcctgttgcaataaacctgcattgttatacatcatcaattctatttttttcgcattaaaaaatctaccttttcttttttatgttaaaaagaacgcttcaataacttccactaaaaatccgcaaatcctagccatccgattagagatcaagggctgaaacgatctccttccccaacggccggtgccaaaaacgaaccattacttccactaccccacaccgcagcgcacgcgcatgtgggattcccctcctcctcttcctcttcccgccctccccctccactccacctctctcccctctcctcaacccaaccgcccaatcgaatcccccaaaccgcagcaacggcggcgcggcgcggcggaaaccctagctctaccctcctcctccggtcgcatcctccccggcatcgccgccgatggcgggccctcccggcccggcaccgggcacctcctcctcctcctcctccctgcccagccgccgccgccgccgcccccctccgcgcctcggccgacgccgcggcggcgatgatcaacagcccccgcatcctccaaaggcctcgtcggaggctctcccctgcgcggcctccccgcccgcgcggtgccgcggcggtgatcaccagcccccgcatcctcccgaggccgcgttagaggctctccgcggcgcggcctcccctcccgcgcggcgccgcggcggtgatctacatccctcgcatcctcccgaggccgcgtcggaggctctccgcggcgcggcctcccctcccgagcggcgccgcggcggtgatcgacagccctcgcatcctaccgaggccgcgtcggaggctccctccggctcggcctccccgcccgcgcggcgccgcggcggcgatcaacagcctccgcccgctgtggcggtggcggtgactagtgaaggcggcgtgggtccccgccgctcgttccgcatcagcctgcggcaccgcgtgcgtgtggtcccgtgggtgaagccacccgtggcgaggaagcccaaggaccccgcgaagcccccgcgcccgtcgatcgaggcgctcgcggcggaatgggcgaaggagaaggcagcttccggggcccccgaggaggagtgcgtcctgcctttcctccagaaagatgcgcctaagaaggtagcgagctgaaactatcgaattcgttctcttctagtagtagcatttggctcccagggttcgatcgttaggttgcgtgggtaattaatgcactagttcccctcttcgggcttccttgcgatgttctatggtggatttgcccctgcacactacgaaaattgcagcctattgctgttgtggtgctttgatttctccgtggaagggtggtattttggcaatctggggttgtatgacctcagaattcaactattagcaaatgtagggtccaactttgtgtataagggttacaactagatatgtcttcattttggtaatatgacagtatgttgatatcgccttctacttctaggatatgaaattaaagtatagctgcctccatttattttaggcaattttacaccgtgtcatctgaaacgtgtttataaacgttcatgcttttggttaaaagtttttgtttcctgttactttttgacacgtgagctgtgagaaactcattgtctgcatcgcctgaagtgtatagaactttatataactctgggtttcttgatggttcagaaatctagtgtagctgtatatggtctggacatttgtagcatcactgtacaatctgctgattcaattttggactatctgtataacacccttttgttatgctttatattacagaccagctaatagcacaaatgtttgattcactgttagcaccactgtatattgtgactggttagaatgactacaattgttgtcatgggtcacccagaaatttgagaaatacaacataagatttttagctttcttgagaagaggtggatggcagagaatttggggtacaggctgaaatttcatatcggttttcatcattatataatcttgataagctcgacattgtaaaagttcttggactagatggatttggatatatggatacagtgatattgagcttgaaggtatagcaagggctgcaacagggatatggatggctaagggttaaatcttcaatttttgtagagttacaggaaaaacattcccattacagtaggaaatgtaagtggaatggaaattcattttgtgttaggacagttggactaaggacaccaactgtatttccaagaaagctagtttcattaaattttgggtagctggttattaaaagcataatgagaaaccaagttaaatggtgaatggtgatggaattcaaagtttgtaaacaacagataacgatttgtagaaatggtacaaatgataggtcactttctgtacatatatgaatatggactgaactgatcgtggaaagcaagtaatatctgaagagaaaatatggaagagttaagctctatgcaagaaaaagagctggatgtataggagtaaacattttcttaattaaggcagggatggggcttgaactgtagtcctcaactactgcgcataatcgcatatgggaatgggatgtcgatctatatgcatgcaacctgaagaaactgaatttttgctgaagaggtcagatatttgtatggatgtctccctctcccatgagaaaccctgatgtatattatatgttgctcaaatgttctccatacagtaattattcagtaacctgtatagaaattgatgactatgcgattatttaactaataactggtagaagaagctcatattattagagtctgaatagatggaggtttggaggcattgcttgccgctgttattcaaatgtctggttgctgataaataacaggaaaggaagcttagaactgctgtataaatgaagtcagtgtgtggacatcttcagtgtagaattttaaccagagaatcttattagctaatacaagaaagaagaaagcttcatcaagaaatgaaggaagaatgacaagaaaatcttaccatagcattctggtccagctggaaaattttggctcataggatgttaatatcaagttgtctctgctcagtattacttgaatgtatactactcatctgcttttttattgaagtacaaaaggtattgtgacacctcctgattactggaaaaaaggagtcctctaaatcattttggatttaggttgagtgcctggtttgctcaaagagtattctgcctgatgacaagatgtgttgttcagttcgtgattgtgatgcaaagctgcataaggcttgttctgaaaaaggtgatggatgctgtcctcgacatgtacgcttctgaaaccaagttactgctatatttcagttgtttctcaatgttttctcattgcctgaaaaatgaagcagattgaaatatccatatgtacataactgagacttttgacacatctcagccctacataatagcaatcaataattacagtttattgataaagagaaactgagagtttcaaattgcatatgtgtgtcaaccacttatccttatctgcatatgttgcttatttaataaaggggttaatacaagagttggatattggctgatcagagaatgtggatgtaacttgaaaccttaaaccattggcatgtatagctgcaaatttaatgtttcatcgtttcctcaccatgaccaggcgttaaaatgattttgcacttagtgaagattaattagtaatgtcatgagaatagagtgcctcattgaaaacgccatcctactatttatgagtttgcttactatatgttgcaaaagattactgggttgacttagagtttttcttaaatccttatttaaaatattaagaatttaatacctgtacctgctttgtttctattaacattacttgattctctgttagatgtctttatttctgcaatttttttctgtcttttgatggtaatttcattgatatcgtgatatcttgctaattacaggatgcaggtccaacagatggtatagaggtgatctatacttccttttcataggtctcatctgtattattgaacactacaacctatctatatgtgtaaggtgcatcacctattctttaaagttggctgcttagatgtgactgagtctgatgcatagcattatgttagatcacatgtttttgtttcacttgctcagtgaagaattttattagttgctaacttgatttttgaaaaatgatttgattctttactcattctatatgtgcttgtttgaatctgtgatgatttgtttcgtggaaacaaattgaaggataaaatgtgacagcaatggatgtctttctagtttttcagttcagtattttgtttctacaatttttctttgatgtgtgctctgattgatttacaggaagccttccggcgcttacccctcccacacactttccaagagttcaacattgaccctataaagaaagaggaattggacaatgggacagaaccacctccatatgtacacatgaagcgtagtatccttttattgcttgtaatttaaaatatgcacctttttctatttacaggtagctctatttagtgtaaaaggagtttatgcttatccagtttttactccttttgctttgagtgcttcaacaactattgttcccttaatgaactaagatctttatcttgtcaagaacaaatgtgatgatgattccattgaaggtggatgcactaattgtctccctgattttacctgtaaattaagctgttcatgcaggtacaaagtatccattccatttattatgtgcagcttatcagactttctcctgttgctcattggatatagtgttttctcttatgctcattggccataaatgtatgtggatttaaaaagaaaatatatattttttatttttttacagaaaattaagataattcctacaggtctctattggttagctgctctcgggcttgtcactgctcagatgagtgcactaacaaaccatttcgccgacagaaaaagattgagatcgttaaggtaaggcttgtcatggactgctgagtttttggagggcagttaagttccatagttgtcttggtgatattgatacatgtaaggatcttttcctaaagtactaatgctgcccttttctttatgtgttcttatgctgtgcttgattgtgctttggagatctgattttgaaattattttctgtcactattgtttctctttgacaacctacttattagtggaatacttctgcagacacaatattgtggatggggatctagagcactggaagccattgagaaagatgattttgtcatagaatttgttggagaaggtataagatattcattatttggtttgcttagacattttattgtaatttattcagatcactgcttcttcttacttatgcttttgtggactattttatcaaaggattttacatatgttaaacctgttaaattactttcatagggcagtactgaaggaacttgcctgaaaactttttagctctgcttacttttgtttattgcagaacaatagttctacctttcgtacctgccaactttcccaatttacctatctagatgatttggtagaaacacactaataactgggctttgttttctccccgaaaaaaaaactattaccaggacaaagttagatctattttagcttattttccaacttaatattggaatacctttttccacatgataatgtatatttcagcatagtttgatgttccatactattgcctctgtaacacttttttatgcagtgctaagatatgccctttgtttgttgtttattatagcagtctatcggttaattgtatatgatatttaaacttacctttttatccttgctcctttctggctgctaataattaaattaatgttatatggtcatgcgtcatgaatcgttttaaaaccagatctaccaggcaaacctgttactgttaagtaaaacatagtataatccagttaacaattataacttgctgagttatcggtataatcacctaacaggccatttgcaaggttagtgtagttaagcctcacttgtcaagctcatttatggcttatactccctccgtttctaaatatttgacgccgttgactttttaaaacatgtt

SEQ ID NO: 6238 - DNA, 21085 bp, Oryza sativa
ctcaaaatcccttatattgtgggacggagggagtaacaaacacccatggaaattaaagatgccattgaaaacaaagatcttcttttggtatttccgttacaaggggtagaacgatcttcctttggtatttccattacaaggggtagaactgacaaatgatgacaattaatctatctaagcgaaattgacgatgcaatatgaaatcgttagttctattgacgcaactattacttactgctcgctatggctatgcgtgaaagatatatttttctgataagaaaaaaaatcatcttctttaatataggctatctacttacttatccaatagcttcgtacatgggtctttatccttcaaaagacgccggatttacatgacttggttgcagttccctgtcaacaattggttggagcaggtggatccatggttatgggtggtggtctaatctcttcgatcagattgatggtccttaatattagtacttcttttgagttcattttcataactgtttgtttctttttgggttgtgtatatcttagctatacagaggctagatgtattttcacgactatatcatcttgatatagttatcttgaattcaataaaagcttcctttataagaagaaaaggagtgcctgcatttcactctacttttgttaccagacaccattttggtggttcctttctagcaacaaatttataaacacttagaaatagactataatacttcatattgaagtatgtcacgtggtaattacacactttttatatataactaggaaggtggcccgcgcgtatgcgcgggcacttatattattgaaaggtaagattattgtttgttcaaaaattttgtctcatagatttagggcaaactaaagtttggataattttattttataataatttaagggttctatttttcttaaggtatcttagaaaaccattcacgaacttttgagtaggagatgggtttagtacttacaacttttaaatcatgttttttttctcgagtaaataagaaactattggtagttaattatcatacagtccatctatatacataccgtgtagtatggccgcaaatgaaaaatgcgagtgcaagaattcaaaactcttttgattaaatcatctcatgaaggcgtatgatatagtaataaagggagggaagcatatgcatgggaaaaaagaagaaagagaaaaatgaaaaaaagggaggggatgcgtacgaacccgcgcacgtaggtgcgcacctatgctgaggtgggaccccgtaatatttagtttgttctaagatcaatttaatctaacggtttataatattggacctaccgatttaagtgaaaattaagtaatagataattttattttttttcttagaatttctaatatttgccctaatttattagagcaccacgcggcagtttgagagcattttaaggaattttaaatgactaattagaatattaactgcgcaatatatatgtatgggacatatggtaatatttgttccagcttcgtccttgtttatataaatgtagagagaaattaattttgtggctagcaagccattagatgtctaactaatagcaattaattttgacacctatttacaattgttcagagtaactcttatatattcatcttacgacttcgataatccattgatcaccaatttactaatcaccatgacttgcatgaaaaaaaaatatgtagtaaggtttaggatagctgaaattgatgaattatataatttatgtgatagctatttgagagtataaacgaatgaattgacttctaaaacgttaaaatgttgtttaaagaagacaccatttagaaacttagaaagcgtgcaaacaaaaatccaaaatatgcaatcgggaaaataattaatcgctgcatcacacctttaattttcttttcatgttattaataaaattaatcatctccatatatgatttgatatgtggcaaaacggtagcgctacatcggttgtgatcaccttagatgtctcagacactgcgctttgttacatgtgcgaaaggcaaaggtgcatacgtatattgtgcagcgagcaaaaagagaatttcggacgctttatttattagcaaacaatagatccgatgattataataatatgtccaccagttctagtgtaagtgtaaattagttaatatagattttaaatttttattttaatgggtacataatataatggtgtagaccttacattgaaacagtgcattacgtgagaataatagaccaatgtaataaaaagtagatccgatgatttatataatggggccatcagttttagtgcacgtataaattagttaatatagatattgtttatttgataggtacatgatataattgtgtaaaatttattttaaaatagtgcattatttgaaaatagtggtacaaagtaaaaaagtacaccggtttaagttatatgatggtagattatttgtttgtaaaattatgattaattatttaaaaatatatccattatatatataaatggaaaaaataagaaaaaaaagaaaaaaaggaaaaaaagggggggaaggaggcgtacgtatgtacgtacgtatatactacacctgccaatgtgtgagaagaggataggtgggaccatggtatttagtttgttttaagatcaattttatctaacggtgtataatattggacccaccaatttaagtgaaaattaagggatagatgttttgcttttttcttagaatttctaggattttctctattttattagcgcgccacgtggcggcttgagagcgtttataggaagtttcatggacttttagtatataatagatagaagatagatagatagataatagatagatagatagatagatagatagatagataatagatagatttaacaactttcaagttattggtagcctggaacaataacctggttgattctggcataatggtagaaagcttgcctcattaatttttgttggtggaaccaaattaagtagactataaacaactctaaatttttgagcttcggcagataagccataaaaaacaattaaagcaaccaaaaataagttataacaaaactttatatctatattattgacaataattaaaagccaagagtacaacccctcaagaatctactctaaggctgcgttcgtttgggtgatagggagtgagaatgcacatcgttttccacgcgcacgtttcccaaactactaaatggtgtgttttttgcaaaaattttctatatgaaagttgctttaaaaaatcatattaatccatttttaaaatttaaaatagttaatactcaattaatcatgagttaatggttcacctcgttttgcgtatattcccaatctccttaatccccttctcctcaaacacaccctaatatttcaatttttggttgtgactaataagccaataagcaaattattagctagtttggacaaaccacgttatcaaaaatgaaaatcgtactagtaataagttttactccctccaaatttaaataattatcaccaaactccatccattttcaaaattttactactcgtctactccaacacaatagtaataattaaaaaggatgaactttcattcatcgtaatttttattttgcgattacacagcacaagcgcacacacacatgcaacactatactggcatacatccgtgaatgtgtcccctataacacgctctctaagagttaaaaacccaatgactcaaatttgaataattatcaccaaactcgattcatctttgaacttttaccagttgtctattccaacacaatagaaataattaaaaaggataaacttccgttcatcataatcttattgtttaagagttattagtggtcaaaattaaaatagatagtactacagtcaagatcgataattatttgaaaacgtagggagtaataattataaaattaacctgtaaaagttttgatattataaaagaaagcgtgaagaacgtacgagtactgttagaactaatggaagaaataaccccaatcacttctcgaaacgcatgtctctatatcaaattgatatgaactgaagagatattataatgttaggcgcagcgcaggcaggcatgcatgcttgcatcttaaactaagttgggcttatttggtttactattatgccaaaatataggtatgtagattttgatagtgccaaatcttttgacgtcttattgacacattttggtaacaaactaaacactagccaaactattatttaaaataacaacaatttgataggatatattttggcatcaaacaaaaatggtcctttatcagtcatcgcccttgttgttttgacagtgcagtggtaaaagtcccgtatttaattaccaatacacttacagttttcttaagaaaatgtttggagaggcggccctccctctgcatcttgttttatcagtcatcgccctcgttctccacgccgcgttgatcaacagtccgctcgtacgagtacgacggcgacgcaaaagctgccgcggccgtcgctgttcatggagttcgtgcgcgctcgctctcctcctcgcggggcaaaatgatcgagcaaaacacgcatatcgagtgcttttccgccatgcaaacaatgcatcaaacccccgtgtgggtaaggataattccggacgacgacgcccctgtacaacagcaatggccgtgactgtacgtgattgggttgtgatggatccaataattaggcatttaatcgccggggcatacctgtccgtcgtccgatataggactactactatagctcgcatttgatccggtgtgtgtggatcaatggcgcgtacgtgcacgcaggcaccagtgctatagcttctgcttctgctgctgcttgcttgcatgcaatgcacattgctcacacagcctcgcactgtttgggagggggcaagcaaccttaatgcatgccaagaaccgaactgggctgaaaactttaagggaacccctgtgccggcacgtatgaatgtttcagactttcagaggagacgcatgcatgcgtatatgtctcatgccctgcatgatgatggcatttgcaggggctcgcagttgtcttcggcaagaacaaaatttaagagatgtggagtgaaaacgctaacgcttgcagcaggtgctgggcctgggcgtgcttgcctgggaacctacacggcaagtggaattttttttccttttgttggaacattttcttttaatgctgctggagcactattgctgcctctcttttgcagtgagcgcagttaatcgctgggaccaaagttgttcttgctctcttttatttccaccatttttttaggtttgggaataagatattctgcaagcacgaaaatgtgccttgtttgcagcctgcaggtcgagtaaaagcaaaaccaaccagacgttccagactgactcgttttcagaagatcaaaagaggctatcattgtttagtgggggcccaagaagaaagaaggcccagttcatatgttcagcaaaattaactggctacgatgcgtccgtccccctgtatcctgtactcatgtgagcagcagaagtgaattgatccgtagtactgtacactgtaaaagtgtactcgtaaacgtgaagtttggtcttttgcttctgggagaatcagtttggtttttttttactgcacgcatcttagttacgataagtactattttgtgctcagtggttcctgcagtcatgtgctgcttcaggctttcagctgtttcctgaaatcttgccccagggaaaacactagcagcaagattaaccactgcacatctggcgccatgcatccatctcgattagctgtcaacgctgtttgggccggcgagctccattcactgattgacctatacgtttctgtgtctcatttacagatttttacctgttacctgtagttgccgtactcgcgaacaggaaccacctcaatcttcatggtccggttgaacgagatctattgacgcttgacttgtctcaattagaagagtgatccccaaacgataccggagctttcaggcacaggggataataagggttggatgaagtaaaagcttacacgtcttgcgggctttctctcccaaagccgtttaattaaactcgtgaaaacgatggttttatccgtcgccgtcaccccgtggccggtacggtgaagatttgctccacccactttttcttcagaaaacaattaatacatgatttgctccaccccccaaccatcatattactttctctacctctgggagactcggactcgcggcgtttgttttctttcagcttcaaggagggggcgcgcggatagcaccggtgcaccggcatggacgctgaccacgagcgccggcgtcccgagcagggcgctctgaggaggccgcttttagccgacgacgaggtacgtgtgcttctgcttccccgcgcgcccccgtagcagcagtagtatgtactaccaccgacagcttcgctgccggcgccgcgcgcgagattgctcgttgcttcgaatcgcggagggctcgtgttcgcatcacccgcgctagccggccaccgcggccggtacgtcgcgcgcggctttcgcgtgtgccgcctgaattgggccgtgcacggtgcacccgcggcccgcggcgcccctcgttgtcgaacaacacatgatggatggtccacagaccacagcagaagcagctcctccactgtactatatggttgtagacttgtggccaccgcactgcagagtgcagaggagtctttccgtttatcgatttctgctctgctgaagattgcgaggtacaataggctggttaccttcgcattccaaatggggcttcgatgagaacaccaacttatttacttacgtggcaactgctttattgttctattttttggtcaaaatgagattggtactagtatacggcgactctgctttaaggttttgcttgctgtaatgcttgcaggcatcttcctcaaatcagagcctggtatctcaggaagatcggggacaagaggtggctgaggtgcagaaggttgagagctgctccaacaaggcactgataatcatcttgagtgagtgcctagccatacttgctcgacttgttcaaatcagcaatattgcaatatcgtcagatgaaaatgctgagaaaaaaaaagagttactgtagtactgatttgtctaaaaaaacataggtctgaaataaatatgtgtgcagtagcagtagtcatcagctatagtaggttagacaacgatcggattagactgattctcgagaaaagggaaacgtagattagagtctgattgaaaataatgatatgactatatgagacctggtcttatgcatgattggatcaaataaatgtcagattaccatgcgcggatatcctaggattacctttcaactttttccagagtgatgtttttcagccaacactactgtcttttcatatttttgccttttttttgtctacctctgtttacattcttgaactgccaattcgaactgaattatgtaagattctcaccagtcaacccatcctaactaacaggcctgcaattcttggaaatcactgccttctacggggtctacctgaacctgatagtgtatcttcaggacgttcttcatggcgacagtgcttcgaacgtggcgacggtcagttcttgggtcggaactgcctacctcatgcccatcctcggcgccgccgtcgccgactcttgctggggaaagtacacgacggtgttggccggcttctccatagctctcgtcgtaagcgatcttcccctgtaatgcacacgatctgcagaagcacaatggcgctctctgcttctctgacggacacaatccgaacacagggcatggtcaccatcaccgcgtcggccacgctgccgtctctgagaccgccgtcgtgcgggcagagcgcctactgcgtcccggcgacgctcagccagaagctggtcttcttcacgggcatatacctctgcgccctcgggatcggcggcgcgaaggccgtgctgatcgcgttcgggccggagcagctcgacgacgacgacggcggcggcaagaacgagcgggtgcgggagaggaaggcgtcctacttcagctggtactacgcggtggccaacgtgggcatgctcacggcggggacgatgctggtttggttcgaggacaacgtgagctgggggttcgggtacggcctgtgcgcgtcgttcgtcgcggtcgcggtcgtcgtcctcgccgcgacagcgcccatgtaccggatcctgcccccggcgggcagcccgttgaagagtgtgatccaagtgcttgtggcgttctctcacaaggctaaattgactttgccggacgatccaactgaactgtacgaggacgacggcgtcaagaactcgttgcagcatccggtgcacgaacgattagagcacaccaaccaattcaggtagtaatctaatatattctcatggagctaggtgaacaaccatggtctcagagactcgtccctttgcgatgcactaggtgtttggacaaggctgccattgtcagcgacgaggatctggaagacggcgacaggtggaggctgtgcacggtgtcccaggtggaggaggtcaagattctgctgcggttgatcccgatatggctcacgtcggcggtctacttcatcgcgaacacgcaggctcagaccacgttcgtgcagcagggcaccaagacggacggccggatcgcgcgcggcgcattctccgtcccggccgcgtcgctgtcgtccttccagatggcgttcgtcgccgtcttcgtcacgctctacaacagggccgtgatgcccgcggcgcgccggtgcctcggccgcgccgtggcgttcacgccgctgcagctcatggggttcggccacgcgacggcggtcgtcgcggtgggcgtggccgcgtgcaccgaggcgcgccggctgcacgcggccagggccggggcgcccgccatgggcatcgcgtggctgctgccgcagtacctcgtgatggccgcctccgacgcgtcgctcaccgtcgggcagctggagttcttctacgaccagtcgccggagacgatgcggagcgcgtcgacggcgttctacttcctcgccatatcgctcgggaacctgctcaactctcagctggtgactctggtggcgaaggtgaccgcggtatggggcaatgcagggtggtttccactggacttggatgacggtcacctggattacttcttcctgctcatcgtggccatcaccgcggtgaacttcgcagtttacgtcgccctcgccaagaactacacgccaaagaaggttaggtagggattatacttgacattcgcttgtgtcagaacaacagaaaaatgctttgacgacgggatgcagaacatgcgccggcgaaggggctcgacggccgtcgtcgtccgccactccgcgtcgagcacctgaaatggcaagtgaatggtcttgcaataaacagccataggagggccttatatgtaaagaaacatagtacataggcaaaaacatgggcctaattttaatgggccgatttggacagattgactatctgtgggctgtaccctcaatttgttgggccagcatggatcgacatcactggcagcgatccagatttgatgggccaagatgcgacgcaactttcgccggcgaactagacaagctgaattttgcgggggctccttgctagggggcttcctaacgggcgcgtgcacgctagctgcctatctggcgcagccgcgcacgtccctatttcacttctcagcgctaataacgctgattagtattgatgaccttaattagcgctaatgataattgttagtattagttttttttcaaaaaataatacataaatagaacttttaactcagatgtggaaaactttcaacccggatttgaaactttcaattcggatttaaaaactttcgacccagatttgaaaacttttatccaaatttgaaaactttcaactcagatttaaaaactttcgactcggatttgaaaactttcaagtcaagatttttttaaaacttttaactcatatttaaaaattttcaagtcaagatttaaatactttcaatctaatttttttttaaaaaaaaattcaacttatattttaaaactttcaaatctagatttgaaaactttcaactcggatttaaaaacttttaactaaagattcgaaaattttcaattcagatttaaaaactttcatctgaaaatttaaaacatttaactcaaatttgaaaaattttatctaaaaattcaaaaaatcaactcaaatcttaaaaattttctactcaaattcaaaactttcaactaaaatcaaagatgaaatattcaacttctaaaataaaaaaattgcgaaaaaaggcaaagagaaactaaaaaaacgcatacgtaggtttaggtttttcagaaaaaaaaaggacgtggacgccgtccgcgcgcatacgcgccagcgccgtgggccttatgggcctaaacgcgcgccgccaacgcgtacgcgcgaattagctctggcgccttgctagcgcgttcgcgctgatagcgagcactcccctcttttaagtcttattaactatctctattagttaatatacttaacactaataatagtaattaggaaatattctcgagattttttgggagattttttactaacagattgaaaactttttaagttagatttgaaaactttcaatttaagttttaaattttaaagtcaaattttgaaaactttcaacttagatttgaaaattttcaagttagatttgaaaactttcaacttagattcgaaaactttcaactcgagaatcgagattcgaaaactttcaaatccagatttaaaatttttgaaaacttttaatttgagattcgaaaactttcaactcgagattcgaaaactttcaactccagattcgaaaaatttgaaaactttcaaatcgagattttaaaactttcaactcgatatttgaaaatattcaagttcaaatttaaaaattttcaactcaaaattttaaaactttcaaactcaaaacgtgctaaagattaaaaataaaaaaaaagtgggaaaagacgaaaaaaatgggtaaaaaaagggaaaaaaagcgtaggcggaggcgcgcgcgccgagaattagcgatcgcgaaatttcgttctccgtatcgttgggctagaactgcccatcgtacctaagtacctatttcgttgatctattagaccgtaaaaatttgatctgacggtcaccagcaatcctcctccatagcagaagaagagcgcgcgggctcctacttttctcctcggccctcaccgccgctcgccggagctcccgtcgtgtttcccccacctaccctttttcagacatgcagttttacaggctggacgatctgaactacgtggagattcggcaaacctgcccatcaattttgacggggaggtgatgctgccgatctgatcaagcacgcagatcgggctattatctgttcaattctctcttcttcttttttaagggtatcagtacgagattgtgctatttcattaaaaatagagggaacaaagtataactcgtagggataaaaaaaaatgagaaatgtacaaaactgagaaggcctatacacaatttgatataaaatctcgtagcctccttgctcccgccatggtcctagttgttgcctcttcttttatttttttcataaggttaagggtcgcagtctccttgtgtttgaaaacccactgatttctttccttccagatctcctaaactattaaaataattagagtccgaaggcctttcttaagcacatactttatattggctagcatttcttaccaattttggacgctctggcatagagcctagtggcatgggtccagatgctcgtaagccaaacggcttagagcaggtacaattaacatattttaatgagataaacgacgagacagaagagcaacggactacagatctgtagcaagctacagcacggattataagacgtaatgtgtgtatgacatgtgggacaatatattaatagtatagtaagcaactattatatgaatagctattaaattggctgtagatgaattggagctaacagtgggctatactattaaactcttacccaatctcaaaaaacgaaggagaatcgagcagcggaacagtcttcacagagatttttccagagttacatgcgactagttctaaaaaagattaaaaagaatttgaacgcaacggtcggcggcaactacctcctagcaaagatcaaagaagatttcaggcttgcgggagttgcggcatcgtctggttggtgagggcgtgaggccacggcgcgcttttacgagtttcgtcaagcggaggttgttgagctcgatcgatcgctggtcaatctcgaccggcctaaactacttgaccgaggaaattcgccaccacctgctcttcccaagtttctttggagctctcgcgtcgtcctcccctgggggcggcacgggaggcggcgacccggccacccctctccctcccctcctccccctctgcttcgccgccgcccgagcggccgccggcaaagccggccggccgcaaggacggcagcggcggggcctctcgcgtcctctcttccgggcgggcagggggccgtcctaggtggagcggcggtgaccgctagatccggcccgctccggccggatctggcggggcagcgactggcggcggcgagggtggcggcaacggcggcggggagggcgacggcgatgtcaagggcgcatgacgctgggcggcggttgctgaaggcggcggggacggagttggccgatggcacggaggcggcggcctggtgctctcgtggcgacgacggcacgttacctggcggcgacggcggcggtaccccccagatccgggcctttcagctggagctgcagagtggcggcagttggcgacggcggcggcagtttggccggcggcagtttggtcggcggcagttggcgacgacgacgacgacggccggcggcagttggcgacgacgatgacgacggccggcggcagttggcgacgacaaggacgacggccggcggcagttggcgacggtctcggccggatctagataccggcggcagttggtgacgacggcggctgtgtggtgtcggcggcggcggcggcggcagtgggccggcggaaacgtggtggctgccgtgtcaactggcaacggtggtggaagccatggcgttgagatgctagctgctcggtggtggagggcgacggtgcagcaaaggttttgcggaggcggtggtgacgtcggcggcggggaaggagtcgggtgcgaggtggggatgatgacggcgaggtggttgggtgttcggcagcagcggctgtggtggtggtgaccgtgttcgcagtcaccggaggcatggcggcctcggttgactagccgagggcgtgggagacggtcgcatctggtcggcgcggcaccgttcggtggaggggtcggagaccggcttagcacagagaagtgcagccgatggcagcgcaggccagctcggcgcgagaggcacgggcggcggagatggaggccggcttggcgcgggaggcgcagccgatggagggaggccggattggcgcgagaggcgcgtccagtagaggaggccggcttagcgcagagaggcggccggcggtggaggaggcgacctaggtgtgaggaggagctgccggtgggtgtggcgcggtcttcggtgcacgaaggctggccggcgggggacgccggtgcaggggtcccacatgtcggcaaagcttgtgtggtggtagagcatcgtgcatcagtcgtggtttcgcaggggcgatctcgtctgtgccctttgttgatctagtggcggtcggtcacgcttagcggcggccgatccggtgctagccttctcctggtcgtgtgggtagtggtatattttttccttttcctagttacgactctccagggttgtaatcttataattttttcctgctctatcaatagaacttcgcaccgtctcgtgcgagtcgttcaaaaaaaaaaaatctcgaccggccttcacgtacgtatggccgaaagcgataactcgattagacgatagtaaatctcatcgaaatggtgagaataagctggacactaaggccctctttgtttaggcttataagccaacttataagtcgaaaagtttaagccaaaacaaacaagcagctttttcatttggctttttttgaagccataagccactctaacactattaagccaaaagctagattggagaagcttttttggcttatatgagatagatgtatgactccaccactaaacttaggacattaaatccactggcttataaattatataagccaataagttgatttaaaagtctaggccaataagcctaagcctaaacaaagagggcctaaggccttgtttagttattaaatttttttttcaaaaaatattacatcgaatctttggatacatacatatagcattaaatatatataaaaaactaattgcacagtttgcatgaaaatcacgagataaatcttttgagcctaattagtccatgattagccataagtgttacagtaacccgcatatgctaataacggattaattagacttaataaattcgtctcgcggtttccaggcgagttatgaaattagttttttccttcgtgtctaaaaactccttccgacatctggtcaaaacatatacccatttttttcacgaacgaaatacccattatttgcttctccacttctgactcgtccgtttatccacctaccatttcagacatgagatcttgggggtccatgtcatcagcatggcctgactgtttgggtgtagttgaatctgaatgcgtgaggacatttttgggaggacctggattcaggtattggttgatgttttggggccagactgtttggtaaaacaagactgattagtcatcgcattggataaattatatagaagggatgttgatcataagctttatttattttggtagattgattactacttgcgcctcaagcgtgattcaaattaagcagagaacagaagccgcacaataggacttcgccacgggtgataccatcggtgacggttgtgtgagttggcggggagagcagggtgtaggtgatcgtaacatttcttcagtcaaagcatcacgtgttcatgtgatctcactatataagtcttttgtccatcttactgaaagttctctaataacctgtcgattttactgaatctctcaacaaccacataataacggtgtcttgcaccaaacaaactgaaggatctctagcatagttgcatttccctgtgacgtcaatgtgttgggttttttttacagcaattcgagaagcgtgcatataaaaaatgagaaaatagaatatgagtgcttgtacttccaaagacagctttaggctgtgttgaacaggacatgttggtaactaatcttctctacacgtaaaatggaatggcttattagtacatgattaattaagtattagctaaaatgcttgaaaatggattgatataattttgtaatgcaacttttctattttttctataaaatatacactgtttagcagtttaaatatcgtgcacaataaaaatagggggggttagaaattggaaaaaggggagtatatatataccgcagccttagaagaggtagaaacaaatatggataagattcagacagaattaagcattttattcccttctgtgtttttttccatcttagttctacggtgagcagttgcagaccgcaaaagtgcaaaacatgtctagtttgtatgcacgctaaccgctaaggcatgcatgcatatggtcgattgttgaatgttgactgagctaaattctctcttatcactccgctttcattatcagcaataaatctgttaactttgcattgtccacaaacaaaagaacaacggtaacaaagcaatacatgagaaaatcgcgtggatttagaattgcgtgttgtcaagacaaacacttcattatttgcatattggataatcatattagatcaggttagaatggtgtaacaaaattcagaaagaccgcttcacgtttataacgcgtacctgaactatccaaccagacactatattgtttgtttattgtcagaggaaatggaggaatggaacgcgtcagttatgacaaagatgaagcaactgtgtcgaacacctagtaccgtgtccgaagaaccagcagagttacggtgcatgctactatgaaaagagcaaattgaagcagtaaacagtgacagcgacttaggattgctcgtgcagttgcttggtttttccttgctgatagtgaatgtaggtgaagaacaaaaactctttccgaagaggtctcgctgtctcacctgtcttcttgtagtttgactgttattctgagcagctgatgtaatttcaagtagtagtggataagtgccctgcgtgcacattttaatcccgctggaccgttcatgcttgtacagaaattccctctctctttttttaacaaagggagggaattccgaccttgcaggtagccaccttaaagattgagcacatttcctgaccaaattacagtgtttgttctgaactctgaagttcagtggtggtacctaaacgtgatcgcaaagaacaagaaacctgaaacttacaagaaaaatggaaaagtacccaccacatgccgaattatctttgacggatcttccacagataaccttgatacggtttcttcagttttctccagcacgggtcaaagacactgaactgaatcttcttctgacagtgaagcagggaacaccacattaagccgagacgcatctttccgtagatagccgccgaggtaaattcggcacgtttcagaatccagctagaagattgggtgcagcaaattctcgatagatagttgttgccacggcggcacgccgtcctcaaaaaggcgcagatcgcactccggacaaaagtgcagtagtagtctccttcaggagccaagactaatcggagcagctgctagcctgccacagccagccttcgcagcccgcgaccagcacagctcggaaatttcccgcacgtctcgcgaccaaaaaccattacgaccaactgcttgcttctcgatctttaattaattctgcagtggactagtattttacgcatgtgcgcgctaaaatagagcaatgaaaccgtgcaaggaaagcataaatgcgtaatagtagtataatacaatttgcgttcacctaaaaacgcagagatttgaattgatctcgcgctgatattttttatttttctcactggggtgggtagatggtgactgcggccagggcgcttacctgttctctccatctctctcgcgggaagcgtatataagctgccctgcttgccgctcatttccatctctcgtgctcagctcgcagccaaaaaccccaaggcgctctcacgacggcaggagctagcttagctgcagaaaaagcaggtgacgttgaattctgatttctgaacgagttgcagcagcatagcgacaatggacgccggcgacgccatggagagaggccagcagcggctgccagaggtaagcatatgcacaacttcacaactatctcgttctcctcctctcaccggtttcgctcatcatgaattgatctttcttagtactccagtttgcaacttggaaacaagcgatggcagtgagaatgcacgcatatggatcataactatagcatagtaattttcaggcatgctgttattggtttcaccttctttaaattcagagttcagattgaagaatgggttgttatcaggttcaccaaaatgacagaacagaggtgaataggtgaacgaaggaaacagtcatggtctacatctatgtggtgcagttgcaccactatttgacccttttctacgcaagatagagaataatgttacggctaagacgaaccgtatccaaacacactatagtcgtacgacgtattggcacgttgccacgagggtgagttggtggcaacacactcattggtcaggtctccatggttaaaacgagcgtgaaaaattctgaagtcagaaaaaattaatagtgtgtgtttaatactaagaaattttgtcagacttttcacgcataagtttaaaaaaaagttggtcagaaaactaaagcaacagaacacatacacacaagtgcaccacaaccaccgtatacctttcgtattcatctgtacaaagctgcttcctttatccctttacgattttcaagtacaatcgctgacgtctacaacaacgccgcaaaaactttgatggcttgttcagatatacaagaaataaaaaaaaatgtaaactgacatgttctccccaaactttgaacttgatctgcagagctggaacccgaaactccaggacgacgtcagcctgacggtgccactcatccaggacaagaagagcgggagcaaagcgccggcggtggtgctaggattcgagtgcttggagagcacagcgttcaacggcattgccacgaacctggtggtgtacctggagaccgtcctgcacggcagcagcctcgcgagcgcgtccaatgtcacgacgtggttcggcacgagctacctcacgccggtgttcggcgccatcatcgccgacacgttcttcggcaactacaacaccatcctcgtctccctcgtgttctacctcctgggcatggtgctggtcaccttctcggcgttcctgccgaccaccgcgctgtgcgccgtggcgggctcgacgtcgtgccagcagcctgtgtttggcgcgcagaccatcgccttcgtggggctctacctcgtggcgttcggcagcggcggcgtgcgcgcggcgctgctgccgttcggcgcggagcagttcgacgacgacaacgcggtggaccgggagcggaagatgtccttcttcagctggttctacatgtgcgtcgacttcgggatgatcgtgtcgggcctattcatcgtgtggatccagcagaacgtgagctggggactcggcttcggcatcgccacggtttgcgtcgcgatcgcgttcggcggcttcgtgctcgccacgcccatgtacaagcgcagcatgcccaccggcacgccgctcaagagcctcgcccaggtggtggtcgccgcgtgccggaaggtcagcctccgtgtccccgccgacgccgccctcctctacgaggtccatgacaagatcgatcagcccaagatcacgcacaccgacgagttcagctttcttgacaaggcggcggtgatcgtgcagtccgacctggaagaggactcgaacgacgcctcggcggcggccgcgggctcgtggaggctatgcacggtgacgcaggtggaggagctcaagatcctgatgcggctgctgccgatatgggcgacgagcatcgtgctgtcggcggcgtacgcgcagctgaacaccacgttcgtgcagcagggcgccgcgatgaacatgcggatcatgtcgttcaccatccccgccgcgtcgatggtgtccttcgaggtgttctgcgtcctggcatgggtgctcgtctacggctcggtgatcgtgccgctcctcaggagcttctccccggccaacggcgagccgtcgcagctgcggcgcatgggcgccggccgtctgctcatcgcggtcgccatggccatcgccgcgctggtggagatggtgcgcctcgacgcggcggcgcgcggcgagtccctgagcatcgcgtggcagatgccgcagtacttcatgctggccggcggtgaggtgttctgctacatcgcgcagctggagttcttctacagcgaggcgccggagtccatgaagagcatctgcacgtcgctggcgctgctcaccgtggcgctgggaagctacatgagctccttcatctacgccgtcgtgaacgcgttcaccgccgtggacggccggcccgggtggatttcggacaacctcaacgagggacacctggactacttcttctgggtcatgtcggcgctgtgcacgctcaacttcgtcgtgtacagcgcgttcgcgcggaactacaaggtgaagacggtcgtgtcatgatcgctcgcccacacgtccgcgcgtacataggcaaaacaaggtagcgttaggaacggggtgcgtccaggaaatacacgggacacgtccggtgcacctgcgaaacggtttttgtatcgcagcgaccaatatcttctggctgctgctgatcgacgccatcgtgttccttgttgtttattgtttctttctttttgtcggttttactggaaaggaaatacggatgggcaacaggacatccatgaactttatttatgctgtggtcctgaaagaaaaaacagaaggaaatgcaatgtggaaacatggtgtgaccgtgtgagtgataccgcacatttcatggtagtactctgcaacagttatggccgttggtgatcaaatctctatgggccgtttgtaaatctcgaccataaatcaaaactcttaaatttatgggccatttgtaaacttgccaacgctaggacccagaatgcgctgtcgagagtccagagcccagccttggccgcagtgatgaataaatgggccatatctggaccggcatcatcgaagtgtatctacagccaggaaaaggcccatttggctccctcaaatatatgagtcatatacacggtaaaatttacaacaaaatagtcaaagttcacattatttgctataggacaccgtaaaaacatgataattagttactagacacgaacagattattttattatatccgttgcaagtacagatagagaaactttttaaaatgataagtttgtccatagggcttatttatttttaacccgagcagatctagttcaaaccggacccatactaagagagtgagaatggactggattgggagagtcagaatggtctggtctgatttgaatcagacccaatcaccttacaaacagatcaacacatgagtaatttactactttccacgctgttactctccgcgtttgtaccggatgtaatgaaatccgtgttttcattgtgtcctttaacaaatactccctccgtcccataatataagtgattttgagtttttgtttgcattatttgaccact

SEQ ID NO: 6239 - DNA, 24799 bp, Oryza sativa
agggggttcggtccccgctccaacacgcttcgtcgcggcgcgcgccccgtgaaggaaagcccacggcccatcatccagccagcccaatatgccaaagccgaaacggcccactttacttggaattaggccgaatttaggcctaatactagtacatttgtttttgcttgtaatttgggccttctacctggactcagtttgacttcttcaccgagagtcaaagttttttccgcgtgagaggagtcatcggagctcacttcgagaagatgacatgagatttggggagttatttaaaaaaggacctgaaattagggggagatggatctatccgtccatgaaatcaaacaaacccaaatgcctctcaatgcaagcaaaggcccccttctactatcttgttttctaacccagtcacatttaatttagcccatgtgcgagcttccatcacatgccccccgcacgtctccccaagcttatcacaaggcgcccggacttgaaactcttcactaggagctgtgtgttttgtgttgcttacgttaatcacgtacacgtaaacacgctagctaagatggacaggaaaaggttggagctgagctaatggctactcggctagtacacccattccctctatctccgtagttttacgcaaaatatttgttcctaaataagtgtagttttaggctgaatttaaatcagatgtaagaccgcagttgttggcggctcgaaaaatggggtgaatcgttagttaagtgtagttttaggctgaatttaaatcaaatgtaagaccgcagttgttggcagctcgaaaaatggagtgaatcgttagtaaatgatggatcgaatatcaattactataaaactgaaatattgatttatttgatttttttttcaaagaaatagaaatttttacacaaagcgcaccgtttattaggttccagaattgtgctaacatataacaaccgagttgcccaaacgaacggcgaacgggtccttagattggtccattagatctctttaatacgacttcattgttttctttttgtttttaaccatcaaacaagtagtactctgatctcctcctcctccaatccttgttttctctcggcattaataaaaggcaaagtaatattttaacattctgattaatttgtgtttgattagttaaattttatgaatagagggagtatatgttccatgagtatgctgatcaagtggtgatctttgtttagcttgtgccattaattagattaattaatagttatccatccatcatccatgtgcatgatacttcctcaatccataataactgtatttataggattcaaatttatcttaaaatatatagttattataataaaatactaattatcccatcaatcacttctcaattaaatttctatctttttttcgcggggaaaaacaggaactttattacttagccatagctgtccgcagacataagttcggaaataaagttacaacttccgtccggccaaaagtccgtaagggactcacaccgaccttttattagctaaaacatggctgatgcgattgcagttcctgttcaccttcttcagcttcatctccctggcccccttcaccatgccttggatctccctgactaaaaacgtatgtgccgatcgcagcttcccttcagaaagaatcatctgtatcgcctccgcacagtcagattcaatgataatcggtagaagggtccattggagagccagtctgataccttccttgcaagccaaaatttctgcttccagcgcactctggctctgctcaacaaagccatagactgcaaatattacatctccagtgctgttccgcaagatagcaccgatgccccctgtgttattctcctgataggagccatcaacattcagcttcatccatccactcggaggtttctctcattttgccaagacagattgcttcttgcacttgggcctgtcttctccaattacatgcatcccagatcccaagtttgcattagggatgtcatctctcgggttttctggcctttggatggtgaaataatcaaatcaataaggctctccagtcggcaggatgaggattttatcgcttggcatcctgataaaatgggccagttttcggttagaagtgcttatatgttagcggttcagctcgcaaatgctggggagagctctagctcctcaggaaatgatactaagaaagcgtggaaccatgtttggaagtgtaatatcccccaaaaggtcaaagtgttctcatggagagctatctcaaactgtcttcccactatggtgaataaaaagaaacgaaacctggaattgtcggacatctgcagtatctgcggcctagagcctgaagatgtggcccatgctttgtggcgttgcccgcatgccaggcgataccgggacctaatgagctccgagatgcaagtacagcgtatcctgcacgggtctggggaggggtctggttggatccttgatcttttggaatcaatttcagaggatgatcgccctgtctttcttatgtcattgtggcgaatctggtatacacgcaatgagattactcacgataaagcggcgccatatgtggaagtttctaaacgcttcgttctgagttatgtaaactctctgatggaaataaaaatttctatctattttaatcttagccactctcccactcttacatgtacaccattaatgaggagcaacatattttttttcttctcaaatcttaatatatgctaaacaatttagagttataattattacgagacggaggtagtggctgatattgaggtgtgtgtggggtgggggggattatatataattcttgttaatttcagtagggggtatggtttatgcatggtcaatttggagacacatgctttcctgcctcttagcggggagccctagctagcaaaggtaggtgctaatcgagatccaaagttacttctagaacagtatagcaactggctatggtactatgcttctataggacgcctttgggcatggatcaagtattcaaattagaggtgcctagcttgactgtaaccatccacacatgacacacagttacatgcatatggtggcagcacaaatatgggatccaatgtactttgaaattactggatcaaattcaactatcatgcaaatatatatttttgtaggagtgtagatgatggctggcctatagtagcatttgcatcaagctatagtcatacatgtagagggtgtttagatatagggtataaagttttagcgtatcacatcggatattatataaggtgtcacatagagtgctcgggcacaaataaaaaaactaattacagaatccgtcaataaaccacgagacaaatttattaagcctaattaatccgtcattagcaaatgcttactgtagcaccacattattaaatcatggagcaattagacttaaaagtttcgtttcacaaaatactcataatctgtgcaattagttattttttagcccatatataatactacatgcaggtgtacaaacattcgatatgacagggtaaaaaattttatggtgtgatctaaacaagaccgtagatgtgtcactaattaagtttaatacacctagctataggccatagcagagtactagctagctagctcaacttaatttgaaacattttgaccacaaagttgcgagctaggttgatgatcaattatttcaatagtagacttccatacaaagatgacgtaacaagagtattccactatatattctgatctgatacctcgagtttaactattcccatttgcgtggagtggcaaaatatgcaacttactactccctccttccgtaaatgtttaatgccgttgacttttttaaacatgtttgaccgttcgtcttatttaaaaacttttgtgaaatgtgtaaaactatatatatacataaaagtatatttaacaataaatcaaatgataggaaaagaattaataattacttaaattttttgaataagacgaacggtcaaacatttttaaaaaaatcaacggcgtcaaacattttggatggagggagtcctttttaccatccgatcattctaccctaaaccaaatatttgcgaatacgcaaaaagattacacatcaatatattaaaagaaataagagtttttattacataatgcaactggtcagacggccattgcctggggacaggggggcaaaaagaaagaaacaaaaagattgctaaagtaaagaaaaatactacagaaaaaacgatacttctagggagggtggtggcagaaccccactacactactaacaagcccacaaaagcaacggctccagcagatgaccacagacggccttactgtaggatagacttcagaatcactgagactaacgagagagagtaatcgaaaatcctagagtttcactcctttcacaatgtaacgctccacctttcacgagacgttaaaaactaattcggcaaaatcctaattgcgaaaattttcgtcatttgtgtgcgagtctaagttgtgccaagtatctcaattcaattctgtccttgtctccctctcatcaacataaattgccaccccgaaatttccaattccaattcaagctcccaaaatcaaatttcgacattcaatctattcccttgaatccctccctatctatcaaccgatctatctacctacctaccaatcaatccatctatcgatctaatcacctatctaccatcgaactccttcccaaacaattgtcccaactccgaaaatatgtggtttccttcgaatccctctcaaataatcccttgaatcgccaaatacaaatctatcccgaaaatatcaatttctcaccttgatctcccttccttgctccttcatatttagctgagttcaaacatgcaatttgaattcgaatttcaattcaaatccaagccccaaacctctccaactcaaattctctgtataagtctatttcgcctccccatgttttggatgggccggatttcctcccctcggcccaccttccttgccgctcctcccctcgcgtgctcgcgcgtgcgccatggccgagagagagagagagagagagagagctctctctgttccttctattctctctctctttgttatctctgtttctctctctctcgtcgagctcccccaccggcgccgatttcccgccgacgccgttcgaaatttggccgtgccagctgctccacgcgcgcgcgccgtggtggccgaccgcctggtcgccgctgccgtcagcgcctgcaccacccatgccctgtcgccgcccgaccccgctgctctgtgcgctcgcgtccaaagacgcggaggcagcgcctttttttcccacgcgctccatcctccctctcctcgtccaaaatcgacaaggagctgagctcctttcccctccccctttttttgcttttccccctctcagctggcgtcacatcctctgcctcccgtgaccgtctgtcgccacttgaccgcgaggccgccagccgagctccccttgactgccctcgttggttccttcccctcgaagccccatctccacctataaaacccgcactcccctccctcgttcggctcctagcctctccaccatcgcaccgtttctcaggccaagaacgctcgcccaacgccgcggcctcctccgtcgctggtgttcccttcctcgccgccttgcgtcgccgctcggccaacgcggtgctacccgccgcgaacaccatcctccagacccggcgccgccctccccgaagcccggccgttttccttcgctggcttcccgtttgcttgtcaccgacgccgttcatcgccatcggtgagctcttcacctaatcctcctcgttgtcaccctcctggatcactgtagaacactcccgaaccgtcgctttgatcgccggacccctctccctccccggcggcgttccgcccttccccgcaccgcgcctcgccgtcgccggcctctctcagagtctctccgccccatccgaccctgggaacaagttcccagagtcctagagatgctcccgccaccacgaattgaccccattctctcccggcgtgttttcccccttttgctcaccgccggtggccgccgtcgaaatccgccgcctccgtccagtcccggccacatccgagtcgaggaatggagtctacgtctcctttttcctccctccggtggtctcccttcctcccgcctcgcctcgcggccgctccgccgacgcgcgccgccgcccgccatccatctcccggtcggtctcgtcttcctcctctcgccggcccgcgtggctgccacgtaggcgccacgtcggtgccaactcggctagaccgagtcaaaccggccagcctggctagcccctccgtgcgcacggaccacggtgcgccatgcggctgcacgtgggcccgtcgcgcctcggtccacccggcgcaccaatcgtgagccgcatccacccgaaaccctaaacggcgcccgcgtgctcccatccctccgtgaaccgtgtcgccgacatgtgggccccacccgggacctcgcatggtgggttcggtccacccggaccgccccctctcccttccgcgcgcccctaatgggccgcctccttgcgcccgcgccggcccaatggctcggccgagcctccttcaacccattgggccgcgcctcacgctcggcctaaaagtccatatttcctccctcagtccaagtcagtgtccatctctcatgagctaaaagtccatatctgctccctcccaatttactcctctctcaccttttgtaggccccacatgtcaatgagtaattaaagaatattcttgggaatattcttttccacgaattcaataaaccatctctcatattcccgaaaaattcgatgaatcatttccttgtccagaaaattcagataaacttccaatattcatatctctcgatccgtagctccgatcgactccgttccacttccagtatttctataaaattgagatctatttaatggcactattaattagtctaaataggatccttcttttggtcttttgtttaggttttcgattgtttgcgtatagttgcggttgcggattttcgtcgatcgtggttatctcgaagattcgtgaagctccgtgaaggccttgagcaaggcaagtcaccctttgaccaattgctcctataattggaaaatcattattaatttgtttgcaaatcgcattattagcaacacacatttataacatgcttggcctcagtttgcgtgccaaactgacggacctacccaatagtcgcactaattcctgtaggctgtactaccctgattccttgtcgctccacctttgtggtacttcggtatctatgctctctgagcgcgtataagaactattccacatacaccgttgtttgtcgaaattttgggaaatgggtttgagaagccttgaaaacccaacatgtggtgtcggtgtgtttgaaaataaaatgaattgtgaaaactcgcgatgcgggtgttgtgcctgggtggcgccgtcccgtattcgcatataaggaccgattcctgtgggaaattcatcaagcataacaagtgcaaccacatggtggtatgggacaccctggctaagtaattagctgattttgggaaatcttgtataccaatagaggtggaaagccgggatgtgggggtagaggcatcctgggagctcgaaacagaggaagacacccgagagtcctaaaaggaaagttggggttggcccgatgttggtcagggagaccctctatgtggcatgaggtaacccagagttagatttggaaatgccttgtcgtgaatctcccttttccagcggtgcgtcatgaacacgggttaggtgatgagagcaagttcgcgttgtgtgggtaaagtgtacccctctgcagaggttaacaaattgttcgaacagccgtgcccacggtcatgggcggatgtgaggtgtttcccgttgcgtagatttgtttgcctgtgctttgtgaaaagttgttgtggaatgggaatcgtcaccagaattagcctatgtggtagatggatgacctgagtggtcagaaacgaatctgtgtgattcgggatgtctgcgggcatcatagactaggcttcccgagtggaagcagattgttgtgctgctgggcagctggactctaggagtccgagaaaatgaaaaaggctctgggagccgattaatcaagtgaaagggctctgggagccgagaagtaatgatctgacccgggtggtcagtacattaccatttgagttgttgaaaagcatctcttaaagttgaatcgagacgcaagtctcatttcgacccaaaacctgaaaagaaataatcacttagtgattccaaaatgatttcaaacaaaatatttgcaaaacaacctcgcctctcttccaagcttgcattaaacacctaaattcccgtgacttgctgagtacgaaagtactcacccttgctctatataaatatatatagtttctctgccttgaagtgaagatgaagtgaagtgaagattagggtttcgtcctggttcccagccatcgcctgtggtgttgtgtgttagaccgttggttccgctgctgctgctgttgttggtgttttctcgtccgcgtcgtcggttgcattctcaggctgttctgagttgcaacctaagttaaggtaaataagtcctttatttattttaaggattgcaatgactcatatttgtctccgtgggtaccagcgctatgtcctaggactggtactgagatcgcggtttcgtaggaagcggtttgcgccgttctccctacgacacgctcctgtcaggtgccgttgtacggcggtaccagattggggtgtgacacacagttgcaaataaaccagtagaactagggagtcgaaacccataaaaagtgcttaggcaggcatgccttataagtcggccactagataaacttgaagcgagcacgccatcagatctgaagcgagcagccaccggaagaaccgaggtcagacaacaaatggtgctagacctgatgagcgaatgcacaataaagaatgatgtggatcgtcgtttcaaattctcgagtgtaaaaggacaggccgagtggttatcaataattaattagtgtaaccctaaaccaaatgaaatgatcgaaattgtttcaggccattttaattaattagtgtaaccctttggacaccatttgaattcgtgtgcagaaaacgccaccaactttctcaaactcagcgataaaaaaaattaacaaatcgctcgtaaattctcgatcgatgcgtgcgtacgtgcatctattctgcacagctagctagctgcagggcaggctgcaagccggcacataaggcgctgcaacgcaaatcaaatcgatagacacgatgctctcactacccctacaaacatagcacgactccccatatgtgtgtaagtaagtgtagatgcatactacgtactgtgtagatccatactgtatatgtataagctaccacatcggtcttaaaatgtatatgcagctatttctagcatcttgatcttaaaataaagctatttcttcacttacaatttactcttaaccaatcaacattattctccatttaatttatttatctaatttctcttctcaaataatttttttttctccaatcatatataatatactttttaatatccgtgcttaccgataaaatacctatattttagaatggaggcagtagcacatgcagttaaaccacacttttcagcatcagccacacgtacgatcgatcaagcttatacatggcgccgaagatcgtgtacgtacacacgtacgaaaattaatgccagttgagtagtatatggttgtgaacaattttgattaccaccacttgcttaggtttgaattccccctaatagcctagcaagctagtgtggggaagaaccccttgtgttagagtaaacaagctagctgagagctattcttgttcatttttccaactaggattttggtctaaataacctctgcttggacaagctagcaatagtatcaccaaaagggatcaagatatattattttgctctccaacagtttgtaattcaagatttaccgcataattacacacgtgtcaactacgacatgtggggttgatctatgacatgaagtggcaaatcctttatgccaccttgaggacgggcgcaacaattaattctattttttccttaattatattctagaatgatatacaaagcttggcttgtcatatatttcctacatgcatgcatatggtggatccgaattgaaaatgacgagatgtgccaccgcatattcgagagaatatattggagcactcgatattaggttgaggggtgctggcaattgcaaaggacgcatctcatctcttttctacaatgaaataagataaatggcactgatatatatgccagtgtctcttataaaagacaagaatccgtaattttcttgacggtcaaaaactatcaagtagcatcaaaaccgtcaaggttcattattctgttggctgaccgtcaagtctataaagccaaggatattcaggtttcttggctgctaaccgtaagggaatgttttcttagcggtcggacagccaccgccaagaaaattaagaagattgcgaactttcgaaagcaccaagaaatgtaaccttgtcggtctgaaccgacaagaatatatctttccttagctgccaagaaaccgctaaggaaactacttattcttgacagttagaatcgccaaggaaatcagttggctgccaaaaaattacggattcttgttgtgtatgtaattgatgctgctgatcgatccatcacttatcccacaaaaatagtggaggtaataagaaatggttcctcgacacacagtatatattaattaacatatattgatgaaaagcacaaattaaataattccttgcaggtgaaatgacaacaataactaacacgtctttaagaaaaggaagaggcgataaagtctaaattcagtattacaagaaacctaggggtgagtgagcacatatataggttcgacattagtggtttctagatgaacaaggctacaattttcacgccgtacaccatgcatgaaatatttgcatcctggtgctggtggtccatgtgatgccttgcgaattaataacctctataattctaattctcatagtacaatctctccccctctaaatttttttctttataaataaaacaatgccatttgcagaattgtacatgcatatttctgtacgaactaatcatctacgagtgccaaagagtagctagtgatagagatgagatgcccttctctctgctgtgacatggttgcactagaatatatggctggttgtcacatggcaggatgcttctcattccctctttggcccatctcctcctatacatgcgcaggcatgatgcatgcatacggttgcaagcacaaccaagatcagagaatcccagcagtagtacatgcatgcatacttgcgacgtcatatgataatgtgatatatattatactccacttggtgctagctaggttgaattgagatcgatcgatcgatcagagatggggacgataaaaactgatagagctaagctagggcctggatgcagagagagatgcagccatggccttctgttttgttttgttctcaagtgagatactactgctactactacgacgatatattgatcagatcgatgtgatggcgctggaatttttttaaggtgatcggcacaggcgtgaacgtgggagttgggcatggaattaatggcgccggccgtgcgtgagctggacaaaatccaaaatcatatgatccatgatgtgaaggttggtggcctggctatagctctccctcccttttgtaacgaactttgaaagaggcatcggttactgggaatactagaatatgggattggggatcgatcgagtgatgaatgctgcttgcattaattaattaattaattggcacccggcagacaggatgctttgctaattttcctttttaagttattactccattcattttcaaacaagtttgtttttagcttcaaccatttgtaaaaaaaaacatttctatctcctgcataccctcaatctgtaaattgataagctttatttctctaatacccttaccaagtctcacctaccgacctaattaacaatactatatattttcatattgatatgatcgatttagtctcttccgcttcatcttattttgagcatcccagggaaaagatgaagttattttgaaccaggaaagtataattatttggcgtcataatttagtatggtggagatatgtaaacttctaaagagcttttacgctcctgctggagatatacgatgtttcaacgctgaaaaatgcggtgactcctatcaagtatcataaaattgctcaaactaataagagagaatccattatatgccactgactttgtcacacctctacgatttaccactggctttgtcatgttctataatatgctatcaacttttgcttaacttctacgatttaccatcaccgtccgattagcctctgttagcactgtacaattttgtccaaatgaccaaaatactcctaggacaaaaacttgaaaaaattggataaaattaacaaaatatcatattataaatataagattgtaaacatccaaaatttggccaaaaatttaaaatctgatattttagaatttgtatccgaattttgaaagtttttgtctcaggggtattttggtcatttcgacaaatttgtatagtactaacggagactaaccggacagcgatggtaaatcgtaaaagttaaacaaaagtcgatgcatattgtagaacgtgacaaagtcagtggcaaatcgtggacgtgtgacaaagtcagtggcatataatggattctctcaactaataactctaagaaagtatagctaatcaaaaagaaagatgagagcaatgaaaatacaattacctaatgggctaatcatttgagtaaccatgaatcatgcatcatgcatttttcctccccccccccccccaaaaaaaaggcgaaccacccgttgtttttccactgttactctcatattttgttattgcaaatgcacaattgttggttcgccttctaaagaaaaaaacttctagagataaacttgacaaatactttttcaaaatcatctctacattattttttttacggagggtgtagtttcatacggaaaaagaaatcttatcaatattggaaaaaaaaaggtgaaccaacaattgtcatttgcaataacgtatggaaaaattgataaatatagtatgacaaatgttttttcttggcaaaaccctgataattcacagcacaattatactcctgcgaaaacaaattaaagggcgtgaatagaaaattggtatatacggaaaaattggtgtaaggtgtgtgatcaacaattagtaaggccaaaaacaagtattttggaatctcatcaacaaaaacaatgaatctccatatcaggacaagccatacctttgccatagtctgaagggaccaagaccgattactttatcccaacgtcacgaagatcgatctaaagtattactaaagcttgttaataaagttatatgactatgcttaatttcaggaacctctaaacaaagacaacggcatgcatgagcttgcagctagctagcattctgtcaggctggaacaagtgaaaggtaggtgttatcttgtctttattttaagtacaaactaaactctgtgtttatcatgtatgtgtatatatgtctttcaactcccagctcccttgtatgttagtagtagctagtccagaacaggaggaatataattaataggaagtaattctatatatcttaggagtactatagagtgaaaactcactaaattctaaaactcaacatgcaaagatgctacattatcatccactaacaattaatacatcttaaatataacgtaagcatgctatattatctataattctaaaatgtattaaattctgtagttttaaaatgcaagcatattaaatcatcatcccacataattcacataatattttaatatatatctccagcatttttgtatgatatccttatatagttcatcttcacttagttaatgctattcctctcttctctcattaagtatatcacatcacatcacatctatggtcaaaattattttcctcattttattctctcagtaagacatatcaattgtttttaggtccttagattactaatctatgattcaaattatctccctcctttttctctctcataagccgcatcaccttacttttatatttggatcatcattctatatactatttaaattatcataaaaaatatcaacttacgtaagcttatgccatgtagctatctattatatactccctcgtccctaaatatttgatgctgttgatttttttaaaacatatttgaccgttcgtcttattcaaaaactttttgtgaatattattaaaaaaaacttgagtagtagtagtagtatatttaataatgaatcaaatgataaaaaaagaattaataattacttactttttttaataagacaaacggtcaaacatgttttaaaaaatcaacggagtcaaatattttgggacggagggagtattatttatacttattatcactatatattatactaaactctcacatcaacgcgcgaggtttcacctagttaagtagacaaagcttacaaacttgcattttgttgagcgtaggaccacactaattaacatttcagtaaaaataaagccaaaattaattaaccaggagaagtgaaattagaaagaaaaaacagcatatgaacctttaaaaagagcagatgagtatcacatatttgaccgcgcttaaactagctagctccacaaaaaagtggagagatattcaacgatcgagatgcatgcataaatgcttgttttgtgtggaatgttgtcaccatgtgtgtgtttgcgagttacccaaaatagtactagcaaatgcacgattgcaaagcgccatatatatacctttttttttaaaaaaaaagtggcatttattcatatcaaatattttagccactgatcttaagattagtgtgattattaatccaacaccaagtgcgcttactcataaatgggttgtcgttcatatcttcaattgatcatgatcctgactaaaatatatgcccaccctttgatgcggattctccaccatttaattaaacagatcacattaatcgcagcatgacacacaatgagcaaatgtattacatctagactaccctatccccatttgtttaagttacccatttaaaaactgtgaagtgatcagtatatagtactactgtatatctaatgtgccatatggcctgacacaggctgcctctgatcaattccaaaattcagagacagttctccgtgactaactccaaaacaattctttctggtgctttgtgaaaacaaattaaggagagacaagtgattagcgtttgctttaatttggacagtactactctacagcaagtcaagaagtcaatccaagttgatcagtgtaggagtactaaaagtatatacgtagtatactactagtgattaattagtgaggccattggcagtttggcacatggcacaatttggaatctttggggcagctactagagagagatagagatgggaaaagaaaccctaaactgacacaatgtgtagttgtcaggaaaagaaacattagtgcacatacctcaaaaaatactctgtgcttgtatttgtgtgtggttaagtgacaagactctttagccttgactcaactccagtaatgcacgaagtcaaactgatcaaatcataagctcatggtttcttaattattttaccaagatatgcctagataacaaatggcacattgtgcaggccaaggtaaaaaggagaacgacgtgggttgaatatggtttgactatcacgctatatatggatggatcggacatgcatgcgtgaaaacttttctcagttaattatttctttacaactgttgtctattcatgcacacgttagttattaatcaatttgttatactgatctactactatactctgttctttcttccctacgtcaagttctcactattccatggattaataaggatctatggacactataacactttggtttagttgggattagatcactaatcaatgctactggtgtactagtagagagagaacaaaacaaaaaagtctgaattaatatgtttctatcatgagtcatcagatatatattttatcctgtcgcctgttcagaggtacaggactggtctgacgaacgaattaagctcataacatataattagagcagagtcgatcgataagcttgagcaaaatttaatcaatatccatctcagtgaagagataatatcgaactctaataccgtatcatctccacatcaatcaagcatgtcctttaatttgcgccaaaaaatttccttcaaatatatggacaccgtatcttctgtgcgtccaaatagcgctgtatatatatatacctgtctgaactgaagaaagtatttatccaactggtcataatatgtgcaatatttcgtctacatcattctagtttgattaaaaataaaggtacggatattatgtccggccgcatgcgatcccatatccaggatgtcattagattcaaagaaacttcctacagaaagcaactctcctttgtttaattctgctgcagcatcaccttcaagaacccacttgcaattgattcttaaacaatacataatcatcacattagttaagtaccaagagctagctaagtgaattgatagattccaaatgagcataatctatgtgcttaattgattgcagtgggatgatatgtctgaatggttgcttagcaaaaggaattcacatatatgcgtgcatcattggttttgcattcgcagtttgtgctatcgacataattgaataatgagaataatccaagtgcaatataattaattaatttatgtctgtaggccgggtatgtgcatctctcttatcgttctgtttattaattattagctactcctatatatttacagttactaatttatttacaactatatagttaattattagttaactattgctctgctaaaatatgtaatcttacatgaagtggatagttggacgagaacaatataaaactatgctagcatagcaatatatactactcctgtgcctgcaggccggccggatcgattataaataattttctccagcaagcaacacacatatcgctagctgtgtgtgtgatactgagatgtgcttcatttcaataccacgggcacgttcattcagaaggaaatatatcaaaacaaatcgataaggaaacaactgaaagatattataaaatagaatataaaaagatggcaatgtagtatgtgttcccaagaaaattatgatcatgtcactttcgaatcagctaagatccaattaagaattcaaacaccttactatatgctacgattacataggtgctgaaagtagtatgctttggtacagaaagaggtcaagtgaaatacatggtgaggctgtatatatgtatgtctgtctgtcgttgttggtgtaatggtgttgctagctagtcagctgggtcaatggctgtggtacaaccaacctacctattcatcacttgcaccggttaataaagtttcatgagtacgtaggataaaggcgaacaatattgcacgcccattttcagagatcaaagtacacacacatccacgatgcatgcatgtttgccacagtgccctgcggtaacatgaccaaaagtaaacaggactatgagtcactgtgtacaaagtgtacaacgccgcatgcatgtacatggtgtcatcgatcgagcacggctcagtcagtatattaactgtgaagcccggggcaactattatatcacttgttaattcctatacaaaattgaaatggtggttatcacattatccagatttattaaaccatgggctaattaactatagggttaattccttctctctcttttcttttgcaaaacacagcacacactcatccctaatgaatgtacacacgcacgtacactatatctagaaacactttcatgaaactggatcaatatattttgagattgataaaatcaacacagatatcatatggcagacgtgaacctaaactgtcaagctatgctcggtttgcattataggtatcaattacatgtcttttttgctatagtactcgtactataccgatacttctcgatagagagtgtcggccgggggcaagaaatcagcacgtactggtgccgttcatcagggaagagtgtcacggagcacgccagctcgctcgtccggccggtggccgcccgtcgccggtcaagacgacaagggtacgacgcgccgcgcgtccgctttccgattcagttttttttgttcttaccttgcacgcgatgcgccgcgcgcgagacagagagatctcatgagcgagccgtggtggtacgcgcgcgctgcgtacgtttttttttcttctttggttttaccgcgcgcgcgcgcgacaagcgcccgccgcggccatgccgccttgcgtgtggggatcgcacacacctctctctcttctctcccccccggccgcttgggcgggcgaggtcagcgtccgtccgtccggccccgcgcgcgcccgtgtatgtatgcgtttgcatttgcatatacatgcatacacatccacagccacaaaaaatattactaaaaccacgtctccctctctctcatctctgctgctacatacttctttattgtcatcttggaagccaactcaagttacccatctctctctctctctctctcttctcttctctttgttttcttgtttgcttgcttggtgtaaagaaaagatagctccctttccactgcccatctctcacatccctgcttcccttccaccctacctccttttctgccccctctccacaacaccccaacaagtttgtttgcttgctcgcacgcttgctgctgactagtagctcgctagaacaagcagatcagctcaattacctagtgtcaagaacggagaagaagctttcagcttaggtagctttggtgcggaattgtgtgcagaagcgggaggagaattattgagcggttggaagtggatgcttgcgtcgagctaagcaaatagcatccactatagagagatcggtggagagaaagccctagctgagaggaagctctagctagctaagctagccatgtgcgactacttcctgcagaggatggagggcgaccaggccggcggcgacctcaccgacatcgtccgcgccgggggaggggccatgccggggagcgtcgtcgtcgacctcccgtcgacggccgccgagtggcagctcccggctgagccgatgctcttcccgccgccgccgtcgttgtcgtcgacgacggacggctgtggcgccgggggagcggcaggcgccgacatcttcggcggtggcggcggcgaccttttctccggcctcgtggacccgttcagcagcgactactcgtccggcgcggacttcttggacgccatgccggacgcgatggcgaaggtcggcttcgacacagctgtcggcggcggctgcggcggcggcggcggaggtggtggtgggagcggtggacacctgttagacatgagcaggaagcctctcttgcccagagggatgccgatggcggccgtcggtgggctggcggcgccgagggtgatgccatcgccgctgtcgccgcgagccatacggccgtacccgccgatctccgcaggcgacatgatgaagctcggcatcacggcagggcaggcggccgggtgcgccatcgacgccgccgtcgccggcatgcagatgtcgtcgccgcgctccggcgggatcaagcgcaggttgggccggcaaccaccatcctatagctagatctaattagatcgatccaaaaagaattcttcgtttggttgcatgcacaatatcttgggttaatttcgtaattcgtgaccggattttgattaattaggggggaagtgattgtacaacttctccttgtttttttttctctctttcgctatccaatttgctgttcttttttcgaaacaagcaaatttgctgttctttttttccgtgttctgcactgcaccgccgaagaaagtaagaagagagatcgaggaggaattccgaggattcttcgggctgtggcaaggtcacagatgttacctacagctcaaaattttaggcacaagagttatcatgaacacatggtgaacggtgggaatatttctggattggcaaaaacgcattgcatatcgggtgatgtgcatatctgcatctagacctaaccggccacagctttttttccggccggcaaggtcggcttttgaaaccctaagctagcacatacgcatcgcctcgatttgatcgatgcaaaatttgcaaacgagttaattaacttggctgcgacattgcgtgtgtacacatatggatatgtaaaacaaaaaaagaaaaaactgtgagatatataagtgatacttatccaagtgctaattaaattgcaggaagaaccaggcgaggaaggtggtgtgcatcccggcgccgacggcggcgggaggaagacccagtggtgaggtggtgccttctgatctctgggcttggaggaagtacggccagaagcctatcaagggctcaccctacccaaggtacatgcatgtttatcattctagcaaatgcattttctgttttaacataagctaattgatttgatgaggtaataaattggattgaattgagtgtgtatgcattaaaatgtttgaacaaactctttttaatcatctggcattcatgtatatatatagtccatcatcattatataattttatccagtactccacattgcgtctgcacgatccatgcatggaagtcaagagattaattggaagatactaaacaaatggttagctaggtatagggtagcatgaaagatgcatgcatgcttctagctaattctcatatccaactagttctactagcttctgtaatttttgtggtatttttggggttgcacacctcatcacatacagatagtactccataaatgtgtgacgaattaattagctagataaaatgtactgaaataatatctgctgagattagtttatccttattccaagggtgtagtacttagtttatccatgtattaatttgtacaagttttaaatcagcaagtctcaactctcggtgcacactgcaggtaactagctagctcacacgattagatggagtatactcctatatctttctggcaagctagatgcagttaagtccaggatttttttttttgtacacacatcagatatgatgtttctctttctcttaaaataaaaatggaagtgtaatgaagtgagtaaaattaaatcaagtactgtaaccagtttgagaccactgtgatttcagtatgaaagtcaaaacatttttttattggaaacggccggatatatcttccataacttagaggatcgaagcacataggagtactactactagtacttattaatttacctacagcattggtttaatatcagaacaagtgatgaagtgcatgcaagcttaattagtcgatctaaacaaatatatcttgttgaaatgaacaatttgcagaggctattatagatgcagcagttcaaaaggttgctctgcaaggaagcaagtagagcgcagccgtactgacccaaacatgctcgtcatcacctacacctcggagcacaaccacccatggccgacccagcgcaacgccctcgccggctcaacccggtctcaccacagcaagaacagcggcggcggcggcggctcgggttccaagggctctcagaacgacaagtcacagcagcagccaagcgttaaagaagagcagaaggatcaggcgacgacggcgacgacgacgaccaccagcacaatcactaccacgaatagtgcttctcctgtggttgtgaaggaggaagaggcggcactggcaggatcgtcggaagcattggagttggagagagtcatggacactactgcagctggagtagtagaccacagtgagctcatggatcatgttttcagtgagagctacaagccgatgataccggagactggccagccggatgatttcttcgcagacctcgccgagttggagtcagatcccatgagcttaatcttctcgaaggagtacatggaagccaagccaagtggtggcgatcatgcccaggagaaggcaatggccaaggaattggatccattcgacatgctagactggtctactactactaactcttcggcagggagctcatttgagcaagggaagagaggctaaacccatgggcataaagccatgcatgagggtttatgcatgcatacggttacataaacttgatcccagctaataaccataaagattgtgacaatgtcagcaaaggaaagatgagattttttttttttacttttcttttcttcatttggtctctctgcttcttcatattattgtgtgtgagaattaaattttgtttcaaggtctaggtatatggacctcattttttaggctgtgtcaacttgttgtacttatgcatgagatgatgaccactctatctctctctctgtcgctcgatgtgtgcactgtgtttatggttatctaacagatataagaagattatattctatgtggatgtactgctggggtatagggatagcagctgaacaagtaaaattaaaatggggtttttgaagttgatagatggaagaagaagaacaacaagagtgtgtgagatcgacctgcattcctgaaggggatagatatgatgtgacagagatcgggacatgcatgcattgctagcttgcaacggaagtgatatgcccttggatgtgacctcaagtgaaacacggtgcgtgaaatagctagagtatgaatcacaaacacgcacacactactcctctcaaagttggcagaatagtgcatgcgtgtctgccagtgagaatctgaaacaatataggggatgccaaggaacactagctggcctcctcttcctctttgcttgcataaggagggcatatgttggattcgctggagatggtacatatttttgtctctgcgccaaggaaatgcatttacttctcctgttcatctaatggccaaacatttttgagatatacattactcatcaatcccctcacgggctcaccccatgaatacgcatatgtacatcagtagttcagtactacacacatgtgataatattgtactggtatatacatgtatatctgtgcagtactatttgtatatggaactagatagctgcatcctctagctacctgcagtatcatgcaggaagtaaatacatgcactgctaaaaaaatgtatatacgtggcatctggcctttgatttggcccactggattaacaccatttcccatccatcaatagtacttctagcttcactacaagtgagtagggacaatgcgactatgcgaggactaatgccatatgcaggatatggtatgtgtctgttgtagctggatgtgagcatgtggatgtgtcttgtggttaaatgtatctgaagactcaagtcattgtaacggtgtctgtggatacatgcagcatgatatgtacgtccatccaccactcgctcatttgtacgaggtatatatactcgcccggagaataaatgttttatttttgaaaaacaaatattcttttgtacttattgaaccaagatacctgtagtaaacagcaatattaatattgatgtttaactaattaattaaagatgatgcaaggaagctatatataagcgctgatctggatggatgaggaactcgacacctgggcgaatttgtacctttgccgcaaggatagcgagcgctgtagctctcttcattttctttctctgatcccaggtggtgcataccctgcaatagttcttcaacggcggctcgtcttctccgtttctgctacatacatcgtcctcacctttcgttgaagctgcttgtatttgtctgctagtactgtttattctaaaatattcaacatacagagcttttgcgtgcgtgtttgtcgaaaatgttctggcaggataaacaggtaggaaatacaactttgcaagaacaatatccgttttgtataatattggtagatacaaacaggtccacggttgcataagctctaactaactttatatcctcctaaaacttctctttgagaaaggattttattgggcaaaaattagtactactagcttggaatgctttgcttccatgtggtgctaatattgtttagtgtaacactaccgtgcaagccaatccatcaaatgagcggccacacttacacatagcaacctacttacatttttgttctcgtttcgtgtaaaaaagttaatccgggagtggtatggttgaatggacaatatcttataaattggttccacccaactaaactagcaatgtggtgttaaacgtgcatgtatccacggctctcaggccacaaatgggccatctaaattgggcggatgtcaaattttgtcactggacctagatgaatttacctagaacataaacccaaattggacagatctatctctagcttgttatggttgtgccagcagcgtcctgtcctacttagtttctgtgcttgacatcttgagctggtatcatgatcccagcggttgtatggctctgttacgctttgttataaaagctgggctttggcctttttccaaaaaaaaaaaagcattattacatatagatgtcctaaatcctactccctctgtcccataatataagg

SEQ ID NO: 6240 - DNA, 1748 bp, Oryza sativa
ccatgcaccccgagcccagcttaaaaccattttgagggttttaaaaaagggggacgtgtgaatccatttccacaataatccaactattcaatagtgtccaggtggtgagaatattcccaaagtctagagttataaaaccacctaatgttgcctaacgactctagcggatccccctacctaaaatcatactagtggtaccatgagtagagtgtccactagttggggttttgtttattctagggtgaacaaggaaataataacaataacaataataaggtcataacaaaggtaaataggcatggctagataaaacagtgataacgcgggaatttaaataaagcggtaatgcaataatttaaatcaaaataattttataaactgggattcaatatgttcaaggatgatgtgacttgccttgctcgctttcccaaacgtcggcttcaacctccacgaagagcggatcttccgaagctgcagcgtctacatgaccaacggaaaagaaaaggcttttactctgataaactccatataacaagcaggaacaaagcacaaaaatgggttcttgacttcttaaggaaaaattagagacttgaacggtccaattccgagttcaaatggccaagttatggccatttgaagtttatatgctctttaaatgaatatttgcgaatttcttcatttaaattttaatttaaaaagggtttattgcgtcagccgaggggaggggcgcgcggaccgggtccacgggagtggggcccacgcggcagcctcacggtccacggtggaccgggtgcacccgggctcacaccggccggcgccgtgggtcccacgcgtcagccgcacccgagggcgcgggcggctgacggccgggccccacgcggcggccacacggcgcgcccgaaggcggccacgccggcgcagccggcgggagggcgcccgcgcccctatggtcgccggcggcggccataggcacgacggagcggcggccgagagaggggaagggaagggggaaaagaggcggccggtccacggctcaccctaggtcgacggcgacgacgaaaaggcagcccggagcggaggaaggcggcggcgcagctcgggtcgacggggtcgacggcgttccggtggtcggcgagcgaacggaggggtagatgaggtcggcgaggatgcggcgaagccgaaggaggcgacgccggggtgggagatggttcggggtgacgacggaggcggaccggagctcggcggtgacggcggagagagagagagacggcgcgagctcgattccggcgaggaggaagggcggcgagaggcggaaacggacggaggaggtgcggggagggtataaatagagttggaagggggagagggcggccggcggggaaggaaccggcgcgggaggtccggccgccatcaatggcgccggcgagatttgcgggggcaaatccgcccgtttgaacgcgagagagagagggaaaagtggggggaaagggagaggggatcaaggggagtgatttccccctattgattgcacgcggggacggtgggatgcggcggattcgcggcggcggcggcgctagggcgcgggcgagacggcggaagcggcgggaggaaggggatgacgggtgggccccacccatcagcgagggtggcgggcgggcccgcccgtcagcggcgcgcgcgcggggagaggccgagtgggccacggggagaggagagagagggggagggagatgggccgaccggcccaa

SEQ ID NO: 6241 - DNA, 5498 bp, Oryza sativa
cggcgtcgcctccgtttcacgcggagaccaccggagacgcgtccccgctggcaaccagtggcattggtgccactgtactccctccagccggctgctgtccctcgtcggagcgtcggccgacgtcgccgtctccttcgtcggtgccgtggcatcgtctccttccccggccacacctcggtttcgccggaacaccgccgtgtcgccaccaaccctccacccggctcggcggagtcctccggccgcccgttcctcctcgcttgtttaccggtcagccacgggaccaccaccttcggcatcgcagcggcaaggtcgccctcggcctcgcctccccttcgaccaaacccctccgcggtccatcgtcgttgtctccgttcgttctcgtcgtcgacgtcccgtcagtcgccggctcgtcgtctcgcggcgccgcctccgtcgtcggcatcgcagcggcgtgttccacgccatcctcgcctccgtgcagccgctgccggctgccctcgtcgcctcctcgccggccccggtcgtcgtcgtcgtcgtcctctcgtcgctcccggtcgtcgtggcgttcgtccctccgtcgagccgttctcgtccgccgcccgcgtttccccaagtgtgcagcagccccgtcgaagtcttcgtcctcggctccgcgtcgtcaagcctcgtgccggccgcgtctcgccttcgtccaaggatcgcgacgaaagtcgtcccttcaccgttcgtctcagtagttcccgaccgcatcgacgcgcacgtatcatcgttgtcgttcccacgcctcatcgcgtggtggtaaggatccctctccctcgctgccccgtcctcatcctttcggtgtcgcccgtgctcgttgtgcggttgtcggccccggtacccgtgtaccggtgtcggtagtcgttcgcttgtgcgtgtggtgaccgtgtttgtgtgcccgctcggtagccgcgtggtttctacgtgtgcagcccgtgtggtgtctagtggagtccgtttgtcggccactcgcctcggttgacacacgggatctgcttccgtcgatccgtggaccgtctctgtgtactcggtctaccgcggtcctttaggttgacatgtggggtccgcatgtcaacggcgcagccttcttgtcttttccaggctagcgcttacacatgttttataattgcaaagcttaactataataatccgcaaatctccatataacagcattaaacttcggatgatcatatcttggtcatacgaactctgaatcgacccgttcaagtctcctaatgtttgttataacctaaagaaccgtgtgctttctttttatgtattgttattgcttctttataggcttgtagctttgcttgtgtgcttcgcgtagcttctgtcgttccggaggttcccgaagcgtggttcgcggtcgtcgccgaaggttcggaaggccgttctctctgagcaaggcaagtcacatcatccttgagcatattgaatcccagtttataaaattattttgagttaaattaatgcattaccgctttatttaaattcccgcgttatcactgttttatttagccatgcctatttatcattgttaagacattattattgttattgttattattaccttgttcaccctagaaaaatcaaaccccaactagtgggcactctattcatggtaccactagtatgattttaggtagatgcttcgctgattaattaggcaacattaggtggttttataactctagactttgggaatattctcaccacctggacactatggaatagttggattattgtggaattggattcacacgtccccctctattcaaaaccctcaaaatggttttaggctgggctcggggtgcatggttttgatagtagcacctcggccatataaggaccggtcttcgggcctctgttgcaaagcactaccgtacttccacatgtctagtgggtaaggcttagtttgtggctcagtctggttataaacaaaagtacacggatggagatggacgaagttgggggtcgatggacatctctaggacaaatgaaggctacacgagctgcggcccggtagtcgagatgtcatggcacagggccggtgtcctgctgctaggggctcagtcctgcctacctgtcccgggggttccggccgtaggtggggttgggtcggtactcttgtctatggctaggatgggttggaaactatgtcacgtcttccgtccgtataccgtggtggtatgtggcacgtgattacacgtgaggaagatgtgtcttgtgggtaaagatgtacacctctgatcagagtataatctattcgaatagccgcgccctcggttatgggcaagccgagcaatgtacccaagtcagtgttttaattcttaaaatttgctcaacaactaaaatgtggaatggttggcctgggttggcttgggacgagctgggacccagggtcgggttgccagttcggtctgaatcatcgtaggccttgggttaaggcaggttcgtgagggttcacggccttgtttaataatactgtgtagctctaggatcgtctttataaaatggctttgggcaactaagtgacttttaaatgctgctttctgcaaaacttaacccctatattattatccccttgtactcctttgcattaattgtgcatctccggtgtggcttgctgagtactgtggttgtactcattcttgctcaatctttcccccctccagtaagagaagcgttggagaagatgtcttaggtggagtcctggcttataccccagttgagcgcctgtgaagatggagccgtaggcccgctagtccgctgctgtttatttttgattgtcaggcctgaagcgcctttgtaataatgtaaatattatcgatataataaagatgtgtcttttatatcatgtttgtgtggtgtaccccggcttttcctgggacggggattaatacactagcgttcgggaaaaggcaattttcccggtcgcgacagagcgcctgtgaagatggagccgcaggcccgctagtccgctgctgtttatttttgattgtcaggccttaagtgcctttgtaataatgtaaatattatcgatataataaagatgtgtcttttatatcatatttgtgtgtggtgtaccccggcttttcctgggacggggattaatacactagcgttcgggaaaatgtatttttctcagtcgtgacataaagccagccgataatctgcctgctattgatccagacatggaagaagtcttggctgaggaagagattgaagaagctgtcgatgaagcagctgctgagttgagcgaggcacgagaacaaacaccaccagccgatatcccggctcctcaaagaacgcctccaacaccaattgccctagctcggcaaaccagggtaagcacttctgttcaaacttgatgcaagtaaaattttcatgtgctgatttctcttattaatacttgatttttgcagcaaaagaaatctgctggaaggaaaaagccagcaccagtaccatctccagctccatcggtaactttatttctctgaaatcttatgttaaactcagccgatgttaactagtaattgatcttcttaattggatcttctttcagccttctcctccttcacctcctgcccagccagcatctagtgaacatactccatcggctgcaagcagtcacaatgtagaagaagaagtccaagcccctcctactatcactgtaagtttctttcttcaagaagtctcatatcggctgtatacaaaattttcatgtacttaacatcttcatttgttcttttttaggtcttggccgcatatgttctcctttgatattcggcaatacttcgatgaagaagaggaagacaccactagcaaggctcttgcccctctaactgatgatgtgaaaaggaatctccaagatatatcaactcggttggaggcctctctagatgtattggtcgcctactgtggatcaataagaactaggttcaatgaaatccaagacttgatcccataagacttggttgctgcactgactccggctgctttccttgagcaacatcaatttaaattagagaaagcaaggcaaaggatagctgatcggcgagaaagaaaagacattgaagcaactatccaagccaatcggctgtccgtgaacaaggagaaggcaaggttagatcagctatccattgggccggtgcctattcaatccaatatagatcggctagaatctcgaaggattgaggtcttggctcagcttgaagagtgcaacaccgagttagccttaaagaggcaaaagttagccgatctgcccaaggttgttgaagaacagaagttgaagttgaaggctaccatcagaaatgttgccgatctaaccaagtccttgaagtttgttcctggaaccgacgcccaagatgaagtggagcaaattaggcagagggcaatatcggctattcaaagataccttgccgattgaactgatgatatgtaataggacttagaaatatttttgtaactggctttaaaactcttgtgcttccgtagtttgctctcatgaacttgatgccgattaatataacttttgtttttgatgtccatattttttgtatatgtatggccccttaattttaccatgttgacaaacattgataaaattaaaataccaactaaggacgatacaacaaacatcggccatcatacatcggcaaagcacaaccgattatgataagtgaaaaaacactaagggtgatataacacatatcggccatcatacatcggcaaaatacaaccgattatgataaaataagaagtctaagggcgatatgagtcatatcggccatctaaaggcaatgtaaacacctcggctgtcatgtatcgacacaatcgtagccgaatcatgaatggatccatacacttggataatatttcttcaaatactttccattaagagctctgccgaaaatttctccatcaagtccttgcaacatataagcccctttagaaatagacttataaatttgaaacggtccttcccaattcggcgaccacttgtcgaatttgttgtcacgtgtgccaatcggctagatcaactttcaaaccaactcttcttccgaaaatgatttcggcacaaccttcttgttataatctagagtcgttctctccttatctctcaccaccttctccaaagcacgcaatcttgattgcactaagtcctccaattcatctaccataagattatgataatcatcggctgtcaactcatcttgaaaatcaatcctcctcgatccaattttagtttcccacggtaaaattgcctaatatccataaaccaacttgtaaggaggaacttgaattgaaccatgacaagccatccgataagcccataataccttagccaatcggctatgccactaccttggaaaatcggcaatcttcctctcgatcagcttaatcaaactcttgttatatgcctatgccggcccattagcttgtgcataatatgg

SEQ ID NO: 6242 - DNA, 2662 bp, Oryza sativa
tcaacaacttaatccccaagcttttcgcaaactgaacaaattcatccgaaacaaaaattgatccctggtcggttgtaatagtctgaggaactccaaatcaattgataatatgttttttgacaaactgaattgcatccccagaatcaactttcttcaaaggaattacctcaacccacttcatgaaataatcggttgccaccaaaatatacttatgtcctttactcgaaggtggattaatctggccgatcatatcaatcccccaacctctaaacggccatggcttgataatcggattcataaccgatgctggtgctctttgaattgctccaaacttctaacaatcttggcatcccttgtaatatctaaaacaatcttccaacatcatcggccaaaaatatccaactctgcgaagcaaccacttcatcttttgagttgattggtgagtactacatatgccttcatgcacttctcccatctcaaccttagcttgattggtactcaaacacttgaacaacactccatcaatcgctcgataatacaactcataatccaacaaaaaaaatcgcaaggccttatattttaacttccttgcagccgattgagaaggatttttgagataattgtatacatcatacctccaatcatcagctgtaatggtagcaacttcaatttcaatatctttaaccatcggtttgtatcccgatgccccctgtgccaaatcatttgtctgcatattttgctctcgagaaacattcttcaaagtcaccagccgaaaactatccatcaactcacagcacttctcattgtatatcatcaatgtatccttcttgcattcatattccctagctaatcggctaatagctaacagagaatcacctatgatttcaatggcatcggcttcaacctccttcaaaagttgcaaacccttgagaactgcttcatactcggcttgattgttagtagcataaagcttgatagtacaagcaaactcaaaacttgctccccttggtgaaattatgactaaaccgataccacaccaggagtgcaaacagatccatcaaaaaataatgtccaaggcataatatcaaccgagccgattgagtcatcatgatgctcaacaataaaatcggctaaagcttgccccttgcctgccttgggtgactcatacctaagatcaaattcggtcaaggcaaaaatccacttttcaactctccctttcaacactggagccgatagcatatacttcaccacatcggtcttgcaaactatggtgcactcattggataacagataatgcctcaactttgtgcatgaaaaatacaggcataagcataatttctccacagctgaatacctggtctctggatcaagaagcctcctactgagataaaatattgctctttcctttccttcaaattcttggatcaagactgagccgattgacttctcatcggctgacaagtacaacttgaaagccactcccttctgtggaggaattaaaactggaggagaactcaaatattccttgatattgtccaaagccttctactattctgccccccataagaattcttggtcggccttcaatctgagtaaaggtgtaaaaggcgccatcttcccagataagttagaaataaatcttctgataaaattaatcttcccgaccaatgattgcaatttcttcttgtcctctggaggttcaatgttcttgattgcattaatgcttctctgtgtaacttcaatgcctctctcatgaataagaaatcccaagaattgtccacccaatacgccaaaagcacacttggtagggtttatctaaatgccatattttcttgttctctcaaataccttcctcaaatcggctatatgatcagcaatctccttggatttgacaactacatcatcgatatagatttcaaccagtaagccgattagatcatgaaagatgtaattcatagctaattgatatgtagctccagcgctcttcaatccaagtcattacaacacactcgtacaagccgattgcaccaggccaatgaaaagcagtgtcatgaatatcttcttcggccataaaaatttgattatatccagcattgccatccataaaacttataatcttatgtcctgaagcagcatctaccaattgatcagcaatcggcattgggtattcatccttaggggtagccttgtttaaaccttgaaaatcaatacaaaccctaagtttaccgtttttcttgattactagaactatattagagacccactcagcatatcggcatggccgaataaaaccaacatcataaaaacgtttaatttcagctttgatagcatcatacatatcggctttacatcttctaggtggttgtttatacggctgatatcctagtttgataggcagccgatgttcaacaatcgatcggctaattcctggcatctcaaaatactcccaagcaaagcaatccctgtattgagtaaagtccatcaccggtccctaaacttataccgctgtgtcttcccggtccctaaactcacaaatcgtatgttcaggtcctcaaacttgttcaactgtgtcatcccggtccctaaacttgcagatcactcgtttaggtcctccaacttgttcagttgtgtcaccccggtccctaaacaggatggtctaaaa

SEQ ID NO: 6243 - DNA, 3218 bp, Oryza sativa
ctcatcgagtattagattattatatacaatctcgtgctgcattggttaggttcgacctactagattgttgtttataatataagtcttgctaagccaataggttcatgctaatgttttatcggggtgctagccgatacgttatctggacattgcatcggcttataaggattacatacaagttgggtttagccgattgcaacaaaggtttcactgtttaaattaatcttttggattttatgacatcggacctccagccgatgtatgctttaaccttcggatcaatgcttattctatcatattgtattgctagccgattggtttatactagattatattgttattttattacatcatcatcagccgattgcctttctatcattatctatattggacatatagccgattgcttaaatcctatcgctatcggctagtatcggcatcggctattattggcatcggctggaactactccatcgccttgtcagccgatcggctatttaatctacggtttacatatcttgttagttgcaggatcaaactaactggcacgcccgcatctcatcaaactttggacctgcactggagatgaacagatctctcaggccagtttgtctttttcgcatccacacaagggtatcgtatttattttatcccgtgggaagatcatgtagagagaactggactaataatttatacattgcttgtgataatcatattctaagcaggggttaagataattctagggtagagtgacacacaagcattaactattcaatctcataatatattatctaagctaggtgggaagaaaagagaaagataatctattcctacacttctaatatatatagtatacatacatcctagttaaccgatatactaggtaataccctctttctgatgccctcctggtacttcgagaagccacccctgattgccgagttccttacgacagcccgtcatgaccatacaactggggctaaatacggaggaataccctccccaaggaattaacctaggattatatataggcaaggacgaatacccgtactgagctatcaccatcagcggcccacctctcatccgcaatatataaccccaaataatgatatcccgtagtctagacaccacgtctaaactaccaaatactactctaatatcatcgtcatgacatagagtaattgcataagcaaacattatacccgcacgaaagcatctcccagataagctagccatatattcagtatagcaaaaatattcatgtaaagtaggtactcatatactcggaaagtatttcgactccataaatgtatttagaagagtattctaataatagtacaaagcttacaaaagagaagagaaaagctactagagccatacccgaactcttccgaaggctttcagactccgatttctactctatttctattccaccagctagatactacaaaactaaacttgagagaaataagagagctaattgcttgaggtgtgtgtgtgaagtgaggaggtgaagtccttatataggcaggtaatgacggttgtgatggttggaatggtcggtaatagcctccaaccgtcattggggcttcatctcaaccgtccagccaaaacctagatccaacggaggcgagggtggtttggccgaacctggggccaccccaatctagcccaatttcagctggcggcctcctccgttgttcttctccgtagacttgtgaattttggcccagtttgtcatgtcagttctgagttcttgacccatttattcataagtctggttcctgacatcgtccgattgatttatcatttgcgttgatgtcgattctcctccactttattttcattctctacaaaaaggttagtatacctaatactagtggaatattattactctaacacatttatgcattgtaagcatcactagctctctcctattttggtagtattgacggtcgaaactgatcgataacgaccgtcaacaaaaccccccaagcttgaaccattgctcgtcccgagtaaaggacgaaaggaaacaaagacttggttgttgatcaggagttgctactatgctgcatatctcaaagatataggtgcaaggtacatgtactctctctcagattaaataatctttggcacggtggcttatccttacccctgattcccacaagacactacttctccttgccttgggtagttgaaagacagaacaacaattagagcaccattcacccaatattcatccaactcttattccgaaagttttcaaatgattttgaaaaagataaccaagtttgttaaatgattcactcagtctctccaagtgtatcaaaaatgaattcctcaccaattattgcctttttgattccttctctaaggctttgatatgtggagttcggtagggatcaaacatgatatacttgcattcacatttattactaagtcaaaaacttagactaaagcagataactgaacatactcaagatcaagatcgtgcaaagtgtgtgatatatagtggaaatggtgtatgaagaaaaataaagaaaatgcttctcctttgtgcttactttcttctcccaaaaatccttcttttattgattaggagagggcatgattacatttttttttcaacatcatgctcatgtttgatggagcataacccccttttttttaaccatgcctttccatcctcttcttttccctttttttcaaaaggatttttctttttaggagaagaaagcacatgaaagcatggagaatttattttggtggtaatatggaaatggaatggaacattgcttagctcccagtgttggagtttagcacgtgcacatatgtgggtgtatgatcttgatcatagagcatgagaagtatctacacaagtcacaagagtttgacaaagttcagtggaatggcaaataaccaaaatgtaaatggtttcatcaagatagcacatttttggctctggtaggaatttttatcaaatgaggaactttcagttttatcattttgaaaaacaaaacatccggaattcaagtcaaactagtatcaggatcgtagcaactcatatttactatctcatatctcgcaacatcttagacttagatcagcaagtgcagctcatttaccttaggttcccggataattgttggctacttatatttaatctttgagagagtatttacgaagaacccatatgtaagagatgggtaccgagc

SEQ ID NO: 6244 - DNA, 2513 bp, Oryza sativa
cgtgtcaccaggtacacctcctgtgttgtgtgagtgagtaattaataattaacttgtcaaattaaatacagattttttgcgaatacgtaaaaggattgtacgtcaatatattagtaagaaatagaggttttgatacacaacgcaatcggctagacatacgtatgctggaagagagtaaaaaaaaaatcactgcaacaaccaattgcgaaaagaaaaggactactgcgaaaaaaaaaactactccaacaaacaagagggagggggtggcaccacactatgctgctagcaaatctcaaaagtggttggggaaataaaatgaaatggaatggaatggaatgcatacagtaattcacatgagggaaattaatttgaaaatagtggtattggttgtatctcaaattgttctcaaatttaattaacgtggggaatggaactgttgtgtgattaaatggtcaatttaattacagatttgacaagatggaatgcatacagcaatgcacatgaggggaattaattttgaaaatagtagtattagttgtatcaaattgttctgatcaaatttaattaacgtgggaacacgaaactgttgtataattaaatggtcgaattaattacagatttgacaagatgaaatgcatacacagtaattcagatctcaaattttataacgtgggaacgaaactgttgcatgtgtgattaaatggtcagattaattagagatttgacgaaatgttgtgtatgcactatacagtactacttcacatgaggaaaattctctatttctatcaaaatattctctatttttttggaggactatcaaaatattcttaaatttaattgacacgggaaagtgctggggagtttgggaaaaggggtaaaacctgtgacttgatggtaaaggtcacattctttctgggaaaattaatgagtggccgtctaacagtaacagatattatgcttttgttggtctcacatgatgagatacaaaaagaatacataaaaagaggaaaaaaagtatgtatatatgatcaatgattgcacgatcagcatgagaccggccgttgaaaagacgtcgtgcacgtaattaactattacatctaattttactttcaggtgtaaatatgcagatattatatacgttgtttcaatccaatcacgcgtattacatgcatgtctaatacctgaactagctaaatcacacaaaccaaaaaggggagtttatacatgtaaaactagctaccttagctaggtgatctaaactcacatgcaagttaagtcaaatatatatatatatatatatatatatatatatatatatataacaaagtataagaattaacacaaacatgcaaattttacatgttgaattaattacttatgacatattataccttgcaacaatgtgagagatgatgttggaggaactccaaggaggtagagaagcccacaacatcaaccaacattttcttctcctcaagcaacacctcctcttgatcaccaccttcttcctcctccatgatgccagtgaagaacccccaaatcaccttcatctccctacctgaaacaacctcaacctccaagtactccttcaagaacccttcaaccatgatcctaggcatctttgtcacacacaccctcctcatggcactcctcatcacatcaaacccttcctccccaacatcctcaaggaaccacttgggaagcacggctcgcccggcccgaaaccggcttgcccgtaaaccgcagaaggacaccattgccatgaccttcaaggccatgtcacttcccatgacacatagcaatgggtagaggaggaggagcacaaggcccctcaagaaccctcctgcctctagtgccacaagcatgaagtaggggaacaaggaggatgatctaagcaaaccgccttcgacgtcgagtactagggttttcgcggcgagcttctccatgggagggaagcttgaggaggacttgtgcagcaaggaagggtgtggcaatgtggtgttggtgttggatgatgatctagagataggcttcccatgaaggagtagggataccaaggcagagaacagcctatgtgacagcttcttcttgggcatggtgtactgttgttggtggcaagctaggtatagtatggtagaggaagaaatggattgaattgtggagaggtagatcaatggtcccttcttttataggacaagacaacacttggatttcctgcctgatcatgcatgaaagagctagatagatagataggtgaaagttccatacttattactagtacttaattttcagggaccatatgcatggcatgcatgcctacatggctgtccttctcctttagtaacaaactctgaaataaataatgcacagtttactttcttattcaggatagcatgttagatatttggtcatagatcgcacactagatgtcttgatctcattgagaaccgtccagcatgagctagtagccatagtacatgtatattcatggcagggaagaaagggactgtaga

SEQ ID NO: 6245 - DNA, 3031 bp, Oryza sativa
aagaaatatctatcgaccatttgaacgcatccggtgtgcttccataatttcatgtaattaaatatgttagggagaaaacacgcatgtgttcttggtaatgtgaaaatattgtacgtttcgtacgcgtttttactgcacatatttttaagtcacatgtaaagagaaaatatactccctccgtattttaatatattacgccgttatctttttaaccaacgtttgatcattcattttattcaattttttttgcaaacatgaaaatatttatgtcatgcttaaagaacatttgatgatgaatcaaatcacaataaaataaatgataattacataaattttttgaataagacgaatggtcaaacgttggataaaaagtcaacggtgttatatattaaaatatggaggtagtaattatcaatctgacgggagacgctcctgtacttaagcaagcacttagacaaacacttgaacaaaatgttttgtgctaccagaactgtgcagcttttcttagtttttcttctcttatttaacagcaagcaagaacaggaaatctgtggaaatgcaacatgatcctccgcgacgcgggccatgcatcccacgcatgaggaacaccacaaacacaaagggcgctgcaccgacaagcccggccatgcgcttgaccaacacaaggaataataagagaaacatgaaacaggtaaatgaatgaataaacacagaatgtacggtattatactgaaattagcaagaaataatccaaagatcacaaattcacaatctggccatgccagttttattttggcttactgatctcagccaccatgcttaacgtcctcttctctggctgtgttccaaatgccgtgcattggcgtgcatgtgcacaccatgatccgcccccagcatttagtatatttgacaggcttaattacttcctgatcaacaaaacagaatcaacatgagtaacagtataatcaccgtagagcataacttttcaaataaaaaaaaaagaaatggaggagcacacatggactttacattgaacatgtatggatgcttataaatgcttgtttggaatgtgcttgatcttttgccagttttcataaccaattgtttggcacgaactcgtgagcacgtcgctgcagcgataaagtcgaaacgtcttaagagacaggggtagcactggaagcagcaagatttgagggcaaagaaatagctctagtttctcgagtgacttgagacgctccatgttatctggtaaggagtcccagctgcaacaccaaatcacgagcgaacgaagatcagtgaacagctcgctttgttgaggaatagatcccaatgggctgcatctgttgagtttcagttggttcaggagcttggggccattgttcaggttcagcagctgacccacaagcctcccatctgtaatcttttgtgcttgtacatcagtacattaaaaaaacatagattaagcttaggttcatgctgtcacaagtgcggaaaaaaaaagacaaaccatgtgacttcaagctcccgctcaagtgctcatcatttcatcaagtgatgtatatatatagcatatatgaagcactctaggaaaaaaaaggagatttggagggagaggtgtccctccatgcatttttaaagaagaaattccatgtgacttcatgctcctgctcaagtgctcatggtttcatcaagtggtgggtcctgtcaagattcaatcaactactattagatatgtggtatccataaccctgatatatatatatatatacatatatacatatatatacatatatacatatatatatatatatatatatatatatatatttatagacacggtcgcgctacacggcacgacacataggcgctgtgcgccaggaaaactccatggtgcgacacacagcgacaaaccccccaccaccgaggcatccaaaccacccgtgtagttaaaatataacttagatagagttgagtggtggggggcgatgacatcgttgaggagttaatattatgcattaattcagttggtttgagttaaaatttaacttaaacacagttgggtggtgcgatacgatgacatggttttggagttaaaaatttagttgttgttgaattttgaacgatatgtgattgaacctggtcactgctgagttaaaaattaactcgtgacaccccatgaccgagacaaccaacccgtctcgcggagttaaaatttaaccgagatacagttgtgtggtagggtgcgatgatatcgttgtagagttgacatttttctttaattcagaggattgttcgcattgttttgtaatttgttgttatcaaaaaatacatcccaacacgtataagttttcacgtattcattacaaaaccgtattttacacgggatgcagctgaataaggttaaaaacattggagggcgggctaagtaaaaaattaacttggtatccttactaagtaaaaaattaacttggtatgacaataaaagttttactcaacatatacatcctcacaatttatgagcaaaagttaaaattttgtttacacttgctccggacatcgacggcggcgtgtcgtggaggtggcaccactggtcttgcctatccatcggagtccgagctcgccaccacggaggtcgccgccgtgcgcatggaggcggcgtggaggccggatccatcaccgcctcgcctcccgccccagtcgcccgtcacagccgcgccggctatgccccaccgcggctggatccgcgcgcgtggggtgtggagcagcggccagatgcgccgcatcctcgcctcccgctcgccgtcgcccatcacagcctcgcccgcagccatgccgcgccggatctgctgacaccgcgccagccgcagctcggtggtggaggtggagccgccgcgtctccccgtgcaggatcagtgccggatccgccgtcgcaccgcatcctcgcctcccgctcatcgttgcccgtcaccgcctcgcccgcagccgtgccgtgccggatccgccgacgctacgctagcctcccagtgccaga

SEQ ID NO: 6246 - DNA, 1303 bp, Oryza sativa
caaatgaaggctacacgagctgcggcccggtagtcgagatgtcatggcacagggccggtgtcctgctgctaggggctcagtcctgcctacctgtcccgggggttccgcccgtaggtggggttgggtcggtactcttgtctatggctaggatgggttggaaactatgtcacgtctcccgtccgtataccgtggtggtatgtggcacgtgattacacgtgagaaagatgtgtcttgtgggtaaagatgtacacctctgatcagagtataatctattcgaatagccgcgccctcggttatgggcaagcctagcaatgtacccaagttagtggtttaattcttaaaacttgcttaacaactaaaatgtggaatggttgcttgggttggcttgggacgagctgggacctaggtcgggttgctagttcggtctgaatcatcgtaggccttgggttaaggcaggttcgtgtgggttcgcggccttgattaataatattatgtagccctaggatcgtgcttgtaaaatggctttgagcgactaagtgtcttttaaatgctgtttactgcaaaatctaacccctattattatccccttgtacccccttgcattaatcatgcatctcccggtgtggcttgctgagtactgtcgttgtactcattcttgctctatcttccccccctcagtaagagaagctttggagaagaagtcctaggtggagtcctggcttataccccagttgagctcctgtgaagatggagccgtaggcccgctagtccgctgttgtttattttttattgtcagacctgaagtgcctttgtaataatgcaaatattatcgatataataaagatgtgtcctttatatcatgtttatgtggtgtaccccggcttatcgtgggacggggattaatacactagtgttcgagaaaaggtaatttttccgggcgtgacacacaaccatgagtgcaaaccgatcgagtcatcacgatgttcaacaataaaatcggctatagcctgccccttgactgccttgggtgactcatatctaagatcatatattattaaagcataaatccacttcccaactctccctttcaaaactggagccgatagcatgtacttgatcacgtcggctttatatactatagtgcactcattggacagcaaataatgccttaactttataaacataagcacaacttctccactggagaataccttgtttctgcatccaaaagtctgtagcttaaataaaaaataatcctctcttttcctgccacttcttggattaaaactgaaccgattgattt

SEQ ID NO: 6247 - DNA, 19831 bp, Oryza sativa
aggactaaagatctcggggggcctgacaaggcctgacagatttagaaccgggactaaagatcatttttagtcccggttggtaacaccaaccgggactaaagatcaaatatgcccgctgtagccaccaaccgggacttaagatcatttttagtcccggtttttagtggaactaagattattgtggatttcgggcgaccgaccaaagacggtttctccaccagtgatgataactataacacaattcgtcttgttgtttataatgcacattcttccatctagcaacaactgtggtttagctgtcctccatctaattgacccccttgtgattttaaaagaaaaaattgataccaaatgtttgcccccgaagcttctatgcccatttgcgggagatttacttcgatccagcaaaaaatatatcgaggtacgatcctcatggtattaaatcgtttccgatccttaaatccagctgggcagaatggcattgttagatccaacaattggaaacaatttggtatcgcgagatatttgtacctcgagatactttttgttggaccggagcaaatctccatttgcttatatgccaaaccatggagatacagacaattcatcactgatctgccagggttgaaaacaaggaattccagttcgatctacggtgtttgtatccctccacatccattcatatacaatagccagtgtcttcgtcgtatacgtggatattgtctgccgtttacgtccgttgccttcttattcaattccatccattttattttctctgaccaattggctcaattggctagccaattggaacatggccttaggtgctatgttaagattgacgagaggacccaaagagttcacgagggtcagtctttcggccagggacaaaacttcttcgttttttatctctgcaataattgttatttaatgttaacttgtttcaattgcaaagagagagggtgacattttcttttaagaggcaaaagctttgtcattttatattgatagataagagtaaagtcataacaagctaagtactacctccttgtacaaatgtttgacgttggctagtacaattttgagctaacaaattaaacgtcaaacgaaaaagaatggatggagtaatatttatagggcgaaatcgaggtaggacactactctccacagggaatggtctctgtaagcctaacagctctcgtcatgatccaggttctcgcctcctccttgattttggccacgatcatggctggcgttgtggctaggcgccgaaaaattctggcattacgctcgcaccagagctcccaagtcacgaggatgatcaccaactttaacgctttccgcatgacgtatggcgtgtttgaaactttgtaccaccaatcttcttcattggcgtaggctttccatttgtttatgcggagatcgatttttgtccaactctgtagtgtgctccagattctctttgaaatcctacggttggcgagaagataaagagccgattctagcgaggcacagcagagtgggaaaaagtggtggttcgtccatcccctcttctacagcctgtctaccgtcgaaactctatttttgattacgagccatgagaagactttgcactttggcggctcccaacatttccttattgattggttgaagattgttcatgctgcccccatgaattgcattctataagccaaattacttgagtagactccattagccataaacttccaagtgatggtatcccgttgcgcgttgagaggagccatgcactggatcattgtccacagttagacaaattggcatagatggactgttgtgcactgatatattcttgcgcttggaggctgcgaagatggccggcgccaatttgtttcgggtcttatcttccaaccaatgtgagtgccgaaatctcgccatattaccgtcccccaaagtgatggtcgttgctgctgcaaagagatctctatcctcttggtcacaggggaccgtggtgccactccatggttgtctggatcggtccactcgtaccacagccatataattctcagagccctagcgaaacgatcgagatcaaacacccctagtccacccaaatctttgggtctacagaccttgtcccagctaactctgcatttttttccccctgaaatttcctcacctcctacccaaaggaatttgcgtctcgtctttcgagggagtgcaggaccccgtccgagttctttattgccgtgaaggagcaaatctacggtccttgaggaggtactatgaggtaccaaaaattcagtataaaatttggtacctcatgataccttatagtacctaggtaccaagaggtaccaaatttacaatagaaaaagtggtacctcctcaagaggtagatggattgcaccgtaaggactaacttggtcagggtcgttctgcctgccgccgacatcagtttgccttgccaaggagctagccgcgtgcgacatttaccaaggagtggttgaacatggaccattttaagcttggagatcgatcgcaagcagtaggctatgttacttcattgggaagctagtgatgtttgcatggaaggcctgtaggatgccctggaggtctctcccattgcaacggatgggcacaatttgtctttttggcacgttggttcggagccctggcacctctccgaaagaatatagtatgcgaaccaggtatcccatgtcgcacatcgtcgggcatgagacatatcctcgtacaaatctgaatagatagtttgtccaaatttatagtataatatattccatactccaattcatcttaaatcctttatatattaggggaggagggagcatgtgtctttatcaatagtttgtatatgatggacctaatttctcttccttgataatatatatactacctatttctgaaaaatccgcgagaaggcgtagggtaaccttttagtaataatatttctcactccgtttctaaatatttgacaccgactttttagcatatatttgaccgttcgtcttattcaaaaacttttgtgaaatatgtaaaactatatgtacacatataagtatatttaacaatgaatcaaatgataggaaaagaattaataattaattaaattttttgaatacgatgaacggttaaacatatttaaaaaagttaacggcgtcaaatatttagaaacggagggagtactttgtgctgaaaaaacatgatttctttcgtctctatccaaaagagtcgtctctctatctcctcttcctaacagagaaatagtgatgatttgtagcctgtacaaacaagactagctaggaatcttttgggagcgctctaaactaagacgtgcctaatgacatgtctttatttatgctgcttaattaattaaggctgctgatagcctggtagaggaaactgaaccaaaacaattagcaattcggcacctatgggccaatcattatgtaatttctcggtatcacgagcctctagatccatgcgacaagttcctaagctagtctatataaagggatgagtcatatacgagctatgagcatcacattcatcctacacacctactgcagaaagctagtgagaacttggtaatctcccttgttcctgctatatacataatggcgccgacgcaggtgatactctcttatcctatcataatatatgggtgatcgagtgattttgttactctctctgttctatacattctggtctaacgttttggtttcaccttccctcctctatattcactgacatatactccctccatcccaaaatatttgacgccgttgactcttttaaacatgtatcaaatgatagaaaaagaattaataattacataaatttatatcatttgaagttacgtatattagtgatgagcatatgtgtgtgatatactaatgtaactatcaactatgcacccatctaaagatgttatgattaatcatcattataaatttaagcttattattactgccagaatctatagacacatttaaaagaaagagagttgtgcaaatgcgcaacttaatatactagtttgtctgatcaagggcggacgtcggattggctcaactccttctggaccagccgaccaacctatggttgtgtggttgtgtttagtcccttcaaacttccaaaaattccatcacatcaaatgtttggacacatgcatggagcattaaatgtagatgaaaaaaatcaattgtacagtttgcatgtaaattgtgagacggatcttttgagcctaattacgccatgatttgacaatgtggtgatagagtaaacatttgctaatgatggattaattaggcttaataaatccgtctcgtagtttacaggtggaatctataatttgttttgttattagtctacgtttaatactttaaatgtgtgttcatatacttaaaaataatttggaggaggaactaaactgtaacgctccgcttttcgtgagtcgttaaaaactaactcggcaaaatcctaattgcgaaaattttcgttcttttgtgagagtctaagttgtgccaaggatttcaatttaatcccgttgttccccctcatcgcaatcaaaatcctccacctcgaaaattcctcttctgattcgagtctctgaaatcaaattctgaaattcaaatccttcctttgaatcctcgccaaatacttctacgaatccagaattattcaaatcccgcctcgaatcctttccttgactccaccctatgttcccgagaacaaatacccaagtattccttttgaatcttttccatgacttctccttgaattccccttgatacatccctaaaccctcgagttcgaatatcaaatttgaactcgaatccaaaccctaaatctctccaatcctatccaaatcagttctctcagaaaaagtctaaatagcgtccctcttggctgtgggccgtttctcccttgctcggcccattctcccctctcggctgctcctcctcctccccgcacgtgcgctgcatgcgccgagagagaggcatcgcctctcttctttctctctcgttttctcgctccctctctgttctctctcgcgccgacaccgcttcccgccgtcgccgcccaaaacctccaccgccttcgcccattcccacgcgcgcctagcgaggtggccgaccggccggtcgccgccaacgccagcgctgccgccatcgccgatttttcccgctgccgccattcgattttcggccgtgccgctcgttcccgcgcacgcgcgctcgctcgaggccagccgctcggtcgccgccgcgtcagccctgacgccgcccgtgaccacgcgtcgcctagccccgcctgtgcgcatgcgtccaagggagggaggcagagccccagtctcgctccctctccctttcctttatcctgaaacagcaaggagcagagctccctttcttctccacctttttccttttgcccgaccaccatcggcgtcaccgcctgccaccaccttgaccacgccagctcgtcgtccttgcacccttgaccgcctatgtcggttccccctcccaaaccgcctcttctccatctataaagcccaggccgagcctccctatctcattctctctcggcatctctcttccaccgccaccgcgcctttgttgccgccttgcagctgccgaccctcccttcgccgtcgcgcgtgctggtgaagccggcgtgtgcgcgaggagccgaagaggactccggccacccttcttcttccccttccctggcccaaggccggagaactcgccccgcgccgtcgaccgcccatcactgcccgcccggttcggtagtgcctcctcccgtttcccttcctcgctctccctcgccccctctagtctgcgtgatagctcggtggcactcccgaacacgcgtagacgccgcccctagacccgccgccgcccggcctggcctcgccgccgttgccgcccgctcccggaagccgccgctcgtcgccagccctccttggtgctcttccgccccatccgacgccggaagtggactccttgaaccccggagatgcttccaccgcctcgaattgaatcctcgtcgcccctccaccgggtttgccctttttctcaccgccggcgagggccgccgcgattcgtcgtcgccggtctccccgccgcgaatccgagccggtggcacactttatctcctccgtctcattattgcggtgtgctccctccctctcgaatcatcgcgacaagcttctgagaactcggccgccgtccgccgtccatctcggcctccccttcttcctcctcccgccggcccgcgtggctgccacgtaggcgccacgtcggagccacatcggccgcgaccgggtcagcacgaccagcctgccgcctccccctccctcgaccggtgcgcgcggtccacggagagccctatggctgcgcgtaggcccgccgcctctcggtccatccggcgcaccgcccgtgcgccatcttcaccaaaccctagcgccgcccccgcgtgaacccattcctccatgaacccagccgccgacaggtgggcccgtcccgggaccccgcatggtggacagcggtccacccggttggtctcctccccctcccacgccccattgggccgccctcctcgcggccgtgccggcccattaggctcgcccgagctgcgcaagtccctcgggccgcgccaatgccacccgagacaagtctgattcacatccctcgtccatttcctttttccaaaggatttaataaatccttttcctttagacagaaaatccaaataatcttaggaaatccatatctcctcaaccgctcgtccgattgaccccgttccacttccagtaattccgtaaaattgagatctatataatggcactactaattagtctaaataggatccttcttttggtcttttgtttaggtttttgattgtttgcgtatagttgcggttaccggattttcgtcgatcgcgggttttcttgaaggttcgtgaagcttcgtgaagaccttgagcaaggcaagtcaccctttgatcaattgcccctataattgaaaagtcattattattttgtttgaaacttgcattattagaatcacacacttaacttgcttggcctcggtttgcgtgccaaaccgacggacctacccagtagtcgcactaatttccgtaggtcgtactaccctgattccttgtcgctccacccttgtggtacctcggtattcgtgctctctgagcgcgtataccaaatatcccacatacaccgttgtttgtcgaaaacttgggaaatgggtttgtgaagccctcaaaacccgacatgtggtgtcggtgtgttggaaaataaaatgaattgtgaaaactcgcgatgcgggggttgcgcctatgtggcactgtcccgtattcgcatgtaaggaccgattcctgtgggaaactcatcgaacataatcaaagtgcaaccacaaggtggaatgggacaccctgtctaagtaactagtcggttcagggaaaccacgcatgccaatattgggaacgccggggcggggtcggttggagccaaaccgggttcctggtaatgcaagaacgagaagcttgctgaattaccgatcgaggtggttggagtttgatttgtgaacgcctaaaatggcctatgtttctgtgaggatttgatccttctatgtggcatgaggtatccctgggtcggcttgggaaaggttttgtcgcgaacctctgacaccggccagtgtctggagtaagttcgtgtcttgtgggtaaagtgtacccctctgcagaggttaactaactgttcgaacagccgtgcccacggtcatgggcggatgtgaggtggttcccgttgcgtagatttgtttgcctgtgctttgtgaaaagttgttttggtgtgggaatcgtaaccagaatcagcctatgtggcagatggatgacctgagtggtcagaaacgaatctgtgtgattcgggatgtctgtgggcatcatagactaggcttcccgagtggaagcggattgctttgctgctgggcagcaggactctaggagtccgagaaaatgaaaaaggctctgggagccgattaatcaagtggaatggctctgggagccgagaagtaatgatctgacccaggaggtcggtacatttccaattgagctgttgaaaagcatctcttaagtcgatttgagacgcaagtctcttttcgacccaaacttaaaagaaataaatcacttagtgatttcaaaatgtcttcaaacaaaagatttgcaaaacaaccttgcctctcttccaagcttggattaaacacctaagttcccgtgacttgctgagtacgaaagtactcacccttgctctatataaatatatatatatatagttcctccgccctgaagagaagataaagtgaagtgaagattagggtttcgtcctatttcccagccgtcgcctgtggtgttgggtgttagaccgttggtttcgctactgctgttgttgttgatgttcgcctcgtccgtgtcgtcggttgtattctcgggctgtctgagctgcaacctaagttaaggtaaataagtcccctatttattttaaggattgctatgattcatatttgtctccgtgggtaccagcactatgtcctaggactggtaccgagatcgcggtttcgtaggaagcggttcgcgccgttttccctacgacacactcctgtcaggtgccgttgtacagcggtatcagattggggtgtgacataaacacggcctatatatactgcagtactacccctactatactagggtagattagctactatggataaacatttttttttgcggggatactatagttaaacttgagatgatgggctttcacattcaggccttaggacatggcccaaagtgaccagtgagacctatcccaccttcagattctgtgtaaattaatatatgtctatgaaattattggttactgcctactataaagacacttaaatttggagcaaatttatagtccttgatgaggtatatcactttttctaatataaatttgatacttcttaatacctgctccctccgtcccaaaaaaaatccaatcctaagtttgaatctggacagtgtcttcatttgtaggattatattgggtttttttagacggagggagtaggtattaggaggtacaaaattttacactaaatttttggtatctcatgttatctcctcaatgactgtaaaattgctctaaatttatattctttttgaaaaaaaaatgaagacactacatatgagaaatttaatttcttttccgtgaaacaacttaaatgcatttggatttattaacggtcaaattgatgcatgcatatgtttcccgcttaaaaaatatgcttgtttactgtctcttctttctgaaatgccatacattgcttacatatatacatattataattaggaaaagaaggaagtatgtttcgttttacatatgaatacgtattcaaatgaacattattaactgtttaataatataatagatgttcaagaaaggcttaaataaatcagcaccctaccgttgtgatgtatatataggctgctgggaaggtgacgctgcgcagcgaaccaaaggagaaggcgatcccgagtaacgaagagcgcaaggaatggcctgtcctggtgcacgtggtggcgccggcgaaaacggagcgtttccccatcgacctggtggcggtgctggacgtgagcggcagcatgacgaaggcgacgtcgatgcacgggtggacgaggctggacctggttaagggcgccatgaagatggtcaccaacaagctcggcgccggtgaccgcctcgccatcgtgccgttcaacggcaaggtcgtcgccgccggcgcgacgcggctgatggagatgaccacgaaaggccgcgcggatgccaatgcgaaggtgaaccagctcaaggccggtggcgacaccaagttcctgccagccctgaagcatgcctcgggcctcctggacagccgtcccgccggcgacaagcagtaccggccaggcttcatcttcctgctctccgacggccaggacaacggcgtccttgacgacaagctgggcggcgtccggtacccagcacacactttcggcatgtgccagagccggtgcaaccccaagtcgatggtgcacattgccaccgccaccaaaagggagctaccaccccatcgacgacaaactctccaacgtcgcgcaagcgcttgccgtcttcctcagcggaatcacgtccgccgtcgccgtcaacgcgcgcgtccaactgcacgtcgccgacaactccggcgtgctcatcaacaagatcgactccggagcctacgacaagacgatcgagagcgggaacgggaaggcgtcgtccaagggcaccatcaacgtcggcgtcttgtccgctgaggaggacaagaagttcatcgtctacctcgatgtgccaaagctggagaacgctcaggcgaagccgccgcagctgctgctaacggtggccggtgagtatagcacaccggctggcggacggaaggtggagaatatggaggagtccagcgtacaagtcgagaggcctgcgcctgcgggcggcgcaacgaaaaccggcgatcatctcgtgacgtggtcggaggcggtcatggtggagatggtgagggtcaaggtggtcagcatcgtgaaggaggtgttgaagaagcacgagcacgacgaggagccggaccagaagcagatggccaaggatctcatggaggaatgggacaagttcatcaaggagaccccagccgggaaggacgcagcggagcgcctcaaggagaagcttcccaagcatcacgtcgaggatatgcgcaggagcctgaccaaggaggagcacgacggcgtgctgtacctctactcgtggctggcgagccaccagacgcagcaggccaccaccatggcgtcgtcgccgccggccggcgtcagcggatggttccaccagcagtacatgaagcaggtggccgtcgacgcggagttcgacgcgtgcggcatccagcccggggtagagacgaccgagatcgacgcgacggcggactgcggctgcgtcgtgggccttcaggacaggatcgaccgccggctggagctctggtccaacctcaagcgcgaggcgccgctcatgttccagccgtccgaggacgccgagtcgcaccacctcaccgccgttttccgcgaggcgtcgctcgatgccatcaaccgtgccatgcaccacgacatgtacctggtacgtacgattacacgtacccaccttactagctactcctccgtctcaaaatatatgaacatatgaccgaacaaggacatttcctagaatctatactcctccgtctcaaaatatataaacctatgactgaacaagacatttcctagaatatgtactccatcatctcaaaatataagaacctataaccgaatatggcattccctataatctagacagatagatggcctatctaaatttgtagtatttggaaatgtttcatctagttatatatatgtttctatagaaaaaatgcccgtgcgttgcaacgggtaaaattatttttgatcgtatacatttactctttttgggccaaaagattatttcttcgttccatttatgttccagcccagcccgctacctctctctacttggcctgagtctctttgacctagctttgacctagcccagaagtgaagctataggccatcctccccatcaaatcgtatcgaacctttctcgatctcccattaaatcgtatcgaatctttatcgatctcccctaattggttaagggtttctgatgcacttgatctactcttttgtttttatcaaaatctaagcgaatctataaaactcaagatataaacgctgacttttaaatagagattagatccgataaactaaagcggaattgaaaggaaaaattatggggaaaataataagggagtagtggggaatcgatttttacgaccaattgaaggaaggaatgcggagaaaaaggaaaaaaaaaagagaacaggaaaaggaggaaaaaacggcgggtgaaaaaaaggaaaaaagaagcgaaggcaaaaaaaaatggaggaacggtaaaaacggaaaaaaaaaggcgaaaataacaaaaaaaaaagtgacggacgaaaaaaaatacaaaaaccttacgtatttttataataggtatagatatagatatagattttccttattttacggaagacggaaactcttttgtcgcaccttttttgggatcgggcagaacaaaatttttgcccttttctcgcgcttgattttttttcatacagtaatttttctttcctttttttcaacggaatttccaagtgagtcggaagttttgtttttaatgggaatcggaccttttttttcgtttttttctcagcgttttatttttcacggacgacggaagcaggttttactttttaagtagtagtagatatcctgagacggaagtagtaagtagcgagttactctcctcatcccaaaataaataacaccgtggaatatttgaactcattttattatatacgtgcaggccgtcgtgcatgcgagcaacctgaggcgatgctactccggcgccgggaagcagcagctgcatggatacggctcgtcggagctgcctgcacatgatgatgaagcgctgccggcgacgcgtgctgttgaaaaacacagcgagtgaatgatcgagccaccgtgcaagctatggcgtaacggtggacgatcgattgaataagccggcgacggcgaggtttatcaattcctccactttgatttcagtattgttatggggagaaaagagtcaagaaaaataataagatagacgaccacctcgtcccccatgggacgagtgccagtctgcttgtgcgcttttccttacgcaagtgtgctcgtgtctttgtgatcaatcaatcaagtcaaatttatttcgtcaatcgcgcatgtattcgtcattctggctaattgcattgtgtgtaacataactcttttcttctaatacagtgacgtgcaatccttttgcgcgttcgcgaaaaaaaaaacgcatgtattcgtcgtcagtttgctcaagtttaatgaacgaatgtttaataattcgaatctttatccgtactgctcaccgtattataatgttatcaatatttgatatttgtattactccctacatccaattttaagcgtagccatgagttttcttatccaactttgatcgttcatcttttttaatctttttatgattagtatttttattgttactagaaaaaatgcccatacgttgcaccggataacaactttttttaaactgagcaatgaattgaaacattatggtcgctatgtattatgattaaaaaagttaataaaaattattctttggttttaggcctaaagcccattctttctttcttggttttcctatgctcgcacggccctccgtcgtcttcaacctctacctagtcccgtgcctgtataccagagctgatcctccccacaagatcccttctttccatttttttctctgatcgaattcgcaaaatttatcaattgaaggagaaaatacatggggagaccgatcgaagtgcaggcagcactagggtttggtccggcgatgatgagataaaaaccggatggaaaaaccgggtttggtccggcgacgatgagataaaaaaccagcgaaaaacaaaccaaataaaaaaaggggggaaaaaccagcgaaaaaacaaaccaaataaaaaaaggggggaaaaaggaaatcggataaaaaaagtagcgaaaaacagaaaataaaaatgaatcataaaataaaaagagagacggagcaaaagattaaccggaagccttgcgtattttttaattaggtatagaattgttttgatgattgggctaccactttagcatacctggagcaagttgaaccgccacatcaaaaaaaatattgttttcaaacactgaaggagtccatttgaattgattgttgaaattgggggagatgttatattcggttgtgcggttaagggatgcgatttgatcaagggcaagagaggagggataataaatatacttacgattttgctatatctcactcgaaagattttttcttatctctcactcgattttctcacttaaatttatagtgcattttcttgtaatctacagtgtaatttatgaaacttacactataacttttgtaagttacactgtaattttttaatcttcacatgtaaattttaaattttgtattggatttggtctttttcttgaggatatggtaatttagtgtccattatggtgtttcttaattgcttttttccttttattatatctatcggattttaatccaaagattaaaaatctgtgtgatacgatcataaaaatctttcgaaagatatataggtactcccatatacttatgaagatttgggacatttctggtccatctttcttttttttttcacatgccagcccacttctcctctcctgggccactcttctttctcctcctcggcccaacatatgtctggcccatcaagctagctcaggttgcctttctccctttctctaactggcgcgtcgggcccgctggcagcgtcatcgtcttcctctagatgggatagaaatcccgttgccgcacagggtcgaagtcgatgcccttctcaaatataatttctccactgcttctccttccaaattggatgcgaaaatggaatcccctcaatctcctctccgttttcgctcaaccaattttggttaagcccaacgaaatcccgcggattttgagtcgtttctatccttcgcacggacaatatcaatataaatccctttttatccttcgcgcagagaacgtcgatatgaatcggattagtgaatccgacgacggacgaaaaacccataccggaagccttacatattttttaagtaggtatagattagataataaaacatgaataatactttctgcgtgacttatatttttaatttttttttaaaaaaaattatcgaataagatggacgattaatggttgctctgaaaataggatggagggagtatttgtttagtacatttttattaaactttactgaaggttataggtaaatttatttcaaaaatttgtgagtataaaataattttatttgattcatattttctaaaagaatattgttgattaaaaatacatataaaatatatcttaatatttaatatattaatttattttatatgtatttttaaccaacaatattcttttaggaagtagtatgaatcaaataaaattaatatattttttgcaaggataaaataattttatttatatgaatgaaataaaattatttccagcctaccatctattgtttctagatacacacgttcttgtaattcgatacccttaaaatagtgtaaggtgaggtatctttatgcttgtggatttatatgtaacaataaccaataccaactatatgatcaactaaaaaatccaggcatgggtaatatttcacctcaaaactcgtgcagatcaatgttgactcaggcacatgtttatctgaaaccaatttacactatttttatgtcatgtaaagctgtctgcctctagattatatacttacatatttatatatttatatggagacatataatatgctagctaagtcaaagataatatatatagagaggttggagaaagctcgctgcttgtttaagagagaaattaacatgcgttggactggatatcaagcccaatcaaccagcgctccgaatcttcgatgctaggagggcgagccgccttcaacacttacgtgatcacttctccagcccaactaaattgggatgttaggagggatcagagagcttaatttgcagaggcagcaagcacatccatgggatgctggtgatcatgcatgcatgagtagatcatatggcatcatgcgttcggctacaaaattgtgtgatcatgcatacaggcatttacaagaccaaccagcacttctcagcccaactaaattttggcgcccacacacttgccatatgggcattgtcgtcgccgaagctggtgatgcgcaatgctagaccgagatcacgatcgagaatcaggagaccaagattaacgagtagggaagtttaacaagatctggtgatttgtctttaattagcaattttttttcgtccggtatatctcatgaatagaactaattatcaaacattttacctttgtcgttaatagtagtcacttttatctaatctatctatatattattaagaaccttgaaatgagacatcacatttatcgtatattagaaattcccatattaataggagaaaaaggaaacaaaaatttaccattaaatcatgttgggcatggattataattggattataatggcatagattaattggtatagttgtatgtaaagtataattcattactattataaaaattgaagatgtttttgccggtactttagtacgtcatccgtatataagtcagtttttaatttcgttcacttttggaaatacatattcatatttgagtcgatttttaaattcgttcacttttggaactacagagggagtcgtacaagaaatctctttaaaaaactagcatgctaacttgagacgattggattcctaattgcagcccatgattttctaaaacacatgtatatttaagcgaattcccgtagtgaatttaatcttaactaaaccatataacaataataagattaaaataactttcacccgttgcaacacatgagcattttttctagtatatctataaatatagaagttttagttgtgtatgaaatctaagagttgtatataaaatttggaccttacaaatatgaaaactaagagttatatatgaaatccaaatatacttctatatataaaggttcctatacaaataactataatttaaacatgaaatcggatgaaatacgtatgagtataattggtaaattaataacagtcgaacaaacatgagtacggacggatgaagattgcagataactcaggaacatcatccaaatcttatcaagtattaaatatatccaaatcttatccaatgttaaatatattttatagggttaaaatgggatgatccattagggatagaattaatgttaaatgattttgctgcagaagataccgattatgttgcagccgcatatctattcctggttagaggtataacaaaattgataggtaaaatcagataaggccatttaaatttgtttcaccccaataactcacttctaaccatacatctgctagcatgatatatggaaagttattttcaatggaaaattatgtctgtgaggttgttctcagattttgcagtgttgggtgaaaagatagaacatcgaaagaaagtaactaatacacacgatcgatccatctcaaaaagaaaacaagaaatttttttaaaaaagcatggaccattcatgtttctatactggtcagacatgcacaatacgtgtgttcctatgcccgtgtaattattttgcattcaaatatcagaaatagagtttgatcattttacagtcttttaactgaacgcccaatactgcaaggcttttaactgaacgctcaatgcaaactatttgattgagctccatttggcaaatgtccttacacggccaacaaggcaacaactgatatgcatacataggcccaacaattcatcttgtccctgattgagttattcatgcatgctaggtaagtcctatgttactttcagtaggaataagttcactttgactcccttaaaagtgacccgaatctaatccgtgaccctcaaccccaaaaccggataggataactccccgaactattaaaaccaatgcaatttgactccctcggcggttttggagagcggtttcgctgacatgtcgtctacgtggcagtgtgttgacgaaaaaatcgaacacaccggcctgggagatctgcttaactcctgtgcaggtccaaagattgatgagatgcgggagtgccagtcagtttgatcctgcaactgacaagatatacaaacagcaaatcaatgagccgatcggctgacaagccgatggagtagttccagccgatgccgataccagccgatagtgatagagtttggagctatcggctatatgtccaatgtagatgatgatataaaggcaatcggctgatgataattaatatgattaaacaatataatccagtagaaaccagtcggctaataatggtatgatagaaaaagcactgatccaaaggttaaagcatacatcggccgtaggtccgatgtcataaaatccacaagattagatcaacagtaaaacctttgttgcgatcggctaaatccaatatgtatgtatatgcaatccttacaagccgatgcaacgtccagataactcatcggctgaaaccccgatgaaacccttattggcagtcaaaaagcagactagagattatggttctaagtacgagttagtagatcaaactcaactaatgcagcactaagtatgaaaagaaacacaatatctagataatcaagccgttgactgagttttcagggtggtagatatctaagctaatctaatctagcaaggcgatttagccgataccggcagaaaccctaaaacaagaagcagccgatagagctaaattgatatgctaagactagattaacagagacatatgataaataggtaggcaagtatatcatccaaaccagagcaatccaagaagtcgaatgtcctgatgcagccttgaacgacgccgacgtagacgatataattgcctgggccgacggaacattggacttaccccttagccggagatcgaacaccgatgcagccccgcgtcaggtgccaagttccgccggaacgtagaaacaaaagtaaaagtaaaaagggtggtgatgcgccgaattgtattgatcgtagagatagattacatagaccccaagtgtacatatttatacccatgggttgatacaagtccttgtcggacaagaaagaaattttcctaaagataaaaggaaaagataaagtccttataggacactaaacacacttttctaaagataaaaggtaactaacaaactattcctaattaatagataaactgccatgccgcatcctctttaaactcggtcacttagggataagcttcctttagtagatttatttccttaaccgaatatagcaggaatccgactattggcgactagataactcccatcggctgattccgagatactgcagccgataatgattctaagccgatgacgtctttgccgattaccactgttaacacagtgttgacccggtctgctgttgacgtggcgcttaggtggcattagaattaaaaatatacatgtgggacccatttgtcattcacacaaaggaaaaatttgtggggcccactgacatgtgggtctatcccttcttcctcctcgctctctctccctcctatctctctttcccccccttccgcagttcggcgagcaggggccagtacagcggcggagtggtgtgctgcgggcgggagggcggcggagtggcgggtggcgggcggcgggcgggagggcagcggcgttggggagacgagtcggacctcgagggagccgtaggcacgcgcggcggcgacctaggacttgcccgttggcccgcttattgtggacttctgcccttggacgatggcgccgccccacgcttgcgggagctgcatccggacgacgacgggaaggagcagacgccagcaagccatgctctaggggctctaggaggcagccgcaagatggagctcggcgagggggctttagggcagcggcgccggcagtgatggggatggctctctgtctctctcgtcttctcc

SEQ ID NO: 6248 - DNA, 2696 bp, Oryza sativa
caagacaggacagaatgtctgcttggaggaagctgcaacaagctgcagttcaaaagaaaacacgtccatttttcagggcagtggataagcatggtcggatgtatgcaggtatgtattgtttctttttgaatgattctgatgatctgatcagcaggtaaattggcaggatcaataagtagtggcttgttttactaaaaacaacttgattaggattagcaacagacattgacttcttatgtcaatagatactaccatcaatggagctccttagaattaagattagtgttgcttctcgttttgcttctttttattaataatttctgatttaatgcccatctcttctgagttaaggtattttttgaactaccacaaggccttagaaaactatatacaaaaatataagttcaataagatccatgttttcctgcttgtctaagcattggtgtctccttttgtcttacaggtggtctagatcggcctattcagaggcccttcatattgcgggattggagatttggtcactataaaatggaaggcttgcaggatcctttgagttgctttataagatgcatttttgcaccattttcacgccaaaagaagattcactacatagaagatgatgttatttcttattctattaactgatgccctgctactatagttgctactttaagttcagtttcttatgttgcaaccaaaaacacatccatgttttggtgagtcaagagcaacaatgcattttgcttttcgattctttgtgcatgttacctatttagaacatctagtttggaatcttttgtaggttattacttttttcttgatgaagtaaataaaaagagtcttggaaatggaaagttcaacttcttcaggtaattactacatgggtttactatttgtataatagtacacatttagattccatacacttattttattctcatctcctttttttggtttaagatgtgtttgatctaatgtcatgtagattgtattctaaatatcttctaagccaaaatatcttttgtggatctacttttgctggctcatagctatgtcctgcacttcttaattgaagatgcttcctgggaagtgtttgggtgaacagatgggcacctgcctaccttatttagatctctgaccctccaggctacatccagatctgtgcgtgtagacacgttcaagtagtgagttaatggttcctattgtttcctcatatagatttttttacttttctattgtaaaaaaaaacacttttcacccactgtatataggaaatgaataaattcttttcatttatagtgtaagattcagtcttaattcatggagctgaggcataagtagtagaaggaaatgaataagatttgcaaattgcagcagaggaattcaagggttttgttatcccataacttgtgtacgtgagttttcatattaaacagtggtactacatttttgacatgcaaagcctagctgcctaagccatcagatgcatttggagggatcattgcagatgtatcctcctgcatgacctcatggaatcatgcacgtttcacatttccaaatttcacacagccagattttattggaaaaattactggtttgttaactggccttccaaacctttttttatgggcatggcatgcattttatttactaggatgtggcatgtattctttagtggaactagccactaacttctttattcatgctgcattacaatctaaaaagaactaaactttatatgcacacagccctatattcataatctggaatgtggtattttttatccacaaccccgtaatcactaaccacacctctcctgtacagtttttctaatatatataattaaccataggggcctccctactgttcttcattcaaagaaactggtgtcatgatgtcggtcttttgactagggatcttaactagggcgaatatcaaaagaccatacatctttagtacaattgtcatgcaaatttattctcatgtggtgtcatttattttcagtgaaacaaaaacagggggaaaagaaagtatctcacaggagaaacaagggagcatataatcatatgattttttatattatggcgcatattgcgttacatgagctatttagtacagaacaggaagttgtttagttgccttacagggctattgatgccattgcaatcatacgtaagcagtatatatttaggaaagacttttgtgttatcgccttttgaagtacataagcaaatagtagatcatcagtgttcattatttcagtattataggattgcagagctggtaatgatctgtggaccaagggatggcagaatgatcaattgttcttgataacttgatgagctctctccattagtaccactggttttggtatggcacaggtaatcttctcctccttctctggtatctggaaagctgatgcagggaaggttttcgtaatcccagcaatgctcttgcagatgagtttcccagtcttttgttcatcaagggcaatctcctctactggtacccacaccatgagctccctagtcttgatccctttgactttcttgatcctccccttctctgcaaaagcagtgatctcagtgccataagataccaaccttcctaagctttggaagacatggtctatcctcttcttttgcttgagccacacaaatccagtttcctcaacatagccacactccattatgtcc

SEQ ID NO: 6249 - DNA, 18794 bp, Oryza sativa
cctctttcgatccctgaaggggtttttgccttctagatgtctaggggttcaaagaggaccagaggagatatatatgtgtttggatatgttgatatatgagctgatatatgccttactatatatatactccagaattgcactgaggattacatatccaattcagacatgcaaaccttaccagttgcaatattgtaaattacatgtccaattttgtagtttcatcttcctcatcataaaaaaattatgttgtgtcatgtgcatctactttgttttccccatgtcaactagattatttctccaacacatgtggaacagtgtggaaaatacatcctcatcaacagtaataagcacagtgctaacaaattaagaaaaaagtcttttcatgtgttctccaaaaccctaatcacacttgagaaaagagagctgcaacaagaattgatagattgtacgatccatcgccgtcaacaaatgtggaacgaataaaaaatttgctttgggagctcatcacagctaaagtctccagaacaaaaaccgtacatgacattattgcagcacttgatcatatcaaacgtatggaccagaaaggctgcaggcacatgtatgtcatgtgtaagctttttcaaactgagtactgtatctaattaacagcagaaactgaaaggaaatcctatgaattcctcaaagataatatcaattttttaaacgaaagtcagctttatatagactatacaggggttaggaagaaagtctatattcagtacctcgactattcatatagtttgatttccattgctcaacaatattggataaaactcacttgtccattattaaaactatgaaaatgataacttggctaggcttatacgtggctttatgttaatatatatgcttctgggtggcgaaccaaaagaagaagacccattaggttatccatgtagtactatgattctagtcttctaggcatattctccccgcctcaatttttttctgtttaaaaggaaagaggacttgagatgcagagaatgtagcagatgagattgctaagaaaatgatgatgaggcaagccaccttacccaaaactttttacaaaaaagggggatgtcgaagagatgaaaacccaagttctctcctacagctgctcgtggcaccaaaagcctcagggatcgtgttgcgtgacgctaaacaggactagctgtgagcgaggccaaggacctaaccctcaatttaggcgaaccacgccgtgtactcgggacactagctcgaagcaggccttgagcacgctatattaatatggtaggacgtggcacgtctctccctcgtgtcgcacacctgatcttgcatttaatgcgaaggatgcaaatccgatggccacgcgcatggagaggagtggatgacaagacgacgcatgctgaccgtggaacaagcatcatcacccctaaaaagttgggagcgtgggttgtcagctgacataggtccttaacccggtgtactcgttgttagaggccgacgagtgggccaggctagcgccacccttggtttcgtcaccaactcctaggccacgcatcgagaccaggtgcaatgggctagcttgtagttggccacccatcatcgagcgatgggactagcctttcctaactcatgtgtacatgaagcccacttgtaagcgactgcccaatgtggtgcccctcgggctataaggggattcacaccttgaaaacccattaaggatagaaaccctcgcgagctttagagaaagaaacaatgcactttatgcatattgcagtaaataatccagttaagaacttaataggagtaggcttcactgctccctgctattggagctcgggctttgactagggaacattaattatctaagaattttttttttcagaagatcagtgcatttattgagaagaagacaaccattttatataaagcacaatattttattttgagacaatattcctttgactaagaatatctataaaaataagatgttttaaatgaaaatagtcatatattatgatagttgtttaataataaatctagtaacatcaattttatatgattgattttttttatttttatactatttcttgtcaaagttaaaaatatttgacttgacaatattataaaaatacttatattttgagctgaatagaatatttggctaacggggatatgaccatcattcgcaagcagcttacgatataaaatggagagagcatatatatatatatatatatttggtagtgatcattattctcatttggaaagtagtgtgtgaatatttaatactagcctccaagttggtgcagtgacagctagctagcaaatggtgtgaaataaacccacggctgcagttcatgcaccggcggccgccgccgccggcgtgcgagagatcgagccaggcggtgggccccaccgtctcgttgttaagtagctatctcgcacgtgcccgaaattcgatccaaagccgatcgagaagttgatcaagcaagcgaagctggcgattgaccgatcggatcgagtcgtcgtggtcctctggtcggcgacacgtcagctagccacgtcaccggtagtcacgcgcctatcacgggggatgtgggccccacccgctctgccgtccacgtcagcttcagctaccgtcaccggccgttagataactgtccgccgtctgttaatgcgtgattagctgcgttataggttagtgtacactacaccaacagtgtgcgttgttccatctgaacggttgctacggccggctacttggattttggatagtgctattgctataagcctacaatatatagtatcaaatagtatataacacgatgcatgatatatgcatttaaatctcaccaaataatgctataatagtatcgaattaatatatatatgtgtacatatagtagttgcagaaacaacaaatttctatataatagcatctccatccgataatgaccgcattcagttgttcacaacagtgataataaaactaatgattactctggggactagctagtcggagtcgacgttgtgcacgcacgcacgtttagttaattaatcggtcattacgtcacaagccaacaatagaacttactactccgtaaatatgaaaaattgtaatacttcccttttcataaatataaaaaattttggacttctctattcaccctaaaatgtaaggaaattttgagtgctacatttttctaatctatcttggttgttgcatcgctaaacttagataattttcaatcaagcgagctcttaaacatcaaagtagtttttccgcaacattaaactttggcaagcaatccggaatcaaatgtgttaattacttgtgaacatagagagcaatattactacatccgtcttaaaatatactccctccgtttctaaatatttgatgccattgattttttttaaatatgtttgaccgttcgtcttattaaaaataaataaataattattaattttttcctatcatttgattcattgttaattatactttaatgtatacatatagttttacatatttaaaaaaattgaataagacgaacggttaaatatgtgctaaacagtcaacgatgttaaatactactccctccgtattttaatatatgataccgttgactttttgataaacgtttgacctttcgtcttattcaaaaaatttatgtaaatataatttattttattgtaacttgatttatcaacaaatgttcttacataagtatttttatatttgcataaaaattttaaataagacgagtggtcaaacgttggttaaaaagtcaacggcgttatacattaaaattaaaatacggagggagaggaagtataataattttagatatgcacgtgcaggtatatagattttagtacgagaggaatttattatggatgatgatgaaaaagaggggaaaagtagcatggtattacgtggcggtcggcgagcggcgacgttgggccagggccagggcggcgatcgactgactgactggtcgatactcatggttgtgtcgtggtcgtaacttgcgtacaaaagtctgaccgtttacctaagcagctggcactgatggcgccacactgctacactgttatttttctttctttctttctttctttctttctttctttcccacagtttattaggaggagctgcgtaccactggcactgcactatgcatatatactttactaggatatatgtactgctcactcttccgtctcttaatatatatgtattttttatgacttaagatttataccataattaactaaaagaatatcggtgcgtcacaacatgtaaagacatttttttcaatggtacaataactgttaggagctaagaaaaaaattgaaacattacgatcactacacactataattgaaaaaacttaattataagcattgcttggttttgggccgaaagtctgttcattcatttctttttaactaggtgataccccgcgcattgctgcgggaattttaaaaaaatggttacagaaagaataatagtggtacagttatagtatatcacctctaaagcaaataataatactgaaagcttgacctatcaagcttagtgatcaaacgataacattacgatgaagtatcagaaaaatatttaggcagtacatgcaaatcttgtcatgcatcacttttacctaactcaacagatgctaatctacatacatatcatatggaactattgacttacttttcctgtagaatagtacatatatgttcaacgaaaatcatgttaaactcttacgatgattgcattgatatcaaaaggaaagactggttaatgaaaaatgacaaatggtctgtgccaagactgctaaagtaaacaaaattgtctgtcaagcaacctgtaagtgacaaacacgatgagaaaattatatagtgcatttagaaattttactattgctcacacataatttcattaatatatctcggaacagatttgttcaacctcaaagagtgcttgttgtgaatacggttgatatacctattgtaacggagaggctttactgctagtaaaatttcctcgtaaaagaatgagtaacttattgaataattaaagaagactaaactactttttttagagaggaggccatacggcccggatttttttgaaagccacacacggcagagcagaagactaaactattctagaaaataaattagtgaattgaacattgaacaccaaaccgaccgtttcttgtaatgtgtgcgaagaaacagaaaggtaagggagtgattttaccatagtttgcaatagatcttatactgctaaaaaatacaatgtcaattcaaagagggaaaaagaccaatatatttgctatcttcagtggcgagaaaaaaaatcaagtatagacattagagcacacacataaggcgatagaaaaaccaagctcctgtattctttaaaaaaaacacaaaataaattcagttgatattgtagtagtatataagataaaggaaggagttacctgggacaacgattggatcaacgatgacatggcaaatcaatgaaaataacagtggcgaggtgatccagaaatcaggaaagcacaacacatctgtatgttaagaactgcaactgatgaattgcattagcggataatcatgccgatgaaatcatgaaatccattgacaatatgaaatctcgcttttcatagatatgccaatggtgtgaactgtgtgaacaaaaatataaatgggcatatggccacaatagctgaatcaacaggattgaagactcaggcaaaaaaaactactcaaataaatcgacaatattcaaaaagagatgatggaggtcgcaggctcgtagccgaacaggtgcaaagaaggcgagatgctgcacgacacactggcggaaggggatcaggtgcactcgtattaacaaagagaaagaaacggctgagcccctgctggaggaagatgatccgtcggcggcgctgcttcatattctcatgagtcagtgtctgttggggttcaggggcagcggtcgcctgattttgacagtttctaatgtaaatgcttgtgattaagtgaggcgaatgagaagtgattaccatctctgctggtggttgaggatgagggaggggccatttgatttcaccatggatggcgtcagggctcccgacgtttctccccatcggcgcatcgctacatggatcgctccagtcgtttctcccgcgactgaggcgaacgaatgccgcaccactctccccattggcgcatcgctgcatggatcgctcccgatgtttctcccgcgacccaggcgaacggatgccgcaccacacctcgccgtgcactgtccctaccaactcctgcgcgcgaccgtgcgcgccgcaccaggcggttcgccgcactacgccgtcgccgctccgattcaggaagtcgggctcgggaggatgagagagacacatcgaaccctaaatcactcattgggccgcgggctgcgatacactgatatgggtctccttcgctgcctcacgcctgtgaagtccctcgcttcctcacgtctgcgaagtcagccttttcatgaaaacgactgagatgcgatgtaatcatccgatccaacggctgccaattaatgatgacgtggaacactgaggtttgagatttaggagattaattgcacttagtgggggataactttataggaagaagggattagtcccagaacacatgcctcttatctccattcgctcgtcctgcctcccttcggcccaatcgacaagtgaattcgtaggcctagctagcacatgctcccttctctcgttgccaggccagaaccacgcgctacattagcgtcttcaatctccaaaggatagtcctgtgctcctatcctccccatcaaatataatcgaatcttcctcatatctcgaaattggttgagggttctcctctttcagtccccccaaaccggagtgaatctgcattcaatttcgcaaaactctaggataaaaaggatcaggtaagctattggttggtcattgttggcgaccgttaaatagagattaaggctgacgaattaaagccaaattaaaaggaaaaatcatgaggaaaatgatgagggaggagtggggaatcgatttttaaaagcacatagagggcagaccgacgtgacgacggcgctagtgttccaccaggagagaagagcggggcatcatttgaaggcacgcactgcgaagcaggccgagacgagtgatggctaggccgagctctaacgaactgactgagagacgacgacggacagaaaaaagagctacagaagccttacatatttttaattaggtatggatataaatataaacatttttaggcgtgtaatgattctaatgcatagaaatataagcatttttcaacaatcagaagctcataaagataagaaattcaaaattctgaatttctaccagttacgcgattggaagaaatatttttattcatctttaatctttgttcaacaatctagaaatacttattttagaacgacagggggagtcgtttttgttctgtgtatgatatttatgcttttctacacgttcctgaaaggatggaccatagttccagcgacttaaattcattcggcccatcaaactgcgacccaaatacggcctactaaactctgcacaaaaggccttagaatcgagcccagataattaattaagcctatcaccgaagcaaattagaattttattaatttattttttaaaaaaagatttacactcctcccagacaatcttttaaaaaataaatataaataaatttcagcaaattaaggtcgagagatcacctctcactagttagcaagtcctacctatgcggccatccaagcacaagcttcttccatccaatcaaaaacaaaaacaagatggatggtcatcttccttccatgcatgggagcatccaaattaatctaccaagaacaccctataatatatatgcatcgccatgatcgaagcgaggaagaagaagaagaagaagctgcagttgcagcagcagcagcagcaactagtaactaataaagtgatgacgatggatcgtcccaacgtcgccgtggccgcggtggggctgctagtggcggcggtggcggcgacgctgccggcgccgtcgtgggggcagcagcagccagccaacaagctcatcaccagcacctccggctccggcaaagggttgtccaagtggctggcgatgaaccaggaggagtacgtggagaagaaggcgctgcacaccatggccaccgcggaggagctcggcgggaagaagctggacgcgaacctgacggcggcggaggaggccaaggtgacgtgggtgatcgaccccaaggggacgccgggcgacaccaccttcaccaccatcacggcggcgctggagaaggtccccgaggggaacaagaagcgcgtcatcctcgacctcaagcccggcgccgagttccgggagaagatcttcctcaacctcagcaagcccttcatcaccttcaagtccgaccccaagaacccggcggtgatcgcctggagcgacacggcggcgaccaggggcaaggacggcaagcccgtcggcaccgtggggagcaccaccgtcgccatcgagtccgactacttcgtggcgcatggcgtcgtgttcaagaacgacgcgccgatggccaagcccggcgccgagggcggccaggcggtggcgctccgcctcttcggcaccaaggcggccatctacaactgcaccatcgacggcggccaggacacgctgtacgaccacaagggcctccactacatcaaggattgcctcatcatgggcagcgtcgacttcatcttcgggttcgggagatcgtactacgagggctgcaccatcgtctccgtcaccaaggaggtgtccgtgctgacggcgcagcagaggagcaagaccatcgagggcgccctcgagagcggcttctccttcaagaactgcagcatcaagggagaagggcagatctacctggggcgagcatggggggaatcgtcgcgggtggtgtacgcctacaccgacatgtccaaggaggtggtgcccgtgggttgggacggctggaacatcgccaagccggagagcagcgggatctactacggcgagttcaagtgcaccggccccggctccgacgccaagaagagggtgggttgggcgctcgacctcaccgaggagcaggccaagcccttcatcggcacgcactacatctacggcgactcctggctcatcccaccagagtaattaattactacttttgtttttacatcgattaattaattaacactctctctttttcatattatgaatcgctttgatttcttttgcatttttttcaagtttaaccaaattttattggaaaacatatcaacacaattttttaagaaaagaacaaacatattataaaaatatattcaactttacatttagttaaactattttttaaaaatgctgctaaattttttgaaaaaaaattgatcaaatataaataagtttgacaaaaaaaatcaaaacaaagttacattttatatgaaatggaaggtgtaatcaattaattatgctagtacaaattaatatattctaattgttggtgtaacatcaaatagcgggacatcaacgtcatctagctcagcttcaacgtcgagcaactcaaccgcggaagcaccgacggcgagtagtaactcaactgcatcggctaataaaaaggaaagcaattcaactgcagaagcgccgacggcgactagctactcaactgcgtcagcgacgacgagtaattccactgcgtcagcgaaggcgactaattactcgagttcaagtccaccggcaaaaggcaagtagttaatacaagtgcagcggcgacgacggcgccgacgcgatgaatcgcgttcattggggccaaccaattctgttttggaagcccgtttaattgttcattctttgtgtcaatttgggccggattaatcaatcggccggctacttagatgtttcacgtacgtgtaacagttgtattttcttcccatttcgtttgggtcttttatcagtgtacgcatcttcaaaactatagtgaattttacacatgttttccttttgaaaatgactcttgaagacttgtgctctatacttatgttgcaattaactttcgggaacgaaaacgatcaacagaataggcatcttaccgtgattaaaacgggggtaacaagtacatcccacttgttccatggctaataagtcgtgcaaaggtaaggagcttattaactggttagatttcttgtgatggaaccaatccacccgagttcaatgtcaatacaagtaccgaaaagaacgtgtttgcctattgcaatatcgtgtacgtggggataagattgctcactaggtaggcacacagttattctttgcacctctgtctcattaagtttctctagatttcagcattcaaactgtgatttaaacttttaagcacatttgctagaagcaacattgaagccttgatggtgtggtacgtacatttgtttgcagaagacgataatttcttatttgggggggtgtttggacgatccaggggctaaactttaatccctgtcatatcggatgaatttggaatattaaacaaagactacttataaaactaattacataaataagagctaattcacgtgataaatttttttaagcctaattaatccataattagcgtatgtttactgtagcatcacgtaggctaatcatggattaattagtctcaatagattcgtctcgcgaattagtccagggttatagaatgggttttatcaataatctacgtttaatatttataattagtgtccaaacatccaatgtgataaggattaaaaagttttagttctatccaaacagggcctaggctagcaacagcgcctgcgcataagttgagaacatgctagaagaagctcggttccagtttgcaatgggcaaaagaaaaaaaatattataatatatcataacaaaatattttttatcaaatatgtacttaattgtttgcttattttaagatctgttaccacttgtttaaataaaatgttggactattaattccataatattcgaaaataaaaagaagacaaattataaaaactgcaagagcaatagtgggtggcatattccccaccaaaggcttttaaagtagttagattgttttcctttcattcagttactgtattaattgtgtgtatatactccaatgtacgatagtataatttagtgatcagtagtacactacaagtacatagtttttttttctgaggattttatgttcataatatatagtactttctgtgtatgatatttatgcattttgacacgttccagaaaaggctggatcataatagctaattttagccccacaaatacactcttacttgctccatatttcagaatttaagatgttttggttttgtcagaaatcaaatttattcaagtttgatcaggtttataaaataatgtattccatattcatttctcgttggcatgttcgaaattacttcaatgagatgttttctttgtctaccttttatcaatgcagtaatattattctcaccagaaaaatataatgtttgctttaagaaaagttattaggatgtaataattagtgtagcaatataatttgccgcatattctattttagtgcatgtgagatttgttacagcaacaaagtagattgaaatgggaaacggatcgagtagtaacatatagaacgccaaattaattttattaaatctagctaccatgaaatgtatttttataataggttttcttttttacaaatattgctatgttttttattaaattaacttggttaaacatcttacattagggaatatagagtaccagcgaccaaaattgggcgcatcaaatgaactgcgacccaaaatgcaacctctaaatcctgcacaaaaggccttaaaatcgagccaagatatcatcgaagcaaattaaggtcgagagatcgccggtcaccaaattagcaagaagtgcttgctacctatccggccatccaagcacgaacattttccccaaaaatggatggccagccatgtcccttccatccatggaagttccaaattaatccgccaagatcgatcaccctatatacgcatcgcgccatgatgggcagggacagaacgaattagctgcatactgcagcaactaataaacgatggatcgtcccaacctcgccgtggccgtggtggggctactggcggtggtggcggcgacgctgccggcgccgtcatggcagttcttcgacctattcctccccgccggccccagccaccgctcctccggcggagggtttggcaagtgggtgctgatgaaccacgaggagtacgtcgagaagaagtcgctgtacgccatgaaggccgccggcgacatcggcgggaagaccatcgacgcgagcctctcggcggcggaggaggccaaggtgacgtgggtggttgaccccaaggggacgccgggcgacaccaccttcaccaccatcgcggcggcgctcgagaaggtccccgaggggaacaccaagcgcgtcatcctcgacctcaagcccggcgccgagttccgggagaagctcctcctcaacatcactaagccctacatcaccttcaagtccgaccctgccaacccggcggtgatcgcctggaacgacatggctgccaccaggggcaaggacggcaagcccgtcggcaccgtcgggagcaccaccgtcgccgtcgagtccgactacttcatggcctacggcgtcgtcttcaagaacgacgcgccgctggccaagccgggtgccgagggtggccaggcggtggcgctccgcctgttcggcaccaaggcagccatctacaactgcaccatcgacggcgggcaggacaccctatacgatcacaagggactccactacatcaaggatagcctcatcatgggcagcgtcgacttcatctttggattcgggagatcactctacgagggctgcaccatcgtctccgtcaccaaggaggtgtccgtgctgacggcgcagcagaggaccaagaccatcgagggcgccatagaaagtggcttctccttcaagaactgcagcatcaaaggacaagggcagatctacctcggccgggcatggggggattcgtcgcgggtggtgtactcctacacggacatgtccaaggaggtggtgccgatagggtgggatggctggaacatcgccaagccggagagcagcgggatctactacggcgagttcaagtgcaccggccccggctccgacgccaagaagagggtgggttgggcgcttgacctcaccgcggatcaggccaagcccttcatcggcacgcactacatctatggcgactcatggatcctcccgccaccagagtaattactcctctctccatttcaaaacatagggcgtattttgtgttgttaggagataagggtttaaccaatgattgcttctccaatatattatatttgtgccgcaaaagtataatacttttgaagacgaatctaaataatatttcttatgcttcacaaaagttatattataaaagagtaatggtctatagaaaacagagtagtggttggttaaaatcttgttctaacaaagtaaaataaaccctataacgtgaaacatagggagtactatttttacattaactttctttggtatttcgattttggggtaacatcgaatagcgggaaatcagcggcatctacctcgacggcgagtaaatcaaccgcatcggcgatacccaggaactcaactgcaccggcgacggcaacggaaagtaactcaactgcaccggcgacacccagcaactcaactgcaccggtgacggcaagtaattcaactgcaccggcgacggcgagtagttcaaacccacctgccacgaagagttactcgggtccaccggcgacgccaagtgcttcaagcacaccggcaaaggcgagtagataagtgcagcggcggcgcggtgagtcacaacttcatctacggcaattgaaggatcctcccgccaccaaagtgattcaaatatttcggagtaactattaccaatttaattgggcccaatcaattctgttttggaggcccgtttgttctttgtgttgtgttaattgggccggattggtcggccggccacatagatgtgtaacatttgtatttttttcccaattcatttttggtcttctatcagtgtacgcaccttcaaaatggtgaatttttacagaagtttttgaagaagacttgtgctctgtatgcgtggcaatttactttaacgatcgacacgacggcatctaattctgacgaaaacgagagataaccaatacatacacatagtattaggctatgttcggcaccctgggttgggaacccatgtcccacgcacaaaaaagatagcgatccattagcgtgtatttaattaagtattagctttttttttcaaaaatagatcaatatgatttttttaagcaactttcgtattgaaactttttataaaaaaaatatactatttagcagtttgaaagacgtgtgcgcgaaaaacgagagggggagttgggaacctggggcaaagaacaaagcctagtaaagctagcagttcgtacaagagtgtggtaattgtgaattatccagggtctgcataaaatcgagtttaattcttcgtgtggttctgataagttccttgctgtacagtgtataatttggtttttagagaacgacaaatggataaacagcgtgttctagaactgtacatagaacagtgactcaaattaaggatgagaaatgggtggatcagggacgacacatgctatacatctctccaaattgttatccatttcgtctgtgttcagcatcagttggcctaattaaaactgataatcaacaactttaaaaaataacttatggcttatatatatataatcctgagcgatttaatgccaatacgaaccccaaaaaatcaattgaaaaactaaaataaaagttccaattttaacaatggcttatatttaagcaatcggtgcttctcttgctacacatttataggagtagagtatggattttgcagtgacaattaaagccaaacacacaaaattcacgataaaattaagaaaaccacacaaaaaaaaagtgagccatgcatagcgagagccaagtggcaatcctctagtacactcgcagctgtggcccccgcaaaatctgccacgagccaccaaaccccgccacgtgtcgaggtgggccccaccaacgaccggactactcccgcctcctcatccggttcccgccactcctatttatttcccaaaaaaataataaaaacaaaattcgacgaagaaaaaaaaaataaaattcggcggtaaataagcggggcgaaggaagaagaaaatcacggaaatgccactaccggcgttcgtggcggcggcggcgaggctcgccgtcctcgtggccgcggcggcgacggcggccaatgccgcctcctacgcgcggtaccggcggcgccacctccgccgcatccccagccccatcgacgagtccgccgatcccctcgccgacttccgcgcctttccctcctccgacgctgacgactcaggttcgtctcactcactttcgtttccctctgtaaagccctagccatgtaagcgctaatcgttgaggtcaatggattattgcattggggttgggagattatgtatttgattagtctttgtggatgcccagttgggaggttttaggttttatcaatttttgagatggggaattgttggcataatcgatttgaatttaatcaattaatccttatattcaattagttttttgatcaattagtcaatgtcaatacgagagtactgaaaagaactttgtttgcccattgcaaatgtcctgttacatcatacatggggataagattactcactataggcacagttatgctttgcacctctctctcattaattttctctataaattcgagcattcaaactgtgttttaacatttaaggccatcactggctggaagcaacaattgtcaaggcaatatggaagccctgatggtgtggcatatttgtttgcagaggaggataatttcttctttgggctagcaacagcgcctgcgcatgttgaggacaggctagaagatgcttggctccagtttgcaactgaaacttcctgcgatgacaatggaaacgtgcgcgaccagaggccagtagatgcactgatggcatctgctgctggtgatggaggctcccagcaatcttggaggtcaacaggtggggaaaatattggtgatagagagcagaggaaaccacttagggtagccatggaggctatgctcagggggtttgaaattcttgctgagagtggagaatctgctggcggcgataactgcagccacaatgttgctgcttggcataatgttccatgcccgtaagtacatgagtatagaatctctaatgagctaatttatctcagttctgtactccaaagaacaaatctccttgcctgtaaagtcacctagagtcacttctcatcttaactatctctccaggaagagttgttgtctttcaatattgtagcttctttccaagtctagatatgacttcgatagtgctactatgtagtggtgggtcccaaggataaaaaacgaatgcatgcttttaaaaaaagtaattcaagattctagctttccttccaaatgtagatgtctttggatgttgtatgttagcaaactctgatcatttttttttcaggcaagaaaggcttagattttggtctgatcctgatgctgagttgaaacttgctaaggagaccggcatcagcgttttccgcatgggggtagattgggcaaggttaatgcctgaggaaccaaccgaagaattgaagagctcagtaagttcatagttatgcacgtgcctctttttacctttatattcatccttctttttccagcatgatgatctcagtaccggtgaaataagatagacatctctttctctaggttaattttgcagcacttgagcggtatagatggatcattcaaagggttcgcgaatatggaatgaaagtaatgcttactctgtttcatcactcacttccaccttgggctggaaaatatggcgggtggaagatggaaaaaactgtcacctatttcatggattttgtgaggtaccttttgagggcagtcaaattgacctgccaatacattctctccattgggaattgttcaataatttattagattttgatagttggggctgtgcaggcttgttgttgatcgtgtatccaatttagtggactactgggtgattttcaatgaacctcacgtttttgtgatgctaacttattgtgccggtgcttggcctggtggagaccctaatgcaattgaagtagcaacatctactctgccaactggtgtatacaatcaggctttgcattggatggctattgcacattctgaagcctatgactacatacattcgaaaaggttggttctacataatgtattatttgcagtgcccttattccagtgattacctggtattttttattcgataatcaaggagttggtttcctctggttttcttattatttatttcttgattaacagcaagaacgaaaggaagccaatagttggtgttgcacaccatgtatcgtttacaaggccatatgggctatttgatgttgctgctgtcgcgctagctaactcattgaccctttttccttacgtggatagcatatgtgataaattggacttcattggaatcaactactatggacaggtaagcaaattatttgctgcttaatgaatggctatgtaagtgaccgagttaattctcccatttccatgcaggaggttatatcaggacctggtctaaagcttgtggataatgatgagtatagtgaatctggtcgtggggtttatcctgatgggctgttccgcatcctgattcaattcaatgaacgatataagagattaaatataccttttgtcattactgaaaatggagtttctgatgagactgatctgatacggaaaccatatatactggaacacttgttagccacatacgctgccatcattatggtcctttcttaacctttaagcaaacatgttttagtctgtgctcatggagatggaacttccaacacttaaacaacataatgttttatagggtgtccgtgtacttggttatttgttttggacaacatcagataattgggaatgggcggatggctatggtcccaagtttgggcttgttgctgttgaccgtgctaataacctagcacggaaacctcggccttcatactttttattctccagggtaactttttcgttttagcaaatcatgaaaccatggtacattgtttacctattatctcagtctcttacgttgtctaactcctaggtgaatttttgtcttctgttgaaatattgaaaactaactagatctactccttgtttctgaagtttaaagttcattcattttcttttatcagagtaattttatggctagataaagcactaaacgtgtctagacctgagattacctccagcattttttttgccactttttacgttcatgcatgtggtggctatataactagcatgataagatgcatctgaactccaggttgttacaactggaaaaattacaagacaggacagaatgtctgcttggagggagctgcaacaagctgcagttcaaaagaaaacacgtccatttttcagggcagtggataagcatggtcggatgtatgcaggtatgtattgttt

SEQ ID NO: 6250 - DNA, 6630 bp, Oryza sativa
cccttacatatgtaatttatatgaatttacaatgtaaatatatggtgactattttttggtaaaaaatatagcgccataaatatagctactactaaaaaaatagagatttcttagagttgttaagagggtaagtttgcttacatggaaaagagagaaagataatggcgacatcgactcatagcaatttataaaaggaaactatttgttgaaggaaacttagcattctccgtagccatattttaatcggctatttctcaatcctttaaagatgagttactcgtgaaggattgtggatgtctgaatctgtagtagcgactactactcatagctagcttgctgagtactgactagtataggcctgtttagttcccacataaaaacttttcatcctgccacattgaatgtttggacacatggagtattaaatataaaaaaaggtgtaaaatacaagacgaatcttttaagcctaattacgccataatttaacaatgtggtgctacagtaaacatttgctaatgatggattaattagtcttaataaattcatctcgcaatttatagacagaatttgtaatttgttttgttattagactacgtttaataatttaaatgtgtatgtgtccatatatatgatgtgatatgccaaaacttttcatctctggatgtaaaattgtaaacacagccatatacaatgtgtcgttgcctgcatgcacgcagatcctggatggtcgcggcaaggaggagaagaagaagcgcgtgggattcatcctcctcctgtccgacggagtggatcagttccaatactcgaggatcaattgggagaaggtggcgaagagcaccgacgtcgaccactccgaagttggcgccatgctccgcaagtacgcggtgcacacgttcggcttcagcgcgtcccacgaccccgtgccactgagacagatctccgcgctctcctacggcctctactccttcgtctgcaagaacctcgacaacatcacagaggccttcgcccgctgcctaggaggcctccgcacggtcgtcgccgccgaaatccgcgtcgatctcaagcccaaaagcagtgataagcagcagcagcagcagccggtgctcatcaagagcatcgattctgggggctatgagagtcaagtcatcggcggcggaacctccggcaagatcctcatcccggtactctacgtcgacgaggtgaagaagttcatcgtccacctgaaggtgcccaaggtgtcggccaccaccgtcaataaccagcaggagattctcacagccgacggcgacgccaactcggtggacgggaagacagtccgcattaaggaacacaaactggccatccggaggccgccagaggtcgtcgaccaggccgacctccggccagcaccacaggtcgtggagcaggtggtggtgttcaagctgctggacatggtacccaagacgttccagcagcgtagagaagatgatcacaagggcgtgaagaataccaaggtggccgtgcagctgctgcagcggaacatggacgagataaggcgctccgatgcctggacagacctggatgtgggcacgaggcgacgcatcgacgaacaggtgaaagagattgcggaccacgttgagaaaggagaagggccagcctatgtcaactcgtgggtgtcgagccaggagatgcagcgcgccaacaccatgggctcgcccaacaaggtggtggccggccgagttcgcgacgccggcgatgaagacaatagtggaggaggtgaaaaagccactggaggagaagatcgttgagggtgagcccagcacgcctaccagtaccaagactacaccttcttcagctgatccaaatccagctccggctcatccggctcccactcctatcaaacaatattctccacgtcctgatgaaaaaccagctgattatccgaaatctggtcagaatccacgtccggtggtcctgccttctgaagatctagctccgattcagcctccggtactttcttctaaacaagtcgtaccagctcatgtggtcgtccctccaagctgttcagaggaaattagcttgaggtgcccgcagtgcgtggagttggactttgtcgacgagcacctcgcttactggtccaacgtgaaacgcgacctgctgcgcgtgctagacgacgcggaagccgccgcagggctccgccacggcgtggcatgcttccatgacctgtcgctcggagccatcaaccaagccatgtatcagagcgtgtgccaggtaattcctccgtgtcccacggtacctgtctttctagcattaaaagataccattttcaattcaaatttcttcctatatattctactctcaaccaccatcccatatctaactatacattatttattaagagtactatagttcttttctttgaaccttaatgcatgctaaataatctagaaaaacaagtattctgaaatggatatagcatgtactctctctgtctaaaaaaaccaatctagtattaggatgtgacaatgaatctggacatagattagtatgtccatattcattgtatcgagatgtgtcatgtctaataataggttggctttcattttttaggaccgaggaagtactacgcaatccatagtagtagtatcttgcatatatagcttaacctgactttgtgtgtaggccgtcgagcaagcccggagcctgagcaagtactagcgagctgccatgccagccacatatatgcactcatgctgcaaggaagaatctcagcaaggacgactactaccatcatccatccacattaattatctagcctacttgctcccttccggttgataatatacgttgtggacaaggtctatttgtaaactttcactattaataacgactaaaatatatttgagttagaaatatgtatgtacgtacgtacgtatacagattactcttaaaaatacttcatccgttttacaatgcaagtcattctgtcataaatataaatgtgcattgtaaaacggagggagtactttaataaaattatatatttattggtgtttctataaactgtaaaaatgtttgtgctttgcacgcaaccgataacggtggagaatcataaaaatcgacataagcactaaggctacatccttttctgcgttttcgaaggagctaccttttcgttctctgtgaccatattttccaaactgttaaattgtatgttttgtgtaaaaaaatacatatgtttcttcaaaaagtcaaataaatatgtactttaattaatacttaattaattatatgctaatagtttttctcatttcacataaaattctcgctattctgctagcttgaacggaacctaagaatttggtgttggcgaaactacatgtttacatgtaactacatgtttacatgtttgggatcgtgacatcaccttgtttatgtgtagtatttgggtgtaatggatcttgtagcgttgactcgatcgtatagttagctatcacgtcgcactcactttatttcgcccctcgcctcgccactgctcgagcgaggtgccggcaaagctggaggctcatcaggactacggcggcggggctcgcagctcccacctctccagatctagacgggcggatctcaagttagaggtcgacggcgacacttcggcagtgggcagagaaggccgacgcttgggagcaaggcggcggctcgcggccgggtcacacggccagatccggtgaggggctgcgacgagaggggagaggctgcggctggacggcgggtggcgtcgaggaggacgcatgcgacgggtggccggcggcggcattgacggtgatggcttcatggcggtggtggtggaggacgcggatccgacacagtcgcgccagatctggctccaggtctggccccggcatggaactagtcgatgacggcgcgacagcatcggcgatgacataagcaatgggaggacggtgccgcagggtaggctggagcggtgatggatggcacaggcggcggggaaggggccgtgcaggcggtgtgcggccagtgtccctttggccagatccggtctctctctctctctccctctctctttctctctctctctctgccctggcctagtgtcggcccagcttcgtcattgtccttgagcgcggccgcaccgcgtgtaggacgggtgcgaaacaggagggtgaggcagcagccggtggtgtgcgaggtggcggccggcgaagcatgagcgtggctttgaccagagcgacgcatggacatggccagtggtggtctacatgaggaggacgctagcgtgactcgcgcttggtcactcgggtgctagcggtggtggtccaacgatggttgttgtgcatgatggttgtgtggggttttgattgggactcattggtaaaagccttgctaggccatgggccagcatgactacgacgacgccattaggtgtcgtttcccttcttggaggcgtcgttctggcattgacctctcgtagcagcaagaaccttccgcgtgcaacgatagcattggtggactcctgcaatgcctctgatcccctacaagcctagggtgtttgacgaggccttcgctgccttggttctgttccttgctctacggcgggtgttcatcattcttatttgtgtactgctgggtagagtcggagctgcttcgttgtaggggtgcgacaaaacttggcaacggtgacacactccaatctttttataggattgttgatgctagctgcgtgcaggaactggttccttggtagcttaggctgatgtccttcatcgatatcgtttatgtttgctccttttggagttggggtagcatcgtagtgaagtcgaaactgctgtgtcgcttgggtggcaagcttggcaacgataacatgtgtgggctattgtgtcacctatatgttaagcttggccagagtcttgtgtcgggctccatcgtggtaccttaggttaggttagctgttggtgtggtgttgtaattgtggttttcgcttagttttcccaaattaactaggcactgtaagatttggtctcatttacttcttaaaatgggacatgcgtcttcttctaaatataaaacgtcggcaatagcttgaccgtttaaaaaatattaatttaaggatcctaaaattaaggaggaagggaaaatactataacaccccttattaaattaaaggtctgttgagagtgggaaggtggttggagtatgattgggtaaaaaaataaataagagatagttggatgggataggtagtgctctaaaatccctgtttttttttataaaatttgaatactcagatttatgggatggaggaaatataagtaaatataagtttatctttcgttagatgaagtagtgctattaagcatatttttaatagaaaatatcaccaaccaatatatcctaaaatatagaaagacatatgtatacagtatataagaaaaagatgttacttaaagttagaaactccaaaaataagatatcctaaatattctaaaaaataaacaaatacaacacaaatgatatatagtttcgtagaaacaactctattagtgcgacactatattttctcatagatttaaaactgcgtgatttcgagtaattttagttcagaaaattatatttagaatagagtaaaaaataattcaataaaaatgcatccacacataaataggtatctgccaatgtgaacgggctaccttttaattttctctctacttgcatcgtgtgattacattgtatctatgtactagctagtatgcactggtggataaggggtttttactcccggttcgtaacccccatgtagtcctggttttccaaccgggactacgaatccgggactaaagatcgttatctttagtcccgggtaaaaaaaccgggagtaaaaatccatttttagtcccggttggtgttaccaaccgggactaaagattatctatcttaccaaccgggactaaaaagactagatccggttgctctttattattttcttttcttcattgtttttaatatatattgatttcaccccatcccatccccaaaatcccaaatcaatcatcctcaaattgcctccaaatccacaatcgatcatctcaaatactcaaatacatcacaaaatctcaaaaaaaaaaatacatcaagcataacaaaatacatccccaatacatccacatccacaatccacaaatcaatcacaatccacaaattaatcacaaaatcatccctaaatcaaccaacaaaatgctccaccaaaatatacaaatcattcaaaaaaattcgcagtcgccgccgcccggccgtgggccgccggccgccttgcgcctgactgccgcgcgggtcaccgccgcccggccgccacccaccgccttgcgcccggccaccaccgcccgccgccttgcggccagccctccgcgctggcctccgccgccgccgccgcgctagcctccgccgccgctgcttggggcggccctccgcatgcgacggccgccgccctctgccaccgccacccggccgcctcccctcccggatccgacgaaggggaggccaccgccgccgcctggccgcctcccgccgccggaggggagccggaggggaggggaggggggagagaatgagggggaggagagggttgagaggaga

SEQ ID NO: 6251 - DNA, 7841 bp, Oryza sativa
acgtgttgtcggagtcgtccgtcaagccagagtggaagagctagccctagaaggaattggagcaggcaagtgacgtaataatataaatgattgttatatttgtaatgcaattaattaagattattagacctgtaattggacttatcatataagattgtgtagtgttctaatattatttgagttttaatataagattactttatttgtaattacacttagtatgtaattattgactacggaagtggtgcgacaagtagcaattgactattgtagtcttaattagacttagcatatacgcacgaaacacttagcatatacatgactattttagtcttagcatgtaatattatttgagttttaatataagattattttatttgtaattagacttagtatataattatttactagctagggttgtataatatacgtcaccttgacttagcttatatcacgatttgtaattagacttagcacgtaaggttgtgtagggttctaatgtacgacatttacacttagcatacatgacttagattgttaaaacataaatgtatcgtgacttagcagatgtttcttgtatcaacagatggctgaccgcgatgaggaacagatattgtacgatacaatcgcggagggaagcagccagtactggaatgaagaagaggggaacgaggatccaaaccagtacttgaacgaggaaggaaacgtggagagggatgcggaagggaaccagcaggggcacgtggaaagggatgtggaggggaaccaggaggaggaggctagtgatagtcaaccctccgttggacagaagagggcacgcgggcaacgaggtgcagcgaagaagcttgagggtcggcacatcataacggaagtgcaagaagatggacgtcctagtgccccggccgaagcagccaagaactatgtacgtcacagcggttgggttgtgcgggataacgtgcctgtcagtacggtgtactggcgaagaacaagggcacgcggagatcatgagagctttgtcccagattcggagaaagagatgctgtggaccacaatgctcgagacattcacccttcctgcgggtacagaggacaaagtgaaaaggtggactctgaagaaaatggcagaacagtttcagagcttcaagggagatctgtaccagaagtatatactgaaggggcagacaccgaacttcgacacattcccaaagctaagggatcactgggacgagttcgttgcttataagacaggtgaacaagggcaggcgatgatggaaagaaacaaagaaaatgccgccaagaagaagtaccatcaccacttggggtcaggaggctatagcgtcgcgatgccaaagtgggaggagatggaggctagcttgattgagaggggtatcgaaacggcaacagccaattggccggaacgatcgaagttctggtactatgctcacggtggaacgctcaacccagctgatggctcactggtcttcggcgatcagatacgagaggctgcacgacgactaacagatgcagtggaagcctcctctcagggcacgttccgaccagacagagatagggacgagctgacactcgccctacagactccagagcatccaggacgaacacgagggaaaggggtgattccttggaagattggtttcaaggaggacatccacacgtacaggagtcggatgaggagcaagagagataccgaggcgaagattgcagacctagagttccgggtatcgagctacgaactcaacatgcaagaggaggtggcaaggaaggttgatgaacgcatggccgcacatcggtcccatgatccccagccgaccattcctcctgcaatggtaagcccgtcaggaaaccgtagcagctgcgcctcaacggggcaggtaggatcacagagcatggacgccatgcaaacacaggacgaatcgacctgtcccgttgatgacatcactcagcggacaccatgtgagctgcatattcctttccagaacttatcaataaaggtaagatttagccattccgctagttgctgcttatatatgttgattactaataaataatctctcacaacatgaaggtggcgtcgggcatggccatcccaacggacccttcaggtacttaccactgcaggccgattccagcaggatactcgaaggtcgaagttgagttggtcgaaggcgcgtacgaggacctcgagctggattaccctggaggagacggtgagacgcatctacgagacacaagccatgccattattctatggcgcaggcggtacatcatcctccctggtcgacaagcggcgtctcgtgcaccatctcctccggctccgccatctcctcctcatgatcctgcaccgtctcctcctcatgctccgccagcaccgtctccacctcaggctccagcatcgactcctcctcaggatcctgcaccgactcctcctcgtgctcctacacctactcccccgcaagctcctcttccggcaccttcaaagtcaagggcccccccagctgcaccgcctgcccacacaagggcaacgaagaaggcgaaagttgacgccgccaagaacaaggacccggggtacgattgcacgcaagaggagcttgacgcttacgttgcatcagaagtcaagagacaattcaagcctcgaagtccagaaaagaagattcctatagaccccattgtcaggaacttcttcaggggtatgtctgcatctgtcaaggaggccatcaagctatcggactatgagcgaacgctgaagaaagcatcttctggaaagtccaaaccagtccctcagcttggagagcaaccaaaccaggagatcgagccgttggtgaccggtaaagaaatgacgatagaacaatttattactgacaccggtctaactacggatcaattgctaggagtcgcaccaatcgaaaaggcggaagtgaaatacatgtacgaactcggtaaaccgcttgtcaagcctgagctgctgcagtccctacccacacaaatgtacaagttccatcagctgtacatggagatgagcgccaccggtagagagatgatcggagcgaggatcagggacacggacttcttgcaaggagatgacattctctggatcaatttcacacatatctacgaactataccagctggacgccgtcgacgtctctattatgagttgctggattttgtaagtatatcgttcagttagatttcttactatacgtctcctttaattaattaggtccttgtatataagtagactatagaaaataatatactcccttttatcgttgtagaatggagattcaaagggcccgacggcggagggttttcgatactggattcatcgaccctcggaaagtaaacgtcgcaatgctcgaccaatatccacaagaaacagaggacaatctcgtccatctcctgaaggcgcagcattacaagacgttcatactgttgccatacaacacagagttagtttaattgtactgtcttcctacataccaaatttcattcccgtacgaacttgctaagtgtttcatatgtaatgcatcccacgcacattgcagattccactgggtgcttttactcttcgacctggaggcctgcaccgtcaacgtatatgactcaatggataaaaaagagtctacgtttgacaaggttttcgaacttatagacaggtaccgtcataagttcctttgttaattaagaaaatcttgttatgttaattgctactacgaatcatagctttaaactccatgtagggcttggtatcggttccgtcaattggtccgtggcaaatggagagaaagacttaggcggaagttcaaatttcctgttagtacacatgctctacatttatatttctccgattcaaatacatacaagtgtatattaattagatctctcgttgtttgtcatttatttgtagtgcgcaaagcaaaagcagggaaataacttgtgcggctattacgtgtgcgagtattgccactgccttgcaaaccaaatcatcaccacaagagagctcgatgtacgtacaaataaattcaaaatttcagtacgtagcgatttcttgtttaattactaatcaatttcatacattcatatagtttattcgcatgagggataacctgaccacacacaaggaatttatcacggcggttcaagaacaactcatgggattcatcaacgaagaaatccttgatcccaagggtgaattctactacgacggaaacacaattcaccggtccttagcttctgagctagcagcgagtactactacgtcgaaatcgtagctagctaggacatataatggattgtaattaatacatgactacatatgtttctatatgcatgtgtacacattttctataatgtaaatatattttggtcatatatatatctatatacatatgcatttgcataacatatatatgtataaatacatatatattatgcatgtatatacatataatataatataatatatatatatacatatatatatgtatgcatatatatgtattgaaacatatatatgcatggtttatatatatatatatatatatatatatatatatatatatatatatatatatatatatataaaccatgcagcaacagggccatgaaaaaaaaaaaggtcagctcgatctttagtcccggttggtgttaccaaccgggactaaagatcgatctttactcccggttatttcaaccgggactaaagatagcgatctttagtcccagattggtactcccggtttggaaaccgggactaaaggggggttacgaaccgggactacaaagggtttctccaccagtgcttatagcttcatagtggtagtgctagggatttaaaatttaaaatatgtagttttgtgacaacctcaatattaaatatgtagttttataatgtttggccttaaatatgtaattttaggatgaatttatcgctaatatatagttttgtgataaatttaccattaaatctgtagttttatactggtaattttataaaatttactcttaaaaaacagtgggatccacgtgatactgtgaccggcggcgagagacggctgccgctgcccagatagcccatcttcaatcataccattgcactagaaattcaaacaaagattgaaaactctgtcggcttctttttttttttgaaaaaaaagaagaaaatatgtcatttgtctttctgacacaggattgtataatgtatagagaaacatagttgccgtcacttgtgtatcgataatccctggtggaccatgaatacgaacaggacgacgcgtacagggtacagcaataatcatcgatcatcaacccaacaagacaacatggttgctgtatcttgagacaccaatctgaataatagacaggacatcgcgccagctcttcggaagttgcctttatttaatttgcactaatccatcgctacaatgatacaatctcatgttactgttcatcctacacagataaggatgtactcatgtaggttgagaactatattgagatagtgcttgctcacttttgtcaatatgatgcatacaatttgcaagaagtacgtgagcactcactttattatgctacagaaccaattttgcaatgtacttacacaacagtaccaagacaatgccctgtgaatatgcagttttttttaagctaatgaaagttttaattgaactcagttcgtcaagttgatacaactgtactgagaatactcccaaccatattatctctgaaacttcaaggtgaatatgcagctgtaatggtaattatctccgaatattcttgttcagtacattaattatcctctggctatattagcatggagttcttccagctagcactgaaagtagtggtctagctaatcctgttttgagcctcactcctcttaataatttccaatatgagagctcctcctctcatatccattgttatgagaatggcaacggggtcttccagctagcaccatgtcacaccctgaaaatcataaatatataaattgttgtttaattggaatttttagaaataattttaaaagccttgaagagaagatctagttttaattaataaattccaatataaaatggggccagataaaatttcattaaatactttgcttaattctataattcctagatttttctgggatttatttgagctaaggaagtatttttaataaatggaattgcatttcataaataatttaaattgaaaaaggttttaaaaaaagtctcttttggctttgggccgaaagtcggcccaaaacccttctctctctccccggcccaagtcggcccagtccgcgcccgagccgccgctctcctctctctctcgctgtcgctgacaggtggggcccgcctgtcagatcgtcgtctacctccggccgccgccgcccgaaaccctagtttcgcgccgccgccgttcccttccaaattcgatcgatcctttccgtttccggccgaattgatagaggggaaacaatcttcgggatctcctctaccttttctcttttggaaacatcggctaaatcggtttggaaatcgttggattcgaagtcgaatcggatcggcttttctctctccgagcccgacctttccttctcgtcgccggccgccgtgggccttcgccgccgcctcttagcccctttaaaaggacccccgagctcttctctaccagtcgcctccctcgccttcgcctctcgtcgtcggaaacgctctagcgccgtgtagcctcgagccgccgtcgccgccgttgctccagccgagcgccgccgccattccagacgtcgccgttgctcgggaagaccgccgtcgtggtcgccaagccgtcgccgtccttgtccgccccttcgccgtcgccgaagatcgccggagcaccatcgccgccgtcgacccgaagaccgccgccgttttaacctcgtcgccgtcgccgtccgttggtcttccgccgctcttttggtcaccggtgagttcgccgcgtcgcgctctacccgttggtgtcctccgttcgtgccgaagcgtcgccgttcgccggcgagcgtgcgccgtccgagccgccgagccgccgccgccggtggtgacgtcatcgctgacgtcatcgtccccgtctcccgtgagccggtcgtggaccgatcgatctcggccgtccgttttggatcaagtctgacggagctcgtggctcctcaccgggagaccgcgcaggcccccctttgccggttcggccgggggcttagggtgagatctcaagctctcgctgtgtgtggaaagatcgcgtgccaggaagaaacacgagacacggacgatgtatacaggttcgggccgctgggaagcgtaataccctactcctgtgtttttgtggattggtgtatgaatgagctacaaagtgtcagccaacttctcccccgttctaagctctaaatctggaaaagaatccaccaaccctttctctatgggcaaggtcctccttttatacttcaaggggataccacatgcacccttccctttccaaactggactgttcttcttctctttaatgggcggagattggtatggttgtcgtccaaatgacacttcgatgggacagctcacacctacctccactcccggcggagacgggcgcaacgtgagatcgtggctgcccgttgctgatgcgaccagtgtcagaccggtcattcttgtccaccacgcgtcagtttaacaacgtgcatgtttgcccttctttgtgtaacaccttgcctgtaatgattaggatgaagcctggtataaatctaaccagggctaacgtgccatctctaagagataacacgctagctccggcttgagacgagttgccttga

SEQ ID NO: 6252 - DNA, 25207 bp, Oryza sativa
ggggggagggggggagccgacggcctcccgtggggcaggagtttttgcgtatttggttgttctcatgttggtgtgctggtgctccttggtgtcaaattctactgcctccttgggttgccttggcgtcatgcagtagattcgtttgccgaagatatggtcggtaggtatgagatggagttgtgggattggtgcatacaaggagggtttttggatatgcttgctttgggggataatgtggtttgagtggggccggcagtattgatccgttacgccacgccaaggacttatgtttctggctgttcattagcttgtttggtcaaattgggtgttgagagtgatgagcattatgtagtttattatggaaaagagggtttggctgatcgacgaaagcaggaaagtaatgagtctttttgttggcccttttttttaattactctgaatgttttcctgtcaaataaccatctgcactcagaatcagaaaattttaacatataaatagttaccgtcacacttcgctttctctgaaactaattgaataggcacgtgcaacttttggtatgttctataaatgtacatctatatttcctaattatacaaccatttaatgtaaccatcaaagttgcttgataaatgaaaggtatttcttcgtttgattgctcatattgtgcatttattgggagcatgtcgcaattcttccatgtttacctattttttccttccgccaagaactatatatatttattgtgtctctgtgtaatgtgaatgtccagggcgatacgcattcacgtgaagacggattatcaaaaccaagagataaagatagagaaagagaaaaagacaaggacagggaacgccacagggaccgtgacagagatcgaggaagagaccgagatcgggacaaggacaaggaaaaagacagagacaaagaaagggacagggatagggacagggacaaggatcgggatcgccaccataggcatcaccgtgaaagaagagaacacagagatcgctctgatgatcatgatcgccacagaagccgtgattctgaaaggtattctttgttaagggagttctgttttatatgcaccttatttcttacaaaccatgcatccttgcaatgaatgcattttatcaaatgtgttaaatgcttttagatttagagctattcaactgtcttatacatgcctacatgattagtcaaatgcccacaccaatcttgtggtttatatttaatacaggagaagagaccatgaacgggatgggcgtcgcaggcatcggtctcgctcacgctctcgttctaggggcagggatcgcagatctaggtctcgctctcgttcaaaaaggtatgtaaaggaagctccttgcatagtcttccatttgcatcttctttagctgccgtgcacatactatgttttccgtcatggttagttaaattgtttattccatatagtagcaattttggacatactttatatatgctttctctgcatggattattttcctgatattttctttgtgtattatcaaattcagacatgtacaattcgtatttgaatatgtatggcagtatggtttactggcttagtcttcttaatctggttctcattgatgaccggtttataacttgttaaatatgctaattttatgtgttattcagctttactttttaagttttattttatcactaaccactaatatctactaaactatttttctaaagcagcaagcgagttagtggatttgatatggcgcctccagctcaagctgtggttccacaatttcctgctattccaaccccaagtatgctctcatcaactaagttaaacggctcaatttcatttttcttttcctcgtcaatttgtggcactttttctgaataataattttagtgggacatttgaacaatggagttaagaaaaataattttgctgggctggatgattgatgtacatgagtattttttttagaatgaattatatcttcggccgctataattcttcatccttatcactgtataatgccacactatcttattgccgttgccataaactaccggtgaattactagtccattaaggtcgattattgccgtagcaggatgatgcttggtgttatacctagtaaattggtggatatgtctggatgttatacctagtagaactccaatacagttaatatttgcttagtatgatcggccttgagcattctacacataatagtaagaggacaggagaacaagcaaattgttattttatagtagtctacatgatgcatttggagagacattggtgctttaattaaaggataaaaaagaataccaaccagtgggctccgtaagcacccctcaggcacctatctgctgcagatgcacttcatgtgatagttactaatatgaataagtgaataacttgtaagtttccattttattattacttggtaactggaaactgagcaaaacttttttgcttgtgttcttttgttgtttgtctgttttgtgtatgtgtatggtaagaaggcaatcttgggttacttgcccccactgctgccaatggaatgagctgcctactgtagctttaatgtacaaggaggaatcagtgctctggtttgataccatcttattcgtcttcaactagcaagtattactggttgctagcattatgtctattatatttgtccttgcacatattttgttcattcttaggcttggatactgaacagctagatctattttagacccagactgatggtgagaactagtcagttctaatggtggaatttttttccttgctaattgtttatgctctgtactagaaatttattgataaattgcaggtcagtttccgggcactgctattcctggaatgtttccaaacatgctcccgatgggtgttggacaggtaacctgtcagtattttaatgtattataagtgccaaaagaatcatttttttatttatgtttgtaaataatttttatttgcctgtaataataaattttgtttgaagcagttcaatccccttgttatccagccgcaagcaatgacgcaacaggtatgagttgttgtgacatctactgcatctattattgataaggatgtcaacaaaataatgtgttaacacctttttctctcaggctactcgacacgcgagacgtgtttatgttggtggacttcctccaactgctaatgaacaggtctgtgtatttaatcactcattctttcttactgcccatttcccatacccaaaccaaaagccgtatgggagtgcacgagtgtgtacccgcatgcaacatattactgtggaattgttacattagtttcctttactgcagtcagttgcaatatactttaatcaagtcatggctgctattggaggaaatactgctggtccaggtgacgctgttcttaatgtctacataaaccatgacaagaaatttgcttttgtggaaatgaggtctgtggaggaagcaagcaatgcaatggcactggatggcattttgtttgaaggggctccagtgaaggttaggagaccaacagactataacccttctctggcagctgccttgggccccagccagccaagccccaatctgaatcttgctgcagttggcttaacacctggttcagctggagggctagaaggcccagatcgtattttcgtgggtggccttccatattacttcactgaggctcaagtccgggagttgcttgaatcctttgggcctcttcgaggatttgaccttgtgaaggatagggaaactggtaactcaaagggctatgcattctgtgtctaccaagatctcaatgtcactgacatagcctgtgctgctctgaatggcatcaagatgggagacaaaaccctaactgttagaagggcaaaccagggagcggctcagcctagaccagaacaggaaagtatcctgttgcaggcacagcaacaagtgcaattacaggtataggtctcaactatttttcatccagtatcagataattttactttcttatgccaactattttgtagctgtattgtgattcttgcattttgactctgtgcttcttaacagaaacttgtatatcaagttggagcactccctacaaaggttgtgtgcctgacccaggtggtttcggctgatgaattaaaagatgacgaggagtatgaagacattatggaggacatgagattggaagcaggcaaatatggtaatttccaacttctcacccgcaatttcctcccttgcctctaaactccggtttagtttgatcatctgctgggctaaaaccccatatgtatcttcttgcgttgagagtttatgcatgttttcggattccttttgcctcgattgatactttttgtttatttagttggtcttcctaggtgttttctcccttttgtttactcacaagtatcttccttaggtaatctgattaaggttgtcatccctcgccctgatcctagtggattaccagttgctggagttggaaaggtaagtcttgtgtattgcatcgcacaaacattgaagagcgtctgtaatctttctaatgtacgacctttccatccaggttttcttggagtatgcagatgtggacggcgccaccaaagcaaagacggcaatgcatggaaggaagttcggtggaaatccagttgttgcagtgttctaccctgagaacaagttttctagtgcggaatatgacgcgtagattatcccgctatgtaaaacactagtcttttgtttttcttttgcgccagtttgctaaattgtaacaacaatttctctttaagttgaaccttccaatagcttggatttatgcagagcgaccgattaattaatattaaaagatgtgatggatttcctaaagttaactgaagggcttggagtatgatctgattcttgtccgtttatcctgatagacctggattatttgttaactctgttaggcggtagctcttgtcaccggagacgaaggagaatggtgggggcgaggacacctcatcagtctgtccctctggcgtagacgcgagcgaagaacgcaagtggaaggaaattaaaggatgcgggcgaagaacgataggaagaggattatggaggtttggatgtgatctgagcagttggattgtgatctaatggtctaaaatttgcaagatttggacgcaggttttctggcaaattacatgtaggtaggcccctatgatctagtaattcttattcaaacgcgtgatagttcatgatagtagtagtaaattaacaggagaaatgagggcaatggcatggatgattcatctgcacacccgtgcggtacatgctagacgtgcaaaactatttgcaccaatggttttaaaacaacaacaataataaatacaggtacagatggaacttgaaacagaatgatagcttacaattacatgcagtggatgctatgtttagctaatctggacgtcgccacaaatgctgtgccgtatgcagtatatcaagatgattaatcaacggattatttgctgatcgatatgcttaatccttcgccaatttggatgtccaggggtcagacaggtgtccgcaagagaagggtggcaaccagagattacaatgctcttgagcgattggggaagcttgggcagtgtcatcatgttgggacactcctggacgatcaattccctgagtgttttcaggcggcacaatttgacaggcaaatagttccagctgcagtctgtaactgacagtgtatgcaggcaggtgaagaattcaccaatctttgggggatcactcgatcccttgcaactccagaacataagattctgcaatgccgggcgatcttgttcctgttccttgtcgcaaccgtctcctgtcaaccagcttgggtatatcacaccaccgtaatccctgatgcaaagtactgtaatccccgacggtggacggagcccctcaagaacctcctcctgaagttctggaggttgatgttgcttgatctctgttacaggtggaaagaacagcttcttgtatgactccaacgctttcttcgagcagcgttcgtcagtgccaccccaccgtagcgtcagctcagtgagatataccttgtcagatagcctggctcgaacagcttcctccttgctctgaacattctcgatgcagtcgatgaacagcttgccacgaaggttgttcaggtgctccagctgctgtatctcgtatcctttctccttcctcacgtagaagtgatacagagctcggagagatgtcagcttcccaacatcaggaatgttcaggccataccatgtcagcatgtacctcaggttgatcaggttggcgatcttcagctgggatggacaatgcaagcgagtgttaggattgacagagagctcctgaagatggtaaagcttggaaaattcagccggcagaatcaggctgtggggaggaggtgacatgatgccaagataacgaagatgtttcagtccaccgatgcatggtggcaccctgctcaaatgtctcaaatccaagtgcaccaccctcaactttgttagcttcttcagcacacgctcaaaatcatcttggttcattccctctactgaatagcacatgataagagttctcaagtttttaagctccaaaatcttctctgggaacaatatttcactgtgactcgatgcaaagatgtcgaacgtgtttagtgttagcagtaatcttgtgtgccacggttagttagttgattagttatctgcatgtttacgtttttttctgaataaacgcatgagctcacgtgttgtgtgatagccatcgtgtggagtctgttatgagggtatccgagtttagctcgttgcccgcgtcttgtgctgggagctcggatcacgtcgtgtggttgtggggatggacgcagctagagcatggcgtgagaagtggtcttggtggttagttgtttccgttgtattcgttcctttatatatggaagtaaacagaaaagcagctgagttaagcgctgcacaaaatttgctctgtttcctctgttctgcgaatttgcaggtttagccacagtacgcgtgcgttgtgttcgtctggtttcctgctagcgatcgctggggaaattcctaacaattggtatcagagcacggtttaggaagtggactcgtgaccgcgcattggaaggcgtcttcttgccgcgtcgtcgctcgtcgtcaccgatcgtgcacactcctcatgactccggcggccgcgccacgggcagcggcgggggtgaccgcgggctggtgatccaccgcgtggtgaaagaaggaggcggctcggtgaactacccgctgctgaccaagaccaactacaacgactgggcgctactgatgaagatcaagctgcaggctcgctgcctgtgggcggcgatcgagcccgacggcgtggacgtccctctgcatgaggaccggatggctcttgacgctatctgcagtgccgtgccgccggagatgattggcaccctggcgaccaaagcgtcggcccgggaagcctgggaatgcatcaagacaatgcgagtcggcaacgaccggattcgcaaggcgagtgcacagaaagtgcgcgctgagtatgaatcgcttgcgttccgcggtgatgagaccgtggaagatttcgctctacggctcacaaccatcgtcaaccagcttgcaaccctcggtgatcctgaacctgctgataaagtcgtcgaaaagtaccttcgggtagctcgtcccaggttcaatcaactcatcttgtctattgaaactcttctcgatatctctactctgtccatggaggaagttactggcagactgaaagccgctgaggattctgggcaatcctcgtcgcacaccgccggtgggaagctgtacctaactgaggaggagtgggctgaacgtcagaagaagaaggatcaagaggcaaagcggggtgactcgggcggctctggcggccgcggcaagcgccgtggcgggagagggcgcactggtggcggcgggactgcgagccccgagagcacgaactctggttcggcgcgcaagggagacaaatgccgaaattgcggcaaacttgggcactgggcgaaggactgcaggagcaagtccaagcgcgaagaacaggctcacgtcgcccaggaggatgaagaagagcacaccttgatgttgctcaccggcggttgcgttgacacggtcgacgcggcggcgccggagggcgacacgcccacaccgccccaccaagccgtggtggaactcgtggagatgaaagtatttgcagcgctcgacgacgcggctgaccatgatcccgggcgctggattatggattccggcgcgtcaaaccatatgacgggcagcaggatggcgttcgccgacctcgacacgaacatcacttggaacgtgcgactcggcgatggatccgtggtccggatcgcaggacggggcacaattctctttgcctgcaagaatggtgagcaccgcactctgtcgaacacctattttcttccccgtcttgctgccaatattatcagcattgggcaattggatgagaccggcttcaaagtgctggcggaggatggcatcatgcgggtctgggatgagcagcggcgtctgcttgcccggatccctcgcaccccagggcgactgtacatgcttgacatcaacctggcgcgcccggtctgtttggcggcacacgccgacgaagacgcgtggcgctggcatgctcgcctcgggcacataaacttcagggcgctctgcaagatgggcaaggaggagctggtacgtggtctaccatgtttgtcgcaggttgatcaggtctgtgaggcctgtctcgccgggaaacaccggaggtcgccgttcccgcggcaggcactttgccggtctgacgagccgctggcactgctgcatggagatctctgtggaccgatcacgccggcgacacccagtggcaaccgctatttccttctactcgtcgacgactacagccggtacatgtgggtcgccctcctctccaccaaagatgcggcgccggctgccatcaagcgtattcaggcggcggcagaaaggaagagtggacgcaagctccgcgcgttgcggacggatcgcgggggagaattcacgtctacacagttcgccgagtactgcgccgagctgggaatgcggcgcgagctcacggcgccctactctccgcaacagaacggcgttgtcgagcggcgaaaccaatccgtggtgggcacggcgcggagtatgctcaaggcgaaggggctgccaggtatgttttggggagaggcgataaataccgccgtgtatctgctcaacaggtcgtcgtccaagggtatcggcggcaagaccccgtacgcgctgtggaacggcgttccgccggccgtgcaccatctgcgcacgtttgggtgtgtggcacacgtgaagacgaccaccccgaacctgaagaaactggatgacaggagtcgtccaatgatctttgtcggctacgagccggggtccaaggcgtatcgcggctatgatccggctactcggcgtgttcacatctcccgtgacatcgtcttcgatgaagcggcccagtgggactgggatgctgaggcggccgctgatctcgacaccgacttcgtcgttgagtacaccacggtgtaccatcctggctcgctgtcaggaacacgccaagacgctggggagccgcctgctcgatcttcatcatcgccgcgaacgccatcagactcaccgacagccggccgaacaccttcggtgcatggcgatgcgccggcggttgaatttgtgtcgccaccaactggagcagctgctaatcttgatgcagaccacgacgacgcaccactccgtttccgcacgatggacaatgtgctggggctggccatgctgccaggtctcgctaatcgtgaggtccaggaagagctgatgatggtgagcggagaagaaccggcaacgttcgctcaagctgaacgcgacgaggattggcgtcgggcaatgctcgatgaaatctcttcgatagaggagaacaagacctggaggctcgtcgatctgccttcgggacatcggccaattgggctgaaatgggtgtataaactgaagaaagatgctcagggcgtcgtcgtcaaacacaaggcgagattggtggcaaagggctacgtgcagagggctggaattgactttgatgaggtattcgctcctgttgctcgtcttgattctgttcgtttgttgctcgctctcgctgcgcaggaaggttggatggtgcatcatatggacgttaaatcagcgttcctcaatggggaactgattgaggaggtgtatgttgttcagccaccggggtttgagatcgatggacaggagaacaaggtttacaggcttgataaggcgctgtatggacttcgccaagcacccagagcttggaacaccaagctagactgcacactgaagaaacttggcttcaagcagagcccgttggagcatgggctgtacgcgcgcggcgatggcagtgggcgactgctcgtcggtgtgtatgtggatgatctggtaattgtcgggggtgacagtggcatgatcaagggattcaaagagcagatgaaggctgaatttaagatgagtgatcttggtcctttgagtttttatcttgggatcgaggtacatcaagaagctggaatcatcactttaaagcaagcagcgtatgcgtcgcgtattgtggagaaggctgggctcaccggctgcaacccctgtgcaacaccgatggaaccacgtctaaagctgagcaaggaaagtgcaggatcgctagttgatgcgacagaatacagaagtctagtgggaagcttgcgctatctggtgaacacccgaccagaccttgcatattcggttggttatgtcagtcgtttcatggagaaacccacggacgaacacttggcggcagtgaagcgcatcataaggtatgttgctggtaccattcatcttgggtgccgctatgtgaaggaaggtgaaggaggactgcagggttacagtgacagtgatatggctggagacattgacactcgcaagagcaccacaggagtaattttctttctcggcaaaaatcctgttagctggcagtctcaaaaacagagagttgtagcactctcctcctgtgaatctgagtatattgcagctgcaacagctgcatgccagggcatttggcttgcccggctcctcggtgacctcaggaatgcagcaactgaagtcgtcgatctcagggtggacaaccaatccgctctggccctgatgaagaaccctgtttttcacgatcgaagtaagcacattcaaacaaaattacatttcattcgtgaagccgtggagaatggggaaatcacaccgagttacatcggcacagaagggcaacttgcagatatcctgacgaagccgctttctcgaatcaagtttcaggagctgtgggaacaaattggtatgtttcctgtataatcggcacatcaagcttagggagagttttgttagcagtaatcttgtgtgccacggttagttagttgattagttatctgcatgtttacgtttttttctgaataaacgcatgagctcacgtgttgtgtgatagccatcgtgtggagtctgttatgagggtatccgagtttagctcgttgcccgcgtcttgtgctgggagctcggatcacgtcgtgtggttgtggggatggacgcagctagagcatggcgtgagaagtggtcttggtggttagttgtttccgttgtattcgttcctttatatatggaagtaaacagaaaagcagctgagttaagcgctgcacaaaatttgctctgtttcctctgttctgcgaatttgcaggtttagccacagtacgcgtgtgttgtgttcgtctggtttcctgctagtgatcgctggggaaattcctaacatttaggaagatgttccgtgatgcttttctcgatcttgacgcagtcgcttcccgcgatcgtcttcgctaattcatggaacatgtcatgaactgtgaagtactcaccggtgctaatgtcagagggactgaccaacatcttctacgtcctcattgtttccatcattgtccttcacaaattcttgcgctatccacatacgaacaagattgtcacgttcaagctcataccttctggggaagatgctacagtactggaagcatctcctgacatccacaacaagttgattatagctccaccaaagagctcccttggtcttattcagcacatcgaggttcgcggttgtttgccaaaatctgatatctgggtttctccagagctgacctgccactgtcactgctgcaataggtgatctgttcagcttcttagcgattttcctcccaatcggtatgtattctcgatcatcgaaaattgtactgtcaagtgcataatgcatgaacattgagaagtattgctcctcttccagatcagatattggaataagcctattagagcctagagctgcctctttactctgggctgtcaccaggattctgcttcctgacttcccaacattgagtggagaaagcagcttctcatgattctcatcattgacccacagatcatccagtaccaacaagaaccgtttgcctctcaaattctccaccaattttgcttccaaacctctgcagtcactaatttcagaatgccggctttgcgtgatctcctcgagcatatcacgaaatatatcttccagtctgtaagtcttagaaacataaattagcatgactgtgtcaaagtatctatctttatcctccttttcatactcacaaacatactgtgccagtgtagtctttccagaccctggaatgccatatatgcaaattacagaataacatttcctgctactggagcttggtaaagaatcatcctcacgaagcatacttcttatcatatcacgctcccggtctctaccgaataccttgcgtgtactactcgatgtaatgcttctcctgttcatgttgacaatatcattccaggcaccactgcttgtctgtgttaaatagggagagttctccacgtttgtgacagtgttttctagtttctctattcttttcctcaatttccatctagcaatagcaggcatgaaagaatatactgctgtaccatcctccagctggaagaataaagaacaaaaaaaatgattagaatggaatggtggaggaatgtgcatactttccaagctcctaaatggtgcattttttgcgaacactttctatatacgaatttattaggaaactcttttaaatccatttccactttatagtatcaattcaattcgtatgtacacttgaataattatctttaatcattgagctattcaaccaatttagccattcagcacaaaagaacaggaccatgtgagctacatactgaacttccttaaaaaatatatatatactgaactagttctactctctgacgactgttgtcccctgattaataatagatgttgttttcttctaaattagtgcttctgtttagaacatggaaattttttcttgttacttcaaaaattgaactattagatgtagtaacattagtggtgtctcaaacactaagaccctttaacacattccagcaactattgatttccgaataaaattgaggagcgcgacataaattttaccaagatcatagcccgtgcattgtaactccttttgcatagtgtattagtgttgatgcaaaataggaacattcccctagattgagagaagatgcattgctagattggggtggggtgtgtgtgtgttagggggcagagaagtggtaaccaacctggtaacctgtggctgtgatgccagttgcatcataaaaccaatctcgataagagcgagcaacctcaaaccagttgactgaccagatgaacagggattggcagcatctgatgaaatcaaattgcctggacaagcaactaagccgctccagcaaggagtcagaagctgacccgcagcatctgctacaagaaatcggtagcagcgcagctgatctgctgcgtagcgatcgatacaaaccctgtgcccactccagtagagtggttatgcatctcccaatccagctcgtcttgcaagcgtggatggcatcgtcgatgtgcggatgccatttgctgctgcttccctgtggctcgtcatcgccgatgacatccttctcgatctggtgataagcaatgagatcgaggacgtcttctgcttcgtacaaggcagacttgaccagcttcgccagcgtgtcgagattttgcacggctgatctctccttcttcgctttcctgtgcatcctctcttcctctatctttcgcagcatctgctccagcttcgggacagtctgaatctccagctcttggatctttggcgaagcgtcgaagaggtaggagatgaacctgttcacgagcaagctgatgataggcgacagcaaccaacctagcacggttatgacagagcccatggctgcaatcctccatggatttgccatggaatgcaagcttttcgatctccttcacaaaggggacaaagttaaggagcagtgggaagaagaatggagctctactactgtcttggtagcaatctatctatcagcaaactatgcaaagcatctgtcttctagcgagctcagtacagtgcaaaacttaattaagcagaaatttcacccgaaatttcttgcgaatcatcatttttttttcctgcaagtgtcattactgaaaatgacttgaccacatagcatgtggctaaccgactaataacatagtcagacttgttttcgaactaatgcatatggttagtacattgcattacatagcttccccgagtttgcagctggctgtctgatatgatgtagtgtaacctgcacgtgagtccatgtgacatgacaatcacaacactatattatgactattattaacacaaggatcagtaatacgaagagtgacagcagtaattggccaatgattcctctctgggttgtcaaactaatgttggcctgattccactctcttcaatttgttgtaatgattcgttcaaaaaaaatgttgtagcaatgaataaagaagagccaggctcttgtttcgaattagagaaatatatataaaaaaacagctcgttaaggagtcacattagatcgttccttttggaatcaataataatcattgactattaaatcatagtcatgaggtacagaatattaatttagcctaaataagtactgttggatttgtctattggtaccaagttttttctggcagtctgcatctatttatttactagcaaaatacccgtgcttcgctacggtgtattaaaactaaaaatatttattttcatctaaagttattttcacactgttttggtactttcgctcactagaaaaggtctcaaataatagagagaaatataatagctcataataaattattattgcaacggaataattttaactaaaatcacaataaatattttaacatgttgaaaacaatatatttcttgtttaccagatttaacattaactaaggttttatagcaattaaaaaaaagactaactttctcttggtggctaatttttatttttagttttttttctatgaattagattggagagaaaaggaaaagggaaaagaacagtagatgataaccagaaaaaagaaagctaaccaaagtgatcaaggaatcggacccatgacctgtcggcacaggttttctaggctaaccaattgagaatcatggacgttttgacatgcactgcattatatagatattcacctgaacagcaaagaaaaatatcaccccacctcctctcgaaccttatctcttctctaggagaaattagacattctgccactcctaagagtgggtttcgccacaatgccattctgcggaatggcatcgtaaaataccactttcaaccgatgccaaaccgttgctttgccatattcgccatttcataagattttcaccttttttgcacttcaaccgaccaaaatacccctctctggtttctttctcttctccggtaaacatgtgggatgaggagaagaccacgacggcaggggtggcactaacctcaggctcggcgccgccaccgccggagctctcctcctcgtcgtccttatcttgctctacaaattcaagaacgcaatcttttagctcaaaccacacacaatccggagagctagcgagggcgagcgcgagggttccggctcacctcccgccgccttggtcgccagcgagggcttcggctcacctcccgccgccttggtcgccggctcgtcggtctccatccccgccgcagtcaccgtgccaaccaagcccgagacggcgacgcaggtctcgtcctgccatgagctcctcctggagctagccttcttgggccatggtggcgggcagcctgcgacgcgcggcggagacgacggcggaggagatggtggcgagcggcgcacggtggtcaacgggagaggagcagcgtggtgaccggcgggcgagacgatgcaggagattgtggctcatgacgcggtggccggcttagggtttccttctctttctccgatgtgctggcagcgggcttcgaccatgggggcgggacgtcgctggcggtgagcttgggcgtcggcggcgcgccggcggcacgaacgactcggttgtgacgaccggaggggtattttagtcagcctgggtggaaaaataggtggaaatggagagaattggcctaaatggcaaaacaaatgtttggcatctcttgtgagtggcattttaacgacgctattccggggaatggcattgtggcgaaacccactattggcagtggcataatgtccaatttctccatctctagaatcctccgccttcgcttctctctcgtcgctctctctgtctcccagtttctcctccccagcgacagcgacaaggcgcccgctccctccgtctcgcctccctggccccctcctctcccatctccccctcttcctcccgtctcctggcaaggcgcggcgacgggaaggggacccaccgccagcgccgtttccccacagctattccctccccttcctccaccctcatccctcccgcggcaggcagatctggcggtggcggtggcctcgcgacagctgcgggtggtggcagcagtggctccctccgcccccagcagccgcgggtggcgtcagcggcggctccctccgtcccctgttgcctcccccctcggttgaaatgacggcggtagcgggcgccggcggcgcagctcggcaagccactgccagcggccactcgcgggatgtggccataggaggaggcggcggcagcagcaaactccactcgatttttcattgatttggtttttttatctccgtttgctgttcttctattcttgtatttgggatctaacacggattaaaactttttgtgttatttgacgcggactcatgtgtatatgcttctatttgtgtgattgaattccgattaggattttttttggttgggggatgatagaattccgactgagattttgggtggggggttggatgaacgaaaaatttgggtaccgatgatgtgacgaacagaaaattacgaatttaagattttaccctcgttgccggagcgtgctaggcgaggcagccgccgccttcgtcttcgacgtcctctttagacgagtgatttggaatggccttcggcccagcccaactccctacgtaatgggcccttcttttatgaacgggattgggctgtgttttacaggccgagccaaatgcagtttggaataagttcatataaggtccgttaactttacaccgaatacgattttcgtccttaacctaaaacaagatacaaccggtccatgaactgttaaaaccggtgcaaacgaggttcctcggtggtttggaagacggttttggctgacgctgcgcctaagtgctgatctgactcggtcttcgtcccacgtggcattgacgtgacgcttacgtgactattttatcctagaaaaataataaaaacggtggtcccacatattagctacaccaatttttttaaaggtggagcccacatgggccccacataatcattcacaccccctcttcttcctcctctccccagctcccctttctagtttcttctctgtgtcctattcctccccagagccggcggcattcatcgtagcaccacggcaccctctctccctgctctacctcttcggcttctcctctccccgagattccctgacttggtgccaccgacgaccacatcgagccaccatctgagccccatgggagcactgcatcccaaggcgtcaacgacctgcataatcccgatctataccagcaaggatcctcggatccatacaagcagtgcctcatatttttatccatctctccttccaactattttttctctctatttttcttccgatctcttctcaagatttgttatatttcttctaatctgatctgacatgtgggtctcattattttttaatctgacatgtgggccaaaatattttgttttattttttaaaatattaaattttgcttcgtgtgtcacgttaatgccacgtcagatgaagaccgaatcaaattagccatgtaggcgccatgttagctaataccgccatctaaacggacctatattgcacagttgaaggaccagttgtatctgattttcggttgattgacgaaaatcggattcgttaataagttaaggaactcaaatgaacttattccaatggaatttctgcaagtcgtccgagggaaaagttcgataattttatgggccgatatagatcgacgtggaccaactttgtcaactttgtgggccgatatagatcgatatacatgggctagttagttagccgtggtaatgggctgggcttgggttatactaactgagaatcctttttatctcttaaatatctgtctcttctctacttatctctactattataaaaatttaaaatgctttaactggtactttagtgtgttattcgtgtatgagtcggtttttaagtttgttcgcttttataaatacagatccgtatttgagtcgggttttaagttcgttcgtttttagaaatatagaaggagacgtataagaaatcctttttaaaaaaaaaactcgcatgctaactttaaatgatcataatcctaattacagctcatgattttttagaaaaatatatatctaagtgaattatcatagtgaatttcactttaactaaaccatataataataataaaattaaaattagccttcaactgttgaaacgcacgggcatttttctagtattataaaaattaaagatgtttccgctgatattttggtacatcgttcgtatttaagttggtttttaagttctttcacttttaggaatgtataaggagttgtataagaaatccttttaaaaaacatgcatgttaacttaggacgagagtcggagtcctagttgcttcagaattcttaccaaactataagaaatcaacgtatatgatatgaccatcatcccaataaaaattccaaattagatatcaatactatcaaaataaatatcccatatactttttagaaaaagaaaatataacaacaatatgattaaaaatagtctttatccgttacaacacacgaatattttttctactaaacgaaaacaaagaaatctacgtaacgggagggatcccctcccgtgcaagtacgtatccatgttcccttgcttcccataggcaactgctccttctccctcttacttttagtggaagctactcccgctactaaccatgggtataaaaaataaagattaaataaagaattatcgtaaaattataggtttagtgtcaatttaatcacaaaactataacgcttcactggtggagtaaccatctttcgtcggtcggccgatttccacaatagtcccggttgcaataaaaaccggggctaaagatgatctttagtcccggttcaaaagggtaacgggcatatttgatctttagtcccggtttgtgttaccaaccgggactaaagatcatctttagtcccggttcgaatgctgtcagggcctgtcaggccccctgggatctttagtcccggttggtaacaccaaccgggactaaaaatcgtaactttagtcccggttggtaataccaaccggaactaaagatcccggtgatctttagccccggttggtgctaccaaccgggactaaagtcccacccctatatatatgtcttcttcctcctccagctgcccgagcaagcttcaaaatttcttcaaaaaagaggggaggtcatgccaaaatttctattgaatttattttggtgattacatacaaatcggaggtgcctaaaaggtttacaacttcatcctccaatgtttttttttgtcatactacatttgcacctatgttttgcacactttttttgtctccaaaatttagttgtaagttgatgagagagaaaatgtgtgtggggaagaaagaatatatagaaatttagttcatttgctaaacaaggttttataaaatagttgagaaggaaaactctagtgaaagttaatcttaaataatagaaaacaaactaaaatgaaaattaaaagaagtaaaacacattaaaaatagtttaaaactttacaaatagtttttaagaattatttggtgtaatattttatgatttttgtatgaataaagatatcttataattattgtatgactgtcattattgtaagaataattatttgtgtacggtttttttgactcatgtagatggatcggcaatggatgtacgctgaccggcggtccaaagagtttattgacggcgtgcactattttttgagagtggccgaagctaataggcaaaggggttttatttgttgtccatgcaataagtgtaagaatcagaaggagtattctgcatccaggactattcatttccacttgtttgagtcggggttcatgccaagctataattgttggacatcccacggagagcaaggtgttgaaatggaagaagatgaagtggaagacgacaatattccggactttgctcagtatgttggatttgaaggaaatcaaacgggcgaggaggaaatagctgctgatggtaacgacgttgcggatgatcttggtcagatgttgcaggacgctagggaggactgcgaaagtgaaaaggaggcccataaattggacaagatgttggaggaccacagaacttcgttgtacccaggttgcgagcaggggcacaaaaagttggataccactctggagttgttgcaatggaaggcaaaaaatggggttagtgacaaggcatttggcgatttattgaaactcgtcaagaacattcttccggggggaaacaaattgcccgagacaacgtacgaggctaagaagatagtctgcccgttaggactggaagttcataagattcacgcatgtccgaacgattgtatcctatatcgcggtgaggagtatgagaacctagaagcatgccctgtttgcaaagcactacgatacaagattagacgggacgatccaggagaagttgacgggcagctaacaaagaagagaattcctgctaaggtgatgtggtatttccctataataccacggctaaggcgtttgttcaggaacaaggggaatgctagaatgttgcgatggcacgctgaagagcgtcaacaggacaggatgctgagacaccccgccgatggttcgcagtggcgaaacatcgagagaaaatttaaagaatttggaaaggacgcacgaaacatacggtttggtttgagtacggatggcatgaatccttttggagagatgagcagcggccatagcacttggcccgttacgatgtgtatctacaacctccccccctggctatgcatgaagaggaagtacataatgatgccgattattattcaaggccccaagcaacctggtaacgacatcgacgtgtacctaagaccactggtcgaagatcttaaacagttgtggaagaaggaaggtgtccccgtgtgggacgaggacaaacaggaggagtttaacctacgagcgctgctgttcgtaaccatcaacgattggcctgcacttagcaacctatccggacagtccaacaaggggtacaaggcttgcactcactgtatggatgaaacagaaagtacgtatcttaagcactgtaggaaggttgtatacatgggtcatcgtcgattccttgcagcaaaccacccggtacggaagaaaggcaagcacttcgaacataaggccgaccaccgtacgaagcctaaacatcgcagcgggaaaacagtgtttgctatggttaaagatcttaaagtagtgttcggaaaggggcctggaagccagcatatagagagcgaagatggtcacgcggcgatgtggaaaaagaactctatattttgggagttaccatattgggaattcttggacgtaccccacgcaatcgacgtgatgcacctcactaagaacctttgcgtaaaccttcttggcttcctaggtatatatggaaagtcgaaagatacactggaagcacgtaatgatctgaagcatatggaacagcgcagcgaccttcacccggaaccaaaggagaaaggcagccattacttaagtccagccagctacactcttagcaaggcagagaagtaaagtatgtttcaatgcttggagagcatcaaggtaccatctggatactccacgaatattaagccaataataagcacgaagaagaagaagttcacaaacctaaagtctcatgactgtcacgtgttgatgacacagcttctaccaattataataaggggtatcctcccagtcaatgtccgggcaacaataacaaagctatgttctttcatgaacgcaatttcgcagaaggtcatcgatccggataggttagaagcccttcagaatgatgtggtgcaatgtcttgtcagctatgagttgatatttccaccttcatttttcaatataataatgcatctgctttgtcacctagtgaaagagatcggtattctcgggcctgtgttcctacacaacatgtttcctttcgagaggtacatgggcgttctgaagaagtatgttcgtaaccgtactcgtccagaggcaagcatcgccaaggggtatggaacagaggaggtcattgaattctgcgtagaatttattgaagaccttcgcccaatcagggtacctgaatcacaccatgaagggagactatggagaaaggggactctcggaaggaaagcaataatgacggtagacaacaatttattccgtaaagcccatttcactgttttacaacaatcttcattggtggctccttacatcgaggagcacttggctctagttcgcgccagaaacatcggtaagtccgatgcatggattacacgacatcacattgatactttccccgcatggctgcgacaacatctcatgggtaacgagacgattaaccagcaactggccttcctggcgaggggtccatctggctcgatcgcgacattccagggatatgagatcaatgggtacacattctacacacgagcccaagacataaagagcacgaaccagaacagtgatgttcgtatcgatgccatgggacacgatggtacaactggcacatattacggtgccatcgaggagatatgggaacttgactatggacctctcaaggtccctctgttccggtgccaatgggttaggttgactggtggaggcgtaacgattgatgacagtgggatgacaacggttgaccttaacaaggttggatactcggacgaaccttttgtccttgccaatgatgtaacgcaagttttttacgtgaaggacatgtctagcaaaggaaagaagggcaaagggcctgacgagccgaagcgccacgtggttctcccaggcaaaagaaaaattgtcggagtagaggacaagactgacgaggattacgatcagtttgatgggcaaccccctttcacggtgacgattgaccctagcatcctcctatcaaatgaagacaccccttactcacgtagcgatcacaaggaaggaacaatagtgaggagaaagtacgtgcggacaatcgtcaccgccgatgtattgccgtaattgttgtaaactattttggatgtattgaatatgctagttatatatgatgattaacaaatttaaatcatgcatatgctaggtatatataattattagaatttttaaaagttttaaatcatgcatgtgggatttacatatgttaattagaatttttaacaatttaatatcatgcatatgctaaataaatatgattattagaatttttaaaagttttaaatcatgcatgtgggatttacatatgttaattagaatttttaacaatttaatatcatgcatatgctaataatatatgcttattagaatttttattaattttaaatcatgcatgtggtatttacataggttaattagaatttttaacaatttaatatgcatatgctaattatatatgattattagaatttttaacaattttaaatcattcacgtgcttattatatattatccacttaatttactacagacaacaataatttttcgaaggttttgtcattaatttttcgactttaaataattttaatgcattatttactattttagaaacacatatgcaatgaaattcaatattcagtgctattatctttagtccggttcttaaccctaaccgggtttaaaaagaatttggaaatagcgggaaaatatctttactcccggttggtgagaacaaccgggagtaaagatatctttactcccggttcgtaacaacaactgggagtaaagatcatctttactcccggatgttgttaaagataagatctttactcgcggttgttgatacgaaccgggagtaaagataactctcaccaaccgggagtaaagatctgggggtatatatattcccagtgcgccctcgtcttctctaccaacattagacgtttttcctccgatcggcttctagctccttcgccgccactgcctaggcatccccgtaccgacaccgccgtcgtttttcgccatcgtctcgaggtcctcgccgcctccgccgccgacgccgccgccgccgcatctctcgggtgagagccgccgctgcctccctctcttttgatctcgatctcgatctctctctctctccaaaccgccaccgtctagctcgttgccgacgccgccgacgacgtagacgcgccgatgccgacccctactccgcctgccgccgatgccaaccccgacttccacgcaaccgtcaccgacgacgcc

SEQ ID NO: 6253 - DNA, 33481 bp, Oryza sativa
  unsure (1)..(33481): unsure at all n locations
taactcacacaggtggcaatttcatatgtatgttaattagagtttttaacatttaatttactagcattcatatgctaattataattgactagaggatttttaaaagttttaaatcacgcaagtggcaattttaaatgttaattagagttttttaacatttaatttactatcattcatatgctaattataattgactggagaatttttaaaagtattaaatttaatatatttttaaaactatcattcatatattagagtttttcacaatttaatttactatctttcatatgctacttatatatatgactattcgaatttttaaaaggtttaaatcatgcatgtagcatttacatatgttaattagagtttttatcatttaatataatataattcctacgctaagtatatatgatgattacaatttttattaattttaaatcatgcagtatgtacatacatatcttaattagagtttttaccaacataataatatcattcatatatatgctaagtatatatatatattggaatttttattaattataagtcatatatttgcttattacgatttatccacttaatttattacagacaaaaataatttttcgaagtaattgtcattaatctttgtactttaaataatgttaatgcattaacttctattttataaacacatatgtaagcgaaaatcatatgcagtgctataatccttagtcccggttgttctcaacaaccgagagtaaagatcttttctttactcccggttgttctaaacaaccgggactaaagatatctttagtcccggttgttgagaacaaccgggagtaaagatccggggtatatatattctcggtgcgccctcgtcttcttcaccagcacttagacgttttcggccgatcgatctctctcggcctctctccttcgccgccacgagacgctcaatttcatcatcaatatcacagcccaatcacagaaattcaaagaagctcatatacatctcaagttgttgaaatacatcacagaagtttcaatgttacaaattacaagcactcatggttcaattgacaagttaaaccaaatacaattcacaagaaaaattgaaccattcattacattcctttcaaataccacaatccatcggcaatccagtcccgaaattggttcatgacacgcgagtccaattcatttgttggttcgctagatggagaagaggttccacccaatggatcataattttcatcatggtcacaattgtcgaactctgtatcagccatttgactgtctctaatgaaattatgaagtgctatgcatgcatggataattctgctttgcttttcctgcgagtagcttggtaaactaaacaaaatcctccacttgttcttcaagaccccaaatgacctctcaatgacattccgacacgaagaatggcagtaattaaagtgctccctttttccccttggcaatgtgctttcgttgtactcttggaaatgatatgttatacccttgtatggtgctagataacccggcctatttgggtatcccgagtctacgagataaaactttcctggaggtggctttggaaacttggcactaaatctagtatgtgcatcattgaataccctcatgtcatgaaccgaaccaggccacccagcaagcacgaaagtaaatctcatatcgaagtcacagacacacataacattctgactcttctccttatgtctattcctatgttgaacagcagctgaatttggcaccacaacttggatgtgagtaccatctattgctccaatgcaattatccaaatatggtgtgtactgaggagaaagcaatttcttatggaatgttgtgaataagggatcttttggcctaatgatatcttgtgcaagtttcagtagagcggtcaaaactgctttgaacttactatgtactgttttaagagacctaacaaatctgtcttgggcttgcctaactgattggggagcacctactatccataaaaaaagacccaaacactccatggaatccatgttgtttgtggacttcaactcatatgattccacaagcacagaatgtaacctctcaaaaactggcctgtgcatcctaaacatgttgtaacaagcagttctattagctaatgttctcataacccaatcatgtccagactcaggtgctacccttcttggagccttattagagtaaagttccaagtaatacgtaccaatcatggcggcaagcatacatgctcttctcctgtccatttctcttttcttcaaaatataaatgataagatcaatctcatcatcactgctatcttcatcagagatatcttcatcaccactgccttcaccatcctgcaggtgtgacatatgcatagaaagaaagcacatcataaatataatatgaacaaacttcaagaagaaaagaagggaaggtttaaataggtccacacatcacatgttcattacgtcacatcacatcaaacaagttgatagttcaacacaaaagtagatcataactaatgcagctaagacacaactaatgcagaccagacccatgatatgcagctaaagaaagggatcatctaatacaaattcttctgctggcaccatctcctcagccacataaatcttgcttctttagtgctaatgttcttaaacataactctgttatgtttggaagcaaacaactgtgtggcacaaaagtattccacactgtcttctgctgcaccacactctactgccaacctctgacagtttgtcaatgactcagcaattgattctttcttctgctcctttaacttcttgctgttaacaagttcagtaattagggtatttgacttatcacaatcagagttgaaagaattgagcagccccttcatgagctgcaccactgggctcttgctttttttcccaggactagaagctgtggacacatcacagctgctactccctctcttcctgctgttattgctcatggggctgttctcataaccatcccctacagctctttcccctctagctgcctcccctgcatcccctgcttcttcttctccttcctcttcatcttcatcttcaaaaccagggatgtatgctgtggaaccatcaactgcaactccttgaaatatctctataagaaaatctaagtactcagggttgccatggcgaaatttcttggcgtcccccttctcctgtattgacactaaatcaatatcacagaaaactctaaaatcatgtaaactagctatatttttgacaactgcataccttaattttttttcccaccaagcatttgatgcaattatttctccactagcacttctaccagctccagtttgttggttcagccacacccaagcactgtaataattctttagatgggtgaatctattctttatctgtttggttgaatgccttaggttagccctttggaaatatttggccttcaaattctggtaccctctagttgtccatgctccattaggacaatgcccatccattatttcctcacatgctatttcacacaatgtgtaagttttttcttctgtccaatttgccttgtcatacgtattctaggaaagacaaacatgatttaaccctaaattaaacaatgaacaacatatactgtaatacaaatgcttagatcacggcatccatagcagtatcaatatcatgagcaacaattggcatatttcgcaatagcacaaaagagacataacagaaagtaaccatggggggtttaccatgtgctgaccatcaggaccaaagtcctcttcgtcttcttcgttgccgtcgtcctcggacacatttgtcccttgggacgacgaggcaccggctcgccgtcctcctccgaagactccaaagttgaaggcgggtggcccgctgtgcgacatggatgccccatgacctcggacgcctccttgaccagacgatgagccaggaggaacaaatcctcgcattcccctgccagatccagcgccattggtcaacgacctgccacggcctcgtcctcctcctctccctccacgactgctgccacgtccccctcccgccgctggaggaggacgtgacggggggactgtggatctgctccctgcccgaatcggaggtaacacaaggctacccggttcaaggatctgttggtaggaggcgaaatcggggaaggcgtcggcctgggagttcagatcgaggccccccgatccccctcccccaaaatggatgccggtgccatatccaccatatcctgaagacccctgcgagaagccgtagtcggagccgtccatgtggcccgttggagcttcatttaacgactgggagaagaaatcgtgaggatttccacccgccattgctgatgcgcgattcgtgaggcttgcgcgagcggcgtcggcttgcacgacaccggcgaaccaagcggcgggcagaggactagctagcgcgtagctgcggtgggggctaacgcaggacggcggcgagggcgcggggttgtgagtagcgagagagagacgacgcgaggaaatggatagggatggctggcgtgaaggggcagtggctggaatagagccacattttcccaatagagccactttagtcccggttcttaaccctaaccgggtttaaaaagaatttcgaaatagcgggaaaagatctttactcccggttgttctcaacaaccgggactaaagatatctttagtccaggttgttctcaacaaccgggagtaaagatccgggggtatatatattcccggtgcgccctcgtcttcttcaccaacacttagacggtttaggccgatcgatctctctcggcctctctccttcgccgccactgcctagggcaaatccccgcgccgacgccgccgtcgccgtcgtctcgagctacgtcctcgccgccgcctccgcctcctccgctgccgccgcatctctggggtgagagccgccgccgccagatctcccttcatgcatctcgatctctccgatatcgatctctctccgtcgcgccgcccgccacgagacgccgcgccacgacgacgacgcgccacgacgatgacgcgccacgccgccgccttcgccgccgccgcatgccaacgccacgccgccgccgccgccgatgccttcgccgtcgcgcgcgcaatgccgtcggcgccacgccacgccgccgccgtcacgccacgccgtcgccgccacggccccgcaacgccacgccgccgccgccgccgcgacgccgccgcgccaaccgccgccccgatgccgccacaccgccgttaacgaacgagagcgagaacgatcgaacgaacgagagcgagaacgaacacgtcaacgtacgttgccgcgagaacgtgaacgagaacgagaacgatcgaacgaacgagagcgagaacgagaacgatcgatcgaagacaagcgagaacgagggaacggacgtgaatgagaacaaacgaacgaacgtgaatataatgagaacgagcgaacgaacatgaacgagctagggaacgtgaacgaacgttaacgtgaaatgcaatatatatatatatatatatgttacttcgcatttatcctaatacatctttttgtatcttgcagaaaagacgtgttgtcggagtcgtccgtcaagccagagtggaagagctagccctagaaggaattggagcaggcaagtgacgtaataatataaatgattgttatatttgtaatgcaattaattaagattattagacctgtaattggacttatcatataagattgtgtagtgttctaatattatttgagttttaatataagattactttatttgtaattacacttagtatgtaattattgactacggaagtggtgcgacaagtagcaattgactattgtagtcttaattagacttagcatatacgcacgaaacacttagcatatacatgactattttagtcttagcatgtaatattatttgagttttaatataagattattttatttgtaattagacttagtatataattatttactagctagggttgtataatatacgtcaccttgacttagcttatatcacgatttgtaattagacttagcacgtaaggttgtgtagggttctaatgtacgacatttacacttagcatacatgacttagattgttaaaacataaatgtatcgtgacttagcagatgtttcttgtatcaacagatggctgaccgcgatgaggaacagatattgtacgatacaatcgcggagggaagcagccagtactggaatgaagaagaggggaacgaggatccaaaccagtacttgaacgaggaaggaaacgtggagagggatgcggaagggaaccagcaggggcacgtggaaagggatgtggaggggaaccaggaggaggaggctagtgatagtcaaccctccgttggacagaagagggcacgcgggcaacgaggtgcagcgaagaagcttgagggtcggcacatcataacggaagtgcaagaagatggacgtcctagtgccccggccgaagcagccaagaactatgtacgtcacagcggttgggttgtgcgggataacgtgcctgtcagtacggtgtactggcgaagaacaagggcacgcggagatcatgagagctttgtcccagattcggagaaagagatgctgtggaccacaatgctcgagacattcacccttcctgcgggtacagaggacaaagtgaaaaggtggactctgaagaaaatggcagaacagtttcagagcttcaagggagatctgtaccagaagtatatactgaaggggcagacaccgaacttcgacacattcccaaagctaagggatcactgggacgagttcgttgcttataagacaggtgaacaagggcaggcgatgatggaaagaaacaaagaaaatgccgccaagaagaagtaccatcaccacttggggtcaggaggctatagcgtcgcgatgccaaagtgggaggagatggaggctagcttgattgagaggggtatcgaaacggcaacagccaattggccggaacgatcgaagttctggtactatgctcacggtggaacgctcaacccagctgatggctcactggtcttcggcgatcagatacgagaggctgcacgacgactaacagatgcagtggaagcctcctctcagggcacgttccgaccagacagagatagggacgagctgacactcgccctacagactccagagcatccaggacgaacacgagggaaaggggtgattccttggaagattggtttcaaggaggacatccacacgtacaggagtcggatgaggagcaagagagataccgaggcgaagattgcagacctagagttccgggtatcgagctacgaactcaacatgcaagaggaggtggcaaggaaggttgatgaacgcatggccgcacatcggtcccatgatccccagccgaccattcctcctgcaatggtaagcccgtcaggaaaccgtagcagctgcgcctcaacggggcaggtaggatcacagagcatggacgccatgcaaacacaggacgaatcgacctgtcccgttgatgacatcactcagcggacaccatgtgagctgcatattcctttccagaacttatcaataaaggtaagatttagccattccgctagttgctgcttatatatgttgattactaataaataatctctcacaacatgaaggtggcgtcgggcatggccatcccaacggacccttcaggtacttaccactgcaggccgattccagcaggatactcgaaggtcgaagttgagttggtcgaggcgcgtacgaggacctcgagctggattaccctggaggagacggtgagacgcatctacgagacacaagccatgccattattctatggcgcaggcggtacatcatcctccctggtcgacaagcggcgtctcgtgcaccatctcctccggctccgccatctcctcctcatgatcctgcaccgtctcctcctcatgctccgccagcaccgtctccacctcaggctccagcatcgactcctcctcaggatcctgcaccgactcctcctcgtgctcctacacctactcccccgcaagctcctcttccggcaccttcaaagtcaagggcccccccagctgcaccgcctgcccacacaagggcaacgaagaaggcgaaagttgacgccgccaagaacaaggacccggggtacgattgcacgcaagaggagcttgacgcttacgttgcatcagaagtcaagagacaattcaagcctcgaagtccagaaaagaagattcctatagaccccattgtcaggaacttcttcaggggtatgtctgcatctgtcaaggaggccatcaagctatcggactatgagcgaacgctgaagaaagcatcttctggaaagtccaaaccagtccctcagcttggagagcaaccaaaccaggagatcgagccgttggtgaccggtaaagaaatgacgatagaacaatttattactgacaccggtctaactacggatcaattgctaggagtcgcaccaatcgaaaaggcggaagtgaaatacatgtacgaactcggtaaaccgcttgtcaagcctgagctgctgcagtccctacccacacaaatgtacaagttccatcagctgtacatggagatgagcgccaccggtagagagatgatcggagcgaggatcagggacacggacttcttgcaaggagatgacattctctggatcaatttcacacatatctacgaactataccagctggacgccgtcgacgtctctattatgagttgctggattttgtaagtatatcgttcagttagatttcttactatacgtctcctttaattaattaggtccttgtatataagtagactatagaaaataatatactcccttttatcgttgtagaatggagattcaaagggcccgacggcggagggttttcgatactggattcatcgaccctcggaaagtaaacgtcgcaatgctcgaccaatatccacaagaaacagaggacaatctcgtccatctcctgaaggcgcagcattacaagacgttcatactgttgccatacaacacagagttagtttaattgtactgtcttcctacataccaaatttcattcccgtacgaacttgctaagtgtttcatatgtaatgcatcccacgcacattgcagattccactgggtgcttttactcttcgacctggaggcctgcaccgtcaacgtatatgactcaatggataaaaaagagtctacgtttgacaaggttttcgaacttatagacaggtaccgtcataagttcctttgttaattaagaaaatcttgttatgttaattgctactacgaatcatagctttaaactccatgtagggcttggtatcggttccgtcaattggtccgtggcaaatggagagaaagacttaggcggaagttcaaatttcctgttagtacacatgctctacatttatatttctccgattcaaatacatacaagtgtatattaattagatctctcgttgtttgtcatttatttgtagtgcgcaaagcaaaagcagggaaataacttgtgcggctattacgtgtgcgagtattgccactgccttgcaaaccaaatcatcaccacaagagagctcgatgtacgtacaaataaattcaaaatttcagtacgtagcgatttcttgtttaattactaatcaatttcatacattcatatagtttattcgcatgagggataacctgaccacacacaaggaatttatcacggcggttcaagaacaactcatgggattcatcaacgaagaaatccttgatcccaagggtgaattctactacgacggaaacacaattcaccggtccttagcttctgagctagcagcgagtactactacgtcgaaatcgtagctagctaggacatataatggattgtaattaatacatgactacatatgtttctatatgcatgtgtacacattttctataatgtaaatatattttggtcatatatatatctatatacatatgcatttgcataacatatatatgtataaatacatatatattatgcatgtatatacatataatataatataatatatatatatacatatatatatgtatgcatatatatgtattgaaacatatatatgcatggtttatatatatatatatatatatatatatatatatatatatatatatatatatatatatataaaccatgcagcaacagggccatgaaaaaaaaaaaggtcagctcgatctttactcccggttatttcaaccgggactaaagatagcgatctttagtcccagattggtactcccggtttggaaaccgggactaaaggggggttacgaaccgggactacaaagggtttctccaccagtgcttatagcttcatagtggtagtgctagggatttaaaatttaaaatatgtagttttgtgacaacctcaatattaaatatgtagttttataatgtttggccttaaatatgtaattttaggatgaatttatcgctaatatatagttttgtgataaatttaccattaaatctgtagttttatactggtaattttataaaatttactcttaaaaaacagtgggatccacgtgatactgtgaccggcggcgagagacggctgccgctgcccagatagcccatcttcaatcataccattgcactagaaattcaaacaaagattgaaaactctgtcggcttctttttttttttgaaaaaaaagaagaaaatatgtcatttgtctttctgacacaggattgtataatgtatagagaaacatagttgccgtcacttgtgtatcgataatccctggtggaccatgaatacgaacaggacgacgcgtacagggtacagcaataatcatcgatcatcaacccaacaagacaacatggttgctgtatcttgagacaccaatctgaataatagacaggacatcgcgccagctcttcggaagttgcctttatttaatttgcactaatccatcgctacaatgatacaatctcatgttactgttcatcctacacagataaggatgtactcatgtaggttgagaactatattgagatagtgcttgctcacttttgtcaatatgatgcatacaatttgcaagaagtacgtgagcactcactttattatgctacagaaccaattttgcaatgtacttacacaacagtaccaagacaatgccctgtgaatatgcagttttttttaagctaatgaaagttttaattgaactcagttcgtcaagttgatacaactgtactgagaatactcccaaccatattatctctgaaacttcaaggtgaatatgcagctgtaatggtaattatctccgaatattcttgttcagtacattaattatcctctggctatattagcatggagttcttccagctagcactgaaagtagtggtctagctaatcctgttttgagcctcactcctcttaataatttccaatatgagagctcctcctctcatatccattgttatgagaatggcaacggggtcttccagctagcaccatgtcacaccctgaaaatcataaatatataaattgttgtttaattggaatttttagaaataattttaaaagccttgaagagaagatctagttttaattaataaattccaatataaaatggggccagataaaatttcattaaatactttgcttaattctataattcctagatttttctgggatttatttgagctaaggaagtatttttaataaatggaattgcatttcataaataatttaaattgaaaaaggttttaaaaaaagtctcttttggctttgggccgaaagtcggcccaaaacccttctctctctccccggcccaagtcggcccagtccgcgcccgagccgccgctctcctctctctctcgctgtcgctgacaggtggggcccgcctgtcagatcgtcgtctacctccggccgccgccgcccgaaaccctagtttcgcgccgccgccgttcccttccaaattcgatcgatcctttccgtttccggccgaattgatagaggggaaacaatcttcgggatctcctctaccttttctcttttggaaacatcggctaaatcggtttggaaatcgttggattcgaagtcgaatcggatcggcttttctctctccgagcccgacctttccttctcgtcgccggccgccgtgggccttcgccgccgcctcttagcccctttaaaaggacccccgagctcttctctaccagtcgcctccctcgccttcgcctctcgtcgtcggaaacgctctagcgccgtgtagcctcgagccgccgtcgccgccgttgctccagccgagcgccgccgccattccagacgtcgccgttgctcgggaagaccgccgtcgtggtcgccaagccgtcgccgtccttgtccgccccttcgccgtcgccgaagatcgccggagcaccatcgccgccgtcgacccgaagaccgccgccgttttaacctcgtcgccgtcgccgtccgttggtcttccgccgctcttttggtcaccggtgagttcgccgcgtcgcgctctacccgttggtgtcctccgttcgtgccgaagcgtcgccgttcgccggcgagcgtgcgccgtccgagccgccgagccgccgccgccggtggtgacgtcatcgctgacgtcatcgtccccgtctcccgtgagccggtcgtggaccgatcgatctcggccgtccgttttggatcaagtctgacggagctcgtggctcctcaccgggagaccgcgcaggcccccctttgccggttcggccgggggcttagggtgagatctcaagctctcgctgtgtgtggaaagatcgcgtgccaggaagaaacacgagacacggacgatgtatacaggttcgggccgctgggaagcgtaataccctactcctgtgtttttgtggattggtgtatgaatgagctacaaagtgtcagccaacttctcccccgttctaagctctaaatctggaaaagaatccaccaaccctttctctatgggcaaggtcctccttttatacttcaaggggataccacatgcacccttccctttccaaactggactgttcttcttctctttaatgggcggagattggtatggttgtcgtccaaatgacacttcgatgggacagctcacacctacctccactcccggcggagacgggcgcaacgtgagatcgtggctgcccgttgctgatgcgaccagtgtcagaccggtcattcttgtccaccacgcgtcagtttaacaacgtgcatgtttgcccttcttcgtgtaacaccttgcctgtaatgattaggatgaagcctggtataaatctaaccagggctaacgtgccatctctaagagataacacgctagctccggcttgagacgagttgccttgaggctttcgtcttgacgggatggggcgaggcgtgcgtcagaccgccagtcgccacctaacccttgatctgaccggtctgtgactggtcacagaccggataaaagagcgtgctgtactgcgttgcacgcagcgtgacacgcttgaccagactgcaataaatgctgttaggtgagcacagctgtgctcacttatcccatatatgtggcgcagacttctttaaggggtcgggggtgccccggccctccgggccngngcaagcacaaccccaccccccctcaggggaaatcacgaggagggcggacacctcaccctcgggcccgacgtccccgaaggtgccaggccacgtgggcgattgcgtctgcctcaagcctctggtcatgatactcccggtcccatatcaccgacagtagcccccggcgttatgccagagcaatttcctttcccaagggaagcggtcaagtgtgacgccacccctaaagcctggtgacaggtgggaccggtctccgtagttgggcaaaatgcccaacggtctcaatccatgcacattggtattgataactttgtttgtccataatgggcggtctattcaagactgccacaccacttgagcagcgcgcgaatctgggtgagcagatttgtctcgcctggagatacggtaacgccgcttcggacggcgagcgtaattaacgcgcgcacgatacaatccatttcgattgccacaaccgcatatccacttcatgcgccgtaagcgggcgaatgggattagtggaagcgtgggcacgggaaacgagggagcgagatagcgagatacgagggagcgaagtagtgggcgcgagaaacgaggagccaggcccagcgattgcaagggtataaaagcatcgagaaaaggatttgctcccttcctttcgccattgttcctcttgccttcgccgcctgagctctaactctttctctgctacgccctactttcgccacacacgctcgttcccaatcatctcttcctccaccgccatggcacggggctctgctctgctcgacggcagtgtactgccgccttcccgcatcgtgaacgagaggcacgccggactgccgcgccgcttcatgccggagtccgccaccggtcgggagatagtgatgctgggcgaggggcgcccggcaccagactacccgaggcggtccatcttcttcctccccttcgcaatggctgggctggtcccgccattttctcatttcttcatggatgtcctggagttctacgatctccagatggcgcacctcacccccaatgcggtgatgacattggccatcttcgcacacctgtgcgagatgttcattggggtgcgcccctctcttcagctgttccggtggttcttcaccgtgcagtcggtgtcaccgccgtcggtggttggcggctgctacttccagccgcgggggccggtgttgaaccgctacctcccctgcgtcctccgcaagaagtgggacgactggaagagcgactggttctacacccccctcgccgacgaagcgcgcctccgacttccaagccagcccccggcgcaggtctccagctggcgggcgccggtagatctgggggaggagtacgacgccgtcctcgaccgcctggcgggcctgcgatcccaggggctcaccggggccatggtgttcggcgattacctccgtcgtcggattgcgccgctccaacggcgcgcccggagcgcctgggagtacactgggcctgaagactacatgcggacccaccagggagccagatgggattgggctcctgaggacttcaagatcgtagtccaaagggtgctgaatcttagctccgcggaggcgtctcgccttcctcaggagatcctccccctctgcatagatcccgaccgcgtctccattctaaccattatgttgggggtcggggcctcagaggagagagcccctaagggccacgacggcgcgggcgagcgacgccggagggaacaacctgccccaggagggggtcgtgcttctgggccccgcgtcgggggctcggggagcagccgccctgccgacgcccaggggaagaggaagctgggaggtacacctcccccatctcctccccgagggggcggggcggcgcgtgccagcagtcggcgcccggagggggccgcgccgacgtcgcagcccgagggggtgcgcaagaagaagcggctccgcaagacgggggagacggaaccgtgccggggaaacctgatttcccctccaaggtggtcattcaaccgaccccctcgcaggttcgtctcactctcattgcaaccatctttctccaaaaagaagttttttttcttgctcactttgttcgtcttctggctttttttttctgtttcagcgatgtcccgtcgcattcctcccgccaccccaagtccggccagtccgaggccgaagatccagcggccgcagaggagcggaggcgagagtctgaccggcgtgaagccgcagcccgccttcgggaagctgaagaggccgcccgggaggccgcccgggttcgccaagcggaggaagctgctcgggaggaggccgcccgggctcgccaagccgaagaagctgcccgggaggaggccgcccgggctcgccaggctgaggcgtcagccgctgctggcgcgtcacttgggcccactccctcgggcggccctcaggcgacatcctccgaggcggctcgcgacgaggccgcgggcgcatcgcctgggcctacctcaccgggcgacgcccaggatcaaacgggcccgggggacatccccgagcccagcgcatcctccggggggccaagccgcgtcgccttttctccaaggcggctcttctcctcatcttctgtcgccccgctgagcgccgagccccttctgcaggccctggccgccgcaaacaccgcagtgctggatgggttcaacacccaagtggaggccctgcgcgcagaacgagcggagctcgaggccgcatgggcgcgtgttgaggaggggcggcgctcggtggacgccatggtggaggtgggccgtaaggcccaccgccgccacatctcggagcttgaagcccgcaaggcggcgctggcggagatcgcccgagaggtggaggaggagcgagaggccgcccttgtcgccaccaccgcgatgattgaggcgcaggactccctccgccttcaacacgggagctgggaggcggagctgaagaacaagctcgacgccgcccaaggggttcttgactccgctgctgcccgagagcggcgggcaacggaagccgaagcggcgtcccggcggcgcgaggaggcccttgaggcccgtgccatggcgctggaagaacacgccggcaccgtggagaagggcttcacggaccgcgaggccgccactgctctccgggagacgacgctggcggcgcacgaggccgcctgcgccgaggaggagtccgcgctccgccttcgcgaggatgcactcgctgagcgggagcgagctctcgaggaggccgaggccacgacgcaacggctggcgaacagcctctccctccgcgaggcggcgcaagaggagcaggcgcgccgcaaccttgaatgcgtccgtgccgagagagccgcgctggagcagcgggctgccaacctcgaggcacgggagaaagagctggccgcgagggcgcgcatcggtggggcggctgcgggcgaaagcgacttagccgctcgcctcgcggctgccgaacacaccgtcgctgacatgcagcgcgcgctggattcttccatcggggaggccgaggccctccgcttggtgggcgagatggggcccgacatgctttgggactcggtctcccgcatggatcgcgccggtcggcaagcgggcctctggaaaggccagacgaggacgcgcccttgcaacctggaaggcctcgctccgcacctcaacaggatggcctgggtcctcgaacgactccccgaggagctcgagaagaccatcaagtcatcctcgagggacctcgcccggggggcggtcgaactcgtgctagcgagttaccaggcccgggaccccgatttctctccctggatggcgctggaggagttccctcccgggaccgaggacgacgcgcgcgcgcgggtcggggatgctgccgaccacatcgtcaacggcttcgaggggtcggcccctcggctcgcgttcgtctccagctccgacgaggagggcgacgccagcggtgaggatgacggtggcgacgaggccggctacccgggcgcatcggaatgagcccccgagcccccgccaatctttactttttttctttttctttcttctaaggccttcatgcctcttttttgtataaattaactcaatctgcaatcagaaacgaaatgatgaaaaaatttttgtgttagttttattttgctatacatatgcgatgaggatgatctgtgccatggtccttttgcgccttagcttgaaataagggctcgtgcccaagtcccagtcctcgaatggctcgggtcggggccagtgcctggggagatccacatgtcgagactggccaggccgggaacgtggtgaccgaggggtatgggtgacccgattgtgggtttttgccgattcccccccggagttcaccacgccccggggcacggctcggttctgggccccgtttggcgattttagctgaccgaaccgagcccccgagggtggggttgagcacgagtgacattatttcaagtcaagattcctcaaaaggaaaaaacggctcagacacaacctttagaaaattgaaactgcttctattgaaatgctgaaataaaggaaaaaggaatatatgtgcatgtgtggtagcccccggctaacccggcacacccgaggggggtgcggggttagcccgagccaaaacctgacacccgaccccccccttcaggggtagaagcgacgaaggtgttcaatgttccacgggtttggcagctccgtgccgtcgcccgtggccagccgtaccgagcccggccgggggacaccgatcactcgatacggaccctcccacattggtgagagtttgctcaatccagcacgcgtttggacgcggcgtaggacgaggtcgtcgacgcagagtgatcgggcccggacgtggcgctgatggtagcgccgcaagctctgctggtagcgcgcagctcggagggccgcgcgccgccttcgctcttccaagtagtcgaggtcatctctacgaagctgatcttgatcagcctcgcagtacatggtggcccgaggagacctcagggtgagctcagatgggagaaccgcttctgcgccgtagacgaggaagaaaggcgtttccccggtcgctcggcttggtgtggttcggttcgcccagagcaccgctggcaactcctcgatccatgaatcgccgtgcttcttgagaatgttgaaggtcttggttttgaggcctttaaggatttctgcattggcgcgctccacttggccattgcttctggggtgggcaggtgaggcgaagcagagcttgatgcccatgttttcgcagtagtcgccgaagagttcactagtgaattgggtgccattatccgtaataatacggttaggcactccaaaacgggccgtgatgcccttaataaatttaagagcagagtgcttatcgatcttgacaaccggataagcctcgggccacttagtgaacttgtcgatcgcaacatacagatactcaaacccgcccggggcccgtttgaacggtcccaggatatcaagcccccagacagcaaatggccatgacagtggtatgatctgcagggcctgggccggctgatgaatttgcttggcgtggaactgacacgctctgcatcgccggaccagatcgactgcgtcattgagagctgtcggccaataaaatccttgacgaaaggccttgccaaccagggtacgcgaggcggaatgggctccgcactcgccctcatggatgtctgcaagaagctcaacgccttgttcctgaggaatgcacttcaggaggattccgttagccgcgcgccgatagagggtcccttctaccagcacatagcgtttggaaatgcgttgtacgcgttcactcccttcgcggtcctcaggtagagtcttatctgtgaggtatgtttggatctcagagatccaagcaatcaatctaagggagcttggagcgctcccttcgggtcccgaggcctggactccgacgggcctcgggggccggtcaggcgcatccgtctcccctaaggggtcgggtcgcgccgacggctgggtaagcctttcttcaaaggcgcccggtggggtctgggctcgcgaggacgcgagccgtgagagttcgtcggcaatcacattatcccgtctgggcacatgccgaagctctatcccgtcaaaatggcgctccatacgccgtacttggcgcacgtaggcgtccatctgcgggtcggagcaccggtactccttacagacttggttaacaaccagctgagagtcgcctaacaccaggaggcggcggatccccagcccggctgccaccctgagcccggcaaggagtccctcgtactctgccatattattagtcgctcgaaagtcgagacggaccaagtatctgaggacgtctccgtttggagaggtcaacgtgacccctgcaccggcgccctgaagagacagagaaccgtcgaattgcatcacccagtgggcggcatgaggcagctgtgaggggttcgcgctggcctcgggcattgagacggtctctggagccggggtccactctgccacaaaatcggcgagggcctggctcttgatagcgtggcgtggttcaaagtgcagatcgaactcagaaagctcgattgcccattttaccactcgccctgtaccctctcgattatgcaagatttgaccgagggggtaagacgtaaccacagtgacccgatgcgcctggaaataatggcgcagtttcctcgaggccatcagaatagcataaagcatcttctgggcctgtgggtatcgggtcttggcgtcccggagggcctcactaacaaagtagacaggccgctgcacccttcggtggggccgatcctctttgctaggggccgtacccccggggcgttcttcgtccaagtggccccttggggcgcactcgtcttctgtgccgatgacctcggggtcggaggacgacaggagcggccttcccacagtggcctcggggccgtcctgggggtcgggggctcctggcatcgtcggacaagcgggcaaagggccaactccggtcgtcaggggcctctggcctccgttcggctcgggggcctcttctccctgctctttcccgggtcggctcagcacagggttagcctcggggtcaaagggcgttaagtgtggccttcccgcagtggcctcggggccttcctgagggtcggggacacccagcaccgtttgacaagcgggcagagggccgtctccggtcgtcaggggccttaggccaccgtttgactcgggggcctctcctccctgcctgctcccgggccaagtcggcacagagtgggggtgcgcagaatgaggattgtcctcatcgcgctccacaaccaacgctgcactaactacttggggggtcgctgctaagtaaagtagcagggactcatttggctccggggcgactagaaccggaggagagctgagatacgccttcaactgggcgagggcattttcagcttcctccgtccaagtgaacggccccgagcgcttgaggagcttaaacaagggtagcgccttctctcccagccttgatatgaaacgacttagggcggccatgcaaccggtgacgcattgcacatccctaagtttgctaggggggcgcatccgctcgatagctcgaatcttctcggggttggcctcaatgcctcgggcagagaccaagaacccgagaagcttgcccgcaggtacaccaaacacacacttatcggggttcagctttatgcgggcggagcggaggttctcaaaagtttccgctagattctgaaagtaaagtttcttggttgcgcgtttttacaaccaagtcatcgacatacgcctcaacattacgtcctatttggctacccaaagaaattcgagtagtacgctgaaaagtaggacctgcattctttaacccgaagggtattgatgtataacaataggttcctacgggggtaatgaacgcagttttttcctcatcctccctagccatgcgaatctgatgataaccagagtatgcatctagaaaacacaaaaggtcgcaccccgcagtggagtcgacgatctgatctatgcgaggcagggggtaaggatccttaggacatgccttgttaaggtcggtgtagtcgatgcacatccgaagcttgccgttcgccttgggaacgaccaccgggttcgccagccactccggatggatgacttcacggatgaatccggcctccagaagcctcgccacctcctcgcggatgaaggcttgacgttccggggcctgccgccgcactttctgccggaccggccttgcgcccggccgcacggcgagacggtgctcaatcacctccctggggaccccgggcatgtccgctggtctccatgcgaagacgtcagcgtttgcccgcaggaaggagacgagcgcgtcttcctatttgccatccagaagaccaccgatccgtgtggtcttggatgggccgtcgcccaaggcaacctccttgaccgggacctcgtcgcatgtggcgatccgctgcctcggggcggtgggggcagaggtgccaagcctctcgtcaccaccctcgggcttggtcgcggcagcgaggtggtccgcgcgctgctccatgcaagcaagcgcgactttaaggtcgccacggacagagatggggccaccagggcccggcatcttcatctggaggtaggcatagtggaccgccgccatgaacttcaccaacgcgggcctcccgaggaccgcgttgtagggcagactgaggtccgccacatcgaagcttacccgctccgtgcggaagttggcgggtccaccaaaggtgaccggtaggtcgatgtgacctaatggccacgtgtgccccggcgtcacaccgatgatcggttgagacggctggagcaccatccccggggccttgatagcatcaaaggccgcgggggaaagaatgttgagagccgctcctccatctatgaggacacgtcccaacttcacgttgcagatggtgggggaaaccaccatcgcaacctgccctccccgggcaatgcacggtgggtggtcggtctggtcgaaagtgagagcgacctccgaccaccgcgctcgacgcatcgcctcatgagtaggggccatggtcagaagctctcgtttcatagccttgaagctccggcgagagacgtgagcacacgctcctccatcgacggtggcaatggtggccccaggttcttggaaacctaggtcatcatcaccatcatcgatgtcaacagcgggggccttctgcttggcctcacttcgccgtttgccggaaggaaccgccggggacttgccctcacggcgttcctgcctcctgtcctcctcccacttcctcgttcgctcagccaaatttttgactgcgcgacagtccgcgagatcgtggagggaggtgttatggacggagcaccacctgccggcgggacgctccctgctgggagtaccagcctctttctttttgtcgctcgcaggcctcccctttcgggtggcccgcggagtgccctcgacggcgaggacatgaccctcgtcgccggaacggtccgacctcttcttcctcctcctgtcacgccgccctgtctgagcggcggatccgggggcggccgaagctgccactccggaaccggaggagttccatgtccacgcttcctccttacgagccactcggtccgcgagctgaaaaagttccgcggtagtctggggctctttggaggcaatcttttcgagcatgcggttgtgccgcacaccccccctgaacgcgtaaatcaccgcgtgtgcagggatgcatggtatagtattgcggacttggcaaaaccgctgaatgtacgagcgaagcgactcattatcgcctcgctgtactgcatgcaagtccgcttcttcgcctgggcgcggatatgtgccttggaagttcatggtgaactgttggcacaaatcttcccaggagtggaccgacgcgggtggcaggttcattagccaaccccgcgcctgtccttttagggccatgggaaagaagttcgccatgaccctgtcgtcacccccagcggcctcgatcccggtcgtatagacctggagaaactcggtggggttgacgctcccatcgtacttctcggtgatggcgggccggaaccttgggggccaacggacattccgaagactcgccacaaaggctctacagccaacaccaccagccggaggcacggagggctggtcctcacgtccatgtcgaggtgacactctggacgaggaggcaccctccgttgcacagggggtacgccggctattacgccggcgctcgatgttgaggcgggcatccggctccccatgctgatcctcccgagtcgaaggcgtcgacgagggagtagcagccgaatgacgtgcagccgccgccgctcgccgcgccctccgccttgacgacatggagccggtggtagcggcgccggaggtcttggtggtggcggaccgtccaccagcacccaagcgctgctgagccgtcatgaccaagttggccacgtcttccagccatcgttgggctggagactccgggtcatggacgacaggcgggtgtcgtaggagcgcgccagcagcctgaagcgcgccctgaggcgtgctgccgtcgccgtagacgaggaggcgacgctccccatctcgccgttctcctgcatcacctgcggctggtgacgccgcggatttgtcgaccctctcaagcgcctccccctgcttaggactttggcgcggaggaggtggaggagtacgagctcgacggcgtggattcggctccccgtcgtcgccgctcacactcggcgagatgtcgtgcgtttttccttgctcggccattaggctgaacaagaaaaacttggggcacacggaagagtctgagagctcagaaagcacacgctgagacccctacctggcgcgccagatgacggagctcgtggctcctcaccgggagaccgcgcaggcccccctttgccggttcggccgggggcttagggtgagatctcaagctctcgctgtgtgtggaaagatcgcgtgccaggaagaaacacgagacacggacgatgtatacaggttcgggccgctgggaagcgtaataccctactcctgtgtttttgtggattggtgtatgaatgagctacaaagtgtcagccaacttctcccccgttctaagctctaaatctggaaaagaatccaccaaccctttctctatgggcaaggtcctccttttatacttcaaggggataccacatgcacccttccctttccaaactggactgttcttcttctctttaatgggcggagattggtatggttgtcgtccaaatgacacttcgatgggacagctcacacctacctccactcccggcggagacgggcgcaacgtgagatcgtggctgcccgttgctgatgcgaccagtgtcagaccggtcattcttgtccaccacgcgtcagtttaacaacgtgcatgtttgcccttcttcgtgtaacaccttgcctgtaatgattaggatgaagcctggtataaatctaaccagggctaacgtgccatctctaagagataacacgctagctccggcttgagacgagttgccttgaggctttcgtcttgacgggatggggcgaggcgtgcgtcagaccgccagtcgccacctaacccttgatctgaccggtctgtgactggtcacagaccggataaaagagcgtgctgtactgcgttgcacgcagcgtgacacgcttgaccagactgcaataaatgctgttaggtgagcacagctgtgctcacttatcccatatatgtggcgcagacttctttaaggggtcgggggtgccccggccctcggggccgngcaagcgccncccgaccccccctcaggggaaatcacgaggagggcggacacctcaccctcgggcccgacgtccccgaaggtgccaggccacgtgggcgattgcgtctgcctcaagcctctggtcatgatactcccggtcccatatcaccgacaaagtcgatctcagccgtccgttcgcgtgaaccgccgccgtgcacccggtctaccgaaaccctagccgctgacgcaataatcctcttttccttttcaaaaataattcattattgcgccataattcaattaaaatcaatataagtattttaatccgatttaatcttgaaaattcataactaattcatcttagctcggatttagttggttcaagtctctaaatttttctaaaattgagatctacatgttaaaaatatccacatgtactgttcatgcttgtttatgtgctgtttggtgattttgcttctttctgtttagattccgtcgtttccggagagtccgttttcgcagcagaagagtttgaagagttccaaggccagcaaggcaagtcacacagatcccaaacaaccctttgagcatgttgatcatattttaagctattgtttctattcaactattgcatttattttcgaatgtcattgggtggaattaacctattctttgttatagcccttttgttctttattactttattccttgataccttgggttattataatttgactagttgagctttatttatattggttcaactagatattagatataattgcttagccctgcttagaaacattagcacattattgggataacttatgactcactattacttaatgatggcttaatgatagttcacgatggtcaatcgtgattggttaattaattaatgtgccaactaaaacctgataatggtgggttgtgagcacatggttttgatggtcgtgctcatgacaattaaggaccggttcacgagtttcggttgtgaaacattaaccgtgccagccacaagccagcgtgggcaacggctttatcttttgtatagcatggttcattgcagagcaccagactgagaagtggcggagataagcccacggggggtcgctggggagtccatgccttgtttataagggggtgattatgatccagaaaaggtgcgctgtaatggattgtgttgtgcaaggagtattgtcacaactcctttccgaggtaccgtggtggtattgaggcacatggtgacatgatgtggggttgtgtcttgtgggtacagtggtacacctctgatcagagtaaaactattcgaatagccgtgcccgcagttatgggcgggtctaacaatgtctttcgtgattagtctcacacttctcatcttaataaaaggtgctttaattggtaataatttgatttgctcctggtttggaatggtacattcctggtttggagatagaactgtgcagccgggatggttgttcagaatggttgggcctgtacaacagggtatgttgtgtagcgttggattaatattgtttaatacttaactgttttattaaattctcaaatgtttgttaaatgctgtttatgcaaatgaaaactctactatgccatcctttggtatccttgtgcacttgcatatttgctgcgtgacttgctgagtatgtcatatactcaccttgcaatcattcatcagaggaagagttctacaatgatgctgctggtgtggaggattaggtgtagccttggtcaagctacctatggagtggagtcatccgcaccgtttatcttattttccgctgcttagatttttattgattgagaggaactatctacctctgtaatgaccttttattcgcctattaattagagtaataattgtactctattatcaatttgttattgtgtgcctcggctgattcctggacgagggttcacacacatgtaagcgtttggaattttggatagaaattccgggcgtgacacaccacaatgtaatgggttagccgatcgagttcaaatatcacgtaagttatgcaatttgcaagaagcactcactttattatgccacagaaccaattttgcaatgtacttacacaacagtaccaagacaatgccctctgaatatgcagctttttttaagctaatgaaagttttaattgaactcagttaattcgtcaagttgatacaactgtactgagaatagtcgtgggtatgaataaacatgggcagatgaccgtcagtcctcaacatgacacatgatgggtattaataacccccacaatgcatgatctgcccttcttgtttgcatttatcagtagatgccaaactagcaatcctcttccatcaccacatgaactatgcaattgcagtacaaccgaagaattaatctcacagttactactatgctcaaacaggcttctccactggtcagttgctatcgccgttttggacggaaacgtagttttcccaagattcgcacgctcagtcacaaatcatatctagtcctgatccattgtgagtttgacacatgattgtgaaatcatggacaagagtacggtgttaaagaagtctctcctgctctgagattcttgggcccagcaagagtacagtgctgccttaacaagagcaccagtaaaaattactaaatcacatttgaatgaataatgctaaaatcttgcaaatttctaaacttaaaaatctgcttcatgattcaaaaacatcaaatacgtactgagggagaaaaagaaacatcagtgcaacactaacaagtacggtattctgagtcctaaatgattcctccgtgtaccttaaaatggtaatactaaatataacatgtttacagaacataaatagcaaacacacactggatcgcatgatacagaaatgtgtagttttttccctactaatatatgctctatgtgtttttgagtcacatgattgctacttaaaaaaagggccatgtacaaaatacacaaagtagaacacttgtactacaactacgtacaggagcacataaaaacaatgtggaccagtaccatcaaactatacatatttcaagacaaatttagttctaaaaaaagaggacagatttgtagccatctgcttaattagctcaagtttattaggacagacacaataaatgcaagttaaagaaaattgtatttcattctaggctgaggtgggaagggcaagtttgctttagttcttttcatgcgattaataaattattaaccaagtattaattagtataaatttgaaaagaatgatttatttgatcttctttaaaaaatacatataattttcttttaatgaaacacaccatttagtagtttgggaagcgtggtcacaatgaacgatagatttttcatgccgaactcactaacaaacttagcgtttaaagaagctgcttaacgaacaaaatgagttccaaacatataaaataaatgattgaccccgaataatctgctcgtgtaaacatattttttagacgaaaacttgatatatttgtctttgtagatatatttttacaggcggttctttcatgcgccagcacaaacttgatttctgtataccataggctagaggtgaatcgagaaaaatgcccgtgaaaatgggttattagccacctagacaaacacattatctgtactagtgtcagcgcatttcctaagtttgtgtatcctgtcatgctattatcaccgacaaagaatatatgcacaaatataatactgattatttacattccttagatgtaccaataagagctgatttttattacttcctccgtccaagattgttgcaacctaagattgtaataggatgggtctaatctcattataatctagattgcaacattttaggacgaatgaggagtaattattttgtggcaatgctgtgtgaacaaatctaaggtatacaagaatgaaaattgtgcctctctttagccgtttccatgcagcaatgcatattttaaggaaagtcggcatatatattcgatataatcttgcatactctctccgtactcgtaaagtaagtcggtttggacagcgacacggtctccaaaacacaactttgatttcttgttctataaaatatttattgaaaagtgatatatgtatactttatgaaagtatgtttcaagacacatctattcatataatttttacattttcaaactcacaactttatgagttattcatgatttatattcgcaaggtttgacttaaatattgtcctaaacgatttcctttacgagtacggagggagtatatagctataaaaatcatcggtcaaattcatagtagttgtatagttacataaatgagagctggagagagggcagcatctccatgaaagagcatttatctaggcacatggatggtgtacttagcctatgttcttcccacatgcatctgatcctgtgagaatggatgtgctgcgaaccaaaaaagaagttaataatagattaaattcagactttgcttcaatagaagttacaaccacttattataaaatttaaaatttagttccaaaactaaggataatagtatctttgttaaagagacgacgcataaaaaaggcgccaacaatgaggaagagatacaatttattcaaattgcagtcttataagtaatctatatctaaaattgatgaaaatttgtataacctaccggtatgcaacatgaataatggaacccttgttcagctgccggcatatgcaactggtgcaggaagacagtaagcgcgtatactcattatggagttcatagctcaagcagccatataagttcccacttgatgcagcatgggtgcctgagaaaatgcacagtagctagtacatgaatgtaggacatatatgctgtgttactcaaggaaaaaaagaccaagcacatccagaccatgatgacaataataatgccttgccaaatgaccccatctatgagaggacactattaagttatgtactactaacattagacgcgttatcttaggttgctttttaaacggattttgggctaggctacttgttcatcgtgattcgtgaacatgttttctaaattgttaaacatgtgtttcacgcaaaaacaactttttatataaaaatttcttaaaaaaatcaaataaaaatatagtatttttaagtttataataattaatactcaattaatcatgcgctgttgacttgtctcgccccaccaaaaatctaagccaaggagctgattcgatctaaagccttgcaaaagaggaaatgacctttctcagttggaaaaagaacatttagatcaaaccatgattatgcacacatacttaataccagtcttaagatatatccactggtggagaaaccatctttggtcggtcgaccagattttacattaaaaaccgggattaaaaatatctttagtcccggtttaaaagctacagggtacttttcaatctttagtaccggttggtgttaccaaccgagactaaagatttatttatagtcccggttaataacaccaaccggaaaaaaagatcgccatacactttactcccggttggtaacatttatagtcccgttggtaaaaccgaccggaaaaaaagatcgacgcggagatcggagaggtggcgcgatcggatcgaggtatctcctctcctttaactcctctctcctcctctactcaaccttatctcctctcatttttaactcctctcctcaaccttatctattcttcttgtctctattcctctccttctcctctctactgccaggcagacgcgagggcggcggggcgcggagggccggccagcgtggcggcggctagcggccgcacggcggcagggctcggtgggccggccggccagccggcgcgacggcgacgcgcggcgaggcagcggctttctttttttgtattattttttttgagaatctgggattgttgtgtgatgtatttgattggatctgagattgttgtgtgatgtatttgatttgtgtgtgatgtgaatatgtgatgaattttgtagaagttgtgatgtaatttttttaaagattttgtgatgtatttgagtatttgagatgatcgatttgtggatttggaggcaatttgaggacgattgatttgggattttggggacgggatggggtgaaatcaatatatttaaaaaataatgaagaaaagaaaagaataaagaggaaccggaaagagcaaccgaattagcctctttagcccggttggtaacaccaactgggactaaagatgctttatctgttaccaaccaggactaaaaatgaatttttactcccggttttttcgtagtcccggttatagggggttacgaaccgggagtaataaccatttctccaccagtgatcctccatatctgagaccaaaatttaaaagtgtacaaggggataacagtcaattaaactattttataacaataaacagtttcacttcctaccttatttagcctataaataattaagtactagtacaagataatgctccgaaatcgcactgctggaaactgtctctaccgtaaagttaggttagaaaactaaatgcgccagccacttaacagattcatcagattatccatgaatacattgaaggtcaatctcaagcttacatgttacaatattgaatacctccatgtgctgttccagggacaccgagtatggcgaatctgtcaggtgttgggtagtggaggaagaacttgaatagtgttagttggttggcagcttacaggatgacagtttaagtgcagttaagccccaatggcaagataaaccggccggtatattacataaacttggatcataatatttgggatcacaagcatccattcaatgaaggtaaaaaactatacgcgctctctagactctagtgctcttaaagaagaaaaggcacacagaaggacgaggggagctttggttgggaggtacagagaaggttagaatgacaagtaatttaaaacagatagagtacctattttctgctaattctaaaaattgcatgagcttatatatgaaaaagtttataatttgtatagttacttgcaattctcatcaaatacagttatctaagagtatataaattatttctgttgtaaaggaagtaaaaggtaataatcatatacgtacacgagatcgagcgcatcaacaggctttctagtacaatcaagggacgaatggaccaaaagacttgagatggatttcctatttcttatttttactttttttatctgtcatttaaaacaacaaccggtaattactccctcggtccctcaacatttgacgttgttgactttttaaaatttgtttgaccattcatcttatttaaaaattttgtgaaatatataaaactatatgtatacataaaagtatatttaacaatgaatcaaatgatatgaaaagaattaataattacttaaattttttgaataagacgaacggtcaaacatatttaaaaaagttaacgacgtcaaatggaacggaacggagggagtacatttttccaattatatataagtgaaatattgacaactaatggtaccgaagtgcttgtttttgacaaataaattacaatatcaattcgggatgccaactccaaataccattaattatttcaattacactcctatttttagcaccgttgtctttgatccacgtttgaactatatattcacataatacaaggtcatattacagtttattggatgatatttttgcatcactgcaaaagtactctcagccagaggaccctacagcttttatatgagcatgatatattgtccatccttaactgacaatggcaagatggaaaatcctatgcatgttaaggcacaatttgacaaggcatttcctatataaaggtagccaagtttcactatgaacaacacaaccataataccatacaaagccaagcctccaaaaactgcctcagagctgaaaaaaagaagagatacatagaagatggctcttgttattgctgatgaaatcaaggccaaggcggaggtctactatgatgatgagatctgtcaacaatgcacaaggctcttgctcaaggaagcaggcct

SEQ ID NO: 6254 - DNA, 24741 bp, Oryza sativa
tactttgtctcttagtgcattgtcatattgctccacaaattgcttaagtgtggttctagcattaacataaccatcaaagaaggcattcacactctcactcctttgcgacgaagacattccagcccaaaatgtgtctttcacataagccggcacccataattccctgttatcatataacccagcaagccattcattatcctgtaagctaaattcatcaatcattttcatccatcccttatcaaaatcatctctgtttaatgaatcatacaccacattagacaatgtagagctaataacttcatattctaagtacccaccaagtttttcaggaatcttcttcatgatatgccacaaacaccatctgtgtcgagcttcaggaaatacttccataatagcattttgcattgctctgcactgatcggtaattatggcgtttggtgctttatttgacatacatgataaccatgatctgaataaccaaacaaaagtctcagtttcttcatttgatagcagagcacatcctaatagaactgattccccgtgatgatttacaccgacaaaaggagcaaatggcatatggtacttgttagtcaagtacgtagtgtcaaatgtcacaacatctgaaaaagattcataggtagccctacttcttgcatccacccataaaacattttttagtcgagagtcctcatccacgtccatgacatagaaaaagtttggatctttggacgtcatacgcaggaaatactgataaactgcatgtgcatctccagcaccaagcttaagctttcgtacatcttgcaaataatttctgcactccttttcaccaaattgaagattctcatagcctccagcttgcataactagagaactaaaattcttgtttatacgaattcttgcttggtcattcaactctagccttctcttagcttgcaaatcaagtttcttgtgacatctgagatgtcttgctttgctaggacttacaacatgattatggtcaagagtaagcgtactaatgcagaatttctcatcatgaagataaaagttaactttagctgggcactgctgccttgtggaggggttaggcttgaatttatttgttgatgtgtactgtgccttaccttgtctgctacaagcaagtgtgaaatatctcaccttgccatcctcagttttcttagatcctctttttatcacaccgaatcctaactttcgagcataacttaatgtaaaagcaagtggcactatcctcactatcaaatagcatacctttggttggctccaacagtttggttttatctgctaccagagcatttgaatcactctcaacctcctcaattgcaaagccatcttcatctgatatgatatgatcttcttgctcatcatcagaacatagattggtgtccattaccttaatttggcaaggaaaattaaatcgattttaaaagcaaatcaaatatggtcatgtatgtgtttgcaagcatggaaaaacaagagatgttgaaaaacgaattgagaaaattaatagaattgctcatcgggcctagaaaaccagagcctaaaatgtcaggcaaaaataaatcaacaactttctcatacctttctgttagcttcaacgtggatactctgttgtggttgccgcaaaaaaattttccgattaatcttaactgattgttatggataggagacaaaggggattagaatgagggtttacggtgagaaagaaaatgcagaagatgaaaagtcacgactgtgtatagagtaatatcgagaagaggaatcgacgccggaatacggagcttcggctggagttgggcttttaaaaggcccaacaatcacagcccactaagtaaacagctcacgctcacagatgacgctgtcgactagtcgtacgatagtcgcacaaattcgtcgtgtgtatagcattttcgattttcaatagcacatatttgcacggattatatgggaattacaagaacgacctcgcgatacttcggaaacgtatagtccggctgtgagaaaagcttcagtcgtcgcagattttgttttgaagtgaactttaaccacaattattagaacccgctaattaacctgttgggcctggccaaaatcaccacctcctaatgggcccatatatatctggcccattcacatgcataggccttcggtgtgatcagtttgtgcccggcccactaaattcacgtgaatgtatttcttcactccgcctcgttttaatgagtcgagataatggcccattcatattttaagggcctatattttagtggaccggggactaattagagtgaggcattgaggacagaaggcgagagaggacatagactcaaaagtcaaaaccgtctcgagggtaagtggatcctcttaccttgtgtagtcactgaacatatgcacctcacttcattatggcttacatatcagtggtgcaactataaactgcacaaattcagaggagcatcgtccatctcgaggaggagaagcgagcgagcagccaaacttgtctatttcgtgagctgggcacatctagagagatgcgtcgagaaccatcggatcgtaaaagataaaaattacaccttctaggtgcgacaaaaataaagacatatggctatatagagaggatgatgagctcatgcaggcgcttcacctcacaaacatccacgtactagattcttctttgttttttccaaaaggatcgatcgttaaattctccttctgttcaaaggctctctaatttctttctttaattttcatattttccaaatgactagggatctgatcaacagcgctaactgccgatcagcggctgaaactaaggcagttcaaaacagttgcagccggtagctctttacaaccaccatagctacaacagttgtggcagtaagaccaatcgaacatacacatagaaggacaatggcatgtacaggcgaatccagcgtggatgctagggagacttaccgattgaatcccccctaccccgctagatctctattgatagaaggagagggaaagggggagaagaggtagaggaggaagataatgaatggttgaaggagaaaggagatgagtgtccctctaatcttattcaggattcgtccctaagtgcatgtgcgaagtcctttctccttggttacgcattgacaagtagagagcatctcccaccactcatatagacaatcaagctcttcattggatggggcaagttgctaataggtggtccagtttgtcactagcccctggattgttagagtatctgtgagtgaaatgaatgttctattaccacatagtggctagtgaataatgtaaattcttttagaatttttttaggagaacgacggtaggagatctgccggaatttaaattagggaaaaggccgaaacccagcaaagagtttacagagtttacatggactataacaaagaggaaatacagcttaagaagaaaataaaatcagggggggcttaaaagctattttgcacaaatccatatcttgtttgataaggtatgctacttcatttactgagaggcaagaattttgaaaaattcttctgtttctttctagccaaatattccaccaaagtagttagtagtgtgcctctgataccctgcatttgaactttgcttcccacatggttggttccattccaccaagtttcaacatcatggggatggggtgtagttataggggttagattttggaaatggcagattagactccaagtttgtctggtaaaaatacattcaaattcttttagataatagtgatgaataatgtaattgaacagtctgtccaattactttgttacagtttcatggcggtggtgttccaatattattgtcgatgcgatagacacgaacaccacaacacggggccggctaaggccttgtttagttggggaaaaaatttaggttagttgtcacatcggatatacggacacacatttgaagtattaaacataatctgataacaaaacaaattacagattccgccagaaaaccgcgagattaatttattaagcatgattaacctgtcattagcaaatatttactgtagcaccacattgtcaaatcatggcgtaattaggcttaaaagattcatctcgcaatttcccggcaactgcgtaattggttttttatctatatttaatacttcatatatgtgtttaaatattcgatgtgacaatatgaaaaaatttgtttgggaactaaataggccctaagccaaattggccagatgtgatcgatcgttcaaatgggcaattatgtttgctaggcaaaccatgtggccggaggccatgcatgtagctatagagaagactctggacgaaagacttgtggagttaacggcacgtacggtgccgcacagggttatccttgacacttctgctttctatcactgctgctgctgatgatgataatgatatatatatacacaaacactccaacatatggacaatcttgcaatacagacttgagtacaccaccgagtcatttggcgcacgatcgatgataataattaatttaataggaggacttgaagacttgctctcatccctgcagctagcgagcgtgattacatatatagagacgaaaagagttgtgttctatggtaatttgccaatgaattcataatttttagcggtagacatttgccggtaattttgtgtcatggtgaagtgtactggtgccaatttttctataaactggcacacatgatgatcctaggtgttggttcttagtttgctagtgatgttggtgcattattcgtgcagttgtgtttgcctacacacgacacacgcctaacattgccattgtattgttcttatatactacccctgccctataataagttaatctagtacggcatgtatcacatatcccgtactaaattaacttattctgggatgatgggagtatattgatttataattttagaaatgaaaagaaagctcttgaatggaaaaatgtacaaatacaaaacattctcacatgacctcgagcaagagaattgaacactatctgccatctatagcagataatgtgataccgttaacactagatgccgcaataacagttgacgcctcttcgttcgtcagcctcatgttgaaaaatgcagggtgcttaggctcaggtagggtcatagtctcgttgcttagcattgcaacaacctctgacgtggtgggccgatcggccgcattctcttgcacacaaagcaaagcaatgttaatacatctcattatctctattgtatgagaatcggtgggtaacaatgggtctacgagttgaagccatgtttcatctttccacatctgccatgcctgcaaggtgtatgatcgcaaaaaacatgaaaacaatctacatgacattagtatttcttctatcgaagaagtacgaaaaaagactttaattttatatactactgaaatcttttcgctttgcattttaggaagattagaaactcaagtcattattatatgatgaaaacttacatggccaagaagattaataaattcaccatatcgatgaaaacttgatgtctttttcccactgacaatctcaagaattagcacaccgaaactgaatacgtcggatttgattgaaaaaaggccctcagaagcatactcaggagccatataaccactgaaaagatgcacatacaaaacattgaagtgaggtaacagtattggcagttttgtgtacagctaatgaattttataataaaatcttactatgttccaacgatcctttttgtattcccttcattatcattcacgctaaatatttttgcaagcccaaaatctgcaattttagggttcatttcacggtccaagagaatattgcctgctttgagatctctgtgtatgacacgcaaccgagaatgcttatgcaaatacagaagtccttgtgctatcccatctattatcgctaggcgtttatgccaatctatcaaagctcttcttgtttcatctgcaaatcaattcaacatagatataacaaagaatatacatttcgcagttagagttagtgaaccaaatcttttatttgcggtacggtacagcaagaagtaataccaaaaatgaagaaatccaagcttttatttggcaaatattcatatattagtattttctcctgtccctggtaacagcatcccaagagcctaacaagatttgtgtgctggagcttagctatgagttggatttcatttttgaactctgtcaagccttgccctgaatgagaagcaagtctcttaactgctatctccaccccatcaggaaatcggccctagagacaagtgcaaaagagatggatgagtgacacgagttaatttgcagtttcaattgacttttgacacttgacaaatattatgatcaagatataatcggccaaagcagagagtgaattgcataatactccatgtaaattaacgaataatatatgtgtataacttttgtcagatttttcgtcttatgtaccttgtatacaggaccaaagcctccttgcccaagtttattttcttctgagaaattatctgtggcctctaatacttgcgaaaagtcataaatagtgaattctgaacttcttccttgtagcccccaaattagtgcttcatcttcatccgcgttcgtcttacctgataaatgtagaattggtttgataatatcagttgatttagctctttatgcattcatgcatgtatgtaactttttttatgtagatatatatctgaccttttatgtgccttctcaatatgatggaagcgatgatacagagaaacaatgcaagtagtggagctaccaaagcagggaccaaaacttttgctacgggctctatagattcagagcaaatggttagtttgttttgttggaagcttggtaaggagataatgaaagtaatttttatctttaattactactactctcaaatatagcaaaattagaactgaatgtgacacaacctagtactacaacgattatgaatctggataaagggattgtccagattcaatgtaagtaataggatatatgtgtgtgtctcctatctaatactaaattgttatattttgtgatggaggtgcttaagtaaagatagtctctacgcaaagatgtcaaagaagggcgtgttttgcttactcttttgttttggccatgttggcagtaatggggcgggctgtggcgctggacttggaactagtgcattcgacgacgacccggagctccacgtcggctcaccggcgaagaacttatccgtgtcatacctcagattacaccggagagcaagaatacgtcccccttgccgaccggcgaagttggccgtcgccagatcgctgaaattctgaagacagttgtagcagatatcttcaaccaaatctggagcacactgtgccaagcagaagagcctccttggaagggtaacggtgttgcttgcatcggcatcatccatgtccacgcggattgcagcgtagtgcttcgtcgtggagagagcttgtgctactatgtaattcatcgtcttgatgaagaattgggtgaagttttttgtcccctggatgttggtgttccagccggataacatgggctccgacgtgatgttcatcaggacgagcggcgcgacgccaactgcggccgaggtgttgacacggccgaaggcgtccatgttgaggatgtcctcgtcggagaagcggagggcgcactcgtcgtagaagacggcggcgtccttgctgagcgggcagagccgcgccgtcgcggccgcgtacgcggcgtcgacgcagccgctgcaggcagaggcgttcgcgtcgccgcggcagagcgcgacggcgtagacggtgtccggggcggcgccgcgggagcccttggcgaatagggcgccgctgctggagtcgccgcttacgacaaggaatgatgaggagagaaggctgtcgaggttggattggtagatgctgttcgccgtgtatttgctgctgccgcagatcatccagggctgggcggcgaccataggcatcggcaagaagaagaagcagcagccaaggatgagcaggacggtgagaatcatggctagctatgctgcctcacgcgtaagcgtaaggtttctctgaatctcttgcattccaaagacagggtcgcatgttaagcagatcgaggcagcgacgacctgtgtggacaagtcactgctatcactttcatggagcgggtgcaatgtatagtacaaggccagactgaacgtaaatgcatgggcccacacgttgaaattaatttagaaggtggttgacatgttaaatcatgctttctaatgtcccattctgaacatgatatattttaataccataaatctaaatataattatttgaattcgtaatattagaatgtttcgtattcaatactatatatactacttttacgagatgacgaaggaagcaagtatataactccgtctccaccatcatggctgtgaccatagatagtttcaccataaccgtggaaccccgtgtgttttggtttcattttgcttttcttactccgaaagcctatacaatatgtgtccttttctggataaggtgttggattttttttccgctgttgttagtactcttttcaaaatattaaaacggtgtgtttcgtgtaaaaaaactttaaatatataagttgctttaaattatcaagtaaatccaaaattttaaatttagagcaattaaaacttgattagttatgtgctaataacgagctcgttttgtgtgcactaatttttaaccttcatctacagcccacaaggcactgaacatctctacagccttcatctacaaccttcaaacagggccaaggtatgaaaactatgctcccaaatctctacagcccacaaggtactgaacatcgaagtcaaattaaccgcccacaaaacatacaagtcatttattcgtgtgctgcacaaagtaatacactcagtgtttagggtggaaaataacgtctaagatctcgtttgtttagagatacatatatgtgcgggcgtgccagtgtacctaaatacacaatgtaaacaaaacatagagaacatgctctttattaatcttaaaagatcataaatacaaattcccaatgtaatatatatgtatgcgcgctccataatctgtcattggacagatctgacttgtgcgatgtggtctcctggttcctggggcctcgaaaagctcccagttaattacctccgcaagtctaggcctgcaagagaacctccgattaagctgcttgtggtcgtctcgtcgtcttcgcttcgcgttctccatgcatggttgggatgatgatgtagatgtgtgtgtgcgagcgccggcagcgatccacagcctcgtcggtccgtgcgccggtgttggtagcgtggccttcgtatcgacttcgcccgccctccgtcgtctagcctcgtcggtcttgaacaacatgcatggagttgcgtagctcgaacgacttgacgtcacagcagttgcgtcgagattagattaggaaagggagaaattattaaagatggttgatgtagacggtaaccggatttaatcaaagctcggcatctcatttgggacgaataagaaaaaccaataggacttcttcagcccacgcattggtttgtgcatggcactgtagcagtgatgacatgtcgtcctccgattggttggccacgttgccacaataattaacttaatcaacatgcattagctagcttgttgccatccaacagcactggctcgccgtcctcccgtcgtccttccttcgtactgcagccatacttgtctccatcgtcatccgctggtttcgacgccatgcgtgatacttgacctccggcatgggaatggatagaaatcttggcagtcggtggcagctccggcgatcctcggcgcgctccggcagggcggcttcccgatgacctcctccatggttagcccgctccagtgcggtgaagcttgcaaatcaaggacgtccggcatctcggcgaggtcgcagcttcgggtagatgcatcaccagcagcttgaattagcagcgtcgagtccagggacaagtagcacagcgtcagctcgaacagacgccggcatcgatgaggcttctgtgacgcgtagatgaatcggccaccgcgacttccccggcgacgacgatacgtgcagatggatccctatgcatggatgtgtgcgtgctgtagatgaaagaaaacgaaacaatcttgctagcttttaccttgactagccatcaagctcctctcctgcgcttgctaatgatcggatcaccgcgcgcgccctctcctgccagacgtcgggactccggccgaagtcgctcgccgccgccggtgcgtgtcttcgatggatggatcgccgatgagagttgatggatggatgtgttgatgctggatgggcagatgcgttgatgatgggtggcttgtggatactggatgcgttggtggatcaatttgtggataagttcgtcaatgccccaggctgccgaggggtcgacgccttatataggggcctaaggtcggtgctcgccgcgtccgcgcgccgtttcgtccgcgtcaagttcgttgcagataaggctcgatcgatcagtttgttatttgttcatatccttcttttattttatctcttagcctctcccggtgtcaaatatctgagctctgttaacttctggagcatcggggagatggaggcccagccgcccgcgcgtgcgcagctgggtggcgattccttcatcattatttctgtagataagaaacaatcaatagagataaacttgatttgtaatttgctttgtttctctgctgctgggccacagtccggtgataagcgcctcgccagcgctcgcgcgaagtaactaactcgatcaagtttgttacaaagatagaatcaattggtttgttggttatctcttaattcatctggttttatctcttccgcacgcgtgagcagaagttgttcagataaattgaaaccccagcttatctctctaatttgatcgataagtaaactcatctagccgataaatcaaaactgtggatatgtataatacgccgtgattgtgtcattcattgatatgggctaagcccaggggcaggcgcattaaatttcttaattaagcccattaatcacctcacccttaatcaagcaccatatatttgtgtactgccatgcatgcatgcatgcatgcatgtacgtagttgcttcaccggccgactgacatagctagcttgctcttgattcagtatacacacgcatatatatactaattaacaagtatagattgggcacagtgtgtatttctatatttgcatggcgcatgcacacatgaaatggagagctagctggcctcacatatacctaatgatcatggctatcaggttcatcgttctagccgctgcaaaaatgccatcaaacactcagtccggtctaagaggattaacaaagacaattaattagagtattggaactactgtttgatacacgtgccttctaagcacaaacttttatatataaaagatgaatgattttagaacaaaattttccagataaaagttttgtaatgaaaatttcagaaaaaaaatgcactggggacacactaaatatagcgatctctagaggctactactgacgtgcagtgtcactagtattttttgttcttcctaaacccaaacataatatgtgggttcctggtgatgacatcactgcaatgcagactctgttcacgcccatcaacagtactatgggccttaatgggccagctgttgggcctagcctccctaagcccataatagcttttggtcacctattgttcgaatagttctcgagatattgttgtattttttgtttcctgtgttctttcatctcatacataacaatatagcagatattttgtaaactatatatgcgtacttcctagttaaatgaatgagcagtgtcctgcttaatgtctaaagtctaaactcgaatacatggtgccacacggccgaaagtgatcccacgacctactcttcatcgttttctaaaaaatgattcaatatttcaaactgatcctcaaaagacaaatgaaagtatgataaattggtcttataaaacacgttaactacaaaatgacgtacccatatgcatgcatataaatttattagttcaaatggacctaatttaaatacaagaataaacacatattagtttaaatgaagcatctctcctttaaccgtggcaaccatactgtgctagcatcattgtagttgttgcgtctgtagatcatctatgcacctttgcgtatcatgtcgacgctgatcgacttgagcctctcaatcccatacctatgagccgcgacgagcagattctgagccatgaacgccgtgtctcccttgtcgatcttaggcagggtatcggtgtagatgaactgaagcatggcccgaaacaccctcaaatccatatcatcaatccgaataacgccattgccagttgccgcagcagcagccttcgcctccttctgatctttcccgccattattgccgaagagctccgccatgaacaccggcgaccgtgccgcgagcacgttcttgtgcgccgcgaacagcttgccgccgaccctgatgcgcacgtcggcccccaccccgctgccgaggagggcggcgaggtgccggtgcaggtccggcggtggcaccgccaccgccgtggtggccgcctcacagcggataatatccatggtgatattacatctgatatagaaactttgaccgtctagatgtagacacgaccacaatcgactgtccatcttcttcctcttgatgaatcttgtatgcccccaacttggccagtagccattggcgaaggagaatttcttggccgtgcagatcttctcttcgaccaccgcaccgtacgtcccgctgagtagactgagcgtgaatttcgcttcgacgacgtcgtcggccgcggcgccggcagctggccgggcgaggcagaggtagacggagacccagtcggagtactcctcgcggtcgccgtcggggtagtaggctatgtaccaggtgtggcctccggcgtggaacttgctggagttgatgctgttgccgacgccgatccccttggtttgagagtagccggcgatcctcatggtcatcgacccggttgctgtctcgctcacgacggccgccgccgctgccgccgccgaggtggttttgggtttgggcttaccgtcgccggcagacttggaagtggtttgacccatgggtacaacaagctgtacctgccacggaacctagacaaacagatcggaggaggacgacgacgatgagttatcgatatgatgcgtctcatccacggatagattaattttgtagattgatgggaattagaacgagttcgatacggaaggaatcactgaaatatagaacgtctcgatcggaaacgtatgcaggtaggaaactttggattttttttttcaatatagatccgcctctgtttcatctctcactggattttatgcacattcgctcttggtccgtttcaatatcgaagcgaatccgtattcaattccgcaaaacttgagataaaaacggacggggtagctcatcgccgggccatcattggcgacagttaaacagaaattaatttggtgaatttaagccaaattaaaaagaaaaatcatggggaaatgataagtgaggggtgaggaatcgatttttacaattgaaagaggaaacatatgaggagacagattgatgtggcggcggctctagaattatgtcaagagagaagaacaagcggcgaatcgagacgcgcgcggtgaaaaaggctaggatgagcgatggctgggccgagcccaaacacagccaggccgagggatggaggggggagcaagccaaggcggggaggaaaaggagatgactttcggccggaggaggaaagtccaagagaaagagagatgaaggcccaagagggagagaaaaagggagtgtgagaaaaaggccgaatgggctggctcagagacgatgacggacgaaaaaataagttgtggaagccttacgtattttttaactagacatataggtatagatgtatagaaaaatgacgtgtgttgcaacagataaagatgtttttcagtgatataatagctactatgagctaagtaataaattgaaacattgggatatcattatcattatacattataattgaaaaagtttatgaaaatgcttccttggattcgggccaaaagcccattaattgctttcttttcagccctagctcagaccgtaggttttgaccataattagatcaacgcatctcatccacaaatcgattaatttgtagatgtgaattagatcgagttcgagacgaaaggaatcattgaaaaacagaaagactcggaaatttttttttaataatggattaaatcggtctctacacccaaagaatatacacagcataagactcggaaacttatgcaggtaggagtcttacttttattgaatgcttaggatttttccaaatagtcacaccaggatttcgtccgtagctaaccttcgtgcttcttgcgtttcaatgtaaatttctttccttttgactagtgctatattgccatgcccgtgtgtttcaacgggatctgaagattcaatgacgaaatacaaaatttctttccttttgactagagtgccatactgccatgcgttaaaactgaatttgaagatttaacttcaggagttgagtctagagtagagttgtggagctgtctaaagccagcgtcacaactctagtttattttgtgagagagctccacccaactacacttccagtttgggtgaaactgaaactgtttggctgagctccagctccaggagaggtggagctggagctagagttgtaccaaacaggcccttaatgacaaaatatggacaaacggttttatgacagtttttcctacgtggtttttcagctggtgggtcgtgaatgaaaacattagtaattttttaaggggtaatttggaaccatgccattataattttgcaaagtttgagatatgccatcggtatctcaatgacatgtaggacccacatgagtcaatgacatgtgggttaggatggcatggttccaattttgcaaaattataatggcatggttccaattttctctttttttaagtgggtcttgcaaacacgtactatttcttgcatgaggtgttttttttttggtagtgattatttcacttttcacttttcttttcgtgaaaacacttgcttttttcatgggccgtgaaagcactagttttcatttggcttgtgaaaacatgtacatatgcttggatagacagtttttagacggttttttcttagaaaggtacgatgctcatggaggaggacaactctattttcagagtagaccagtagagagagatgagtcctatcaaactctgcagatctgttttgatgagtcagatcaaagtctatgattcacatgttcgcttccggctccctaacaaccgccaacctgtaccccaacgtcgaggccggccgccggcgacagcaacttactcccttcgtcctataaaaaagaatctaggaccggatatgatatttcatattcctataaatctggatgatgtgtatccggtactaggttggtttttttatgggatggaggaagtagctctcattgaccacgccggagcaagaggcagtggtggggatttgggtgcacgctaaatactactccgtagaagagaaggagcagagaagacagctgaaataatggtgaaagcagaggaaatctttcccgggctccgggtctgattggcattgatagatgacaagggtctatagaaggagaaacaagagagcgggagtgtaaaatgataaaggatcggaagcattctcccctctactttcttttactctagtattttttttatatcagaatttaaactatcatagatctgatttaaaattcatctatagtgttatattcattttgattaaattaataattcaacacccatattgatccctacatttttagtaggcaaaactttactttatatcgtcttctatccttttcatgcatcttgtaccatataagccaataacaatttggtcagaatctctaaacattgtgtacgttattaaccattagagatacctatgatatcaattactaacagtaaattcctaccagaaaagatattggcccccgtgtctttctgcttggggcaacaatggtggtgattcaggctgccacaacaccacccgcctccttgcctcctcctccctctctaccgcctgagcgggccattggaaatcgtgtggttgcaaggatggtagcggcagggtcttctccctctcttgttgggcaaccgacaagcagcgagctgcgggagccgacccggttgcgttggcttccccagtggtggcgaaggcagaggcagctgcgcaggagcccaggatggtggcggtgacagaggcgatgaggtgtggtggtggtgggacgccggttgcgctggcttccccagtggtggcgaaggcagaggcggctgcgcgggagcccaggatggtggcggtgacagaggcgatgaggtgtagtggtggtgggacgccaggcatagtggaaaaaaccggaccggtggtgggacccctgtcgccaggtcgcagccggatctaggcctccgcacctagccatgagatggtgtctgcaagaggccagacggtttggtgaccgcgagggcgtccacgacggtggtggaggcggctgcatcaaagtgtgacggtggtggaacaacatcggttgtgttacggacggatatgggcttccatgcatagatttgtccatgcatcggcggttgtttcgatgggagagcgagcatcgacgggacgcgatagttggggcgtgaccatctaggggccctgcaccttgatccccgttggggactacacaggccccatcctcggcaaggtaaatggtgcgatgtgagggagacgaggccaacgcacggtggacgcatgctgacaacaaccgtggccaagggcgagttcgcgtgcatggaatttggggatgtctgagagcagttgctggcgactactctccactctactcatgctcatccatcgatgatgggatgtggagggcagcttggcaatgggatggggcagtgtaatgatggccagctgcagcggtgtggacagtttttcccctacttgtgccttctggtgatgggatgggagcgggcatggcaactgttttgtcaaaggggcacatcaagaacataacaccgcccgttttcttgtcctatccatgtcaattgaccaccacctccttgacctcctctcccaccccacaacgccacctcggacccgccaacatgtgccacattgtctctgcagctcttagctagtacttcttgtttcataataatagtttacaaacataggaaaataatacttttatcaaactgtatttcaagatcattttcaaacatagaaaaataatactcatatcattttcaaatatcgatacccaatacataaacataacatgtaaccaaagtttgaaatgaattatcgacttaaggcaactccataaattccatttatttgtgacttggtagtacaaggattcttcattattgacatacatacccatgaaatataccatttacagtatggggagatctatagacgactcgatatgtgactttggctccatataataacatctagaaagtcttttattcagttttctcttatagaccaacaaagaatacatatgggagcaaacaactcgacatctcaacacacaccttggactccaacttcagaaagcttaaatcaagcaaaagcagctattgtatatattcttgaaaatatggacctgtgtaattaatccgccgctatataagaacgtcatatgagacattcgacactagatcagttttaagcatgttcagggccagacttgatagtaggattctatttggagccatcatgtttttcttcacctcctttcttccagaagaaaagaataacaacaaagcccaacacaggtaagagaagcaggatggcatccttgaatgtgcaccaattccgagtactgcctgccgcgtaggctcccaggagggcaagcatgtccagcaacatggctgtgtgcattggccaaagaggcaatttatgttcatcgcccttggtcatccttcgaagcagcaaaacaatgacagtgatggatgccatgaaggaagtggagttgctatagaaaaaagcattgtaccgacgcttgtcgatgtcgtagaggaccgggttgccagcagagtgcccattaccttcatccctccacaggccaccaggtggttttaggcccgtgaggtaggccacactcgcagccaatattcctgctagcattaagtacttggccatcatgtcggctttctttttcatgtcagcttcctgttgatcttgtgtttgtcttggtgtgtccatcatgccatcttccttgttggtttgttgattttgtgtttgttttgactgatgttgatttatgtttgcacgttgtccacgaccgatgattgccacatagactacagctgcaaaaactaccgtaaccaatattaagacaacgatggaggttcgcagatgcatcgaacttccagcagcataggcatcgatgaggccgaacatgcccgctaccatgcagacaaagagcgcatagcactttatgcccggcccgtacagatttcggttgagaaggagaatgatgagagccacggatgccatgaagcttgctgcattgcaataaaaaaatgccttgtaacggatagggaacttgtctagtaggacagggaagcctgcacggtgcccaaactcatcattttcccagaagccacccggtggggtcaagccggcttggtaagtgagtgttgcagccaagatttcaacaagcagcaacaactcacgcttcttctccaactgatgctcctttatcttgtcttcctcaccctgcttgtccgacttcttttctagtgtggagaagagaatgtgaatcaccacatagataaggacaccaccagccaaggcaactgtgtaaatggaagtgcttgtgtccctgcaacttccgacagcgtacgcgcctatgaggcaaaacaaatcaagtatcatggctgcctccagtacatggcttctaactagaaattcattctgcaacatcaccatgatgactagggatgccacaaaagccaccgagttaaaatagaagaagaccttgtaccgcctagggtgtgttgtcaggagtattgggtctccactgtggctagccccattgtctgcccagacgcctccaggtggatctattcctgcttggtaagcaacgatcgccgcaagaatggcaaggagctgaattaattcacaaggcttgtctagatcattgttgtattgtttacttcccctgtacaattaaatagatagttcaattgcagtctagaataattcttttggtactcgaaattgatgatgtggaattaagaatttctagcactcaaaaaatgtgtacaaaaatgcaagaaattctcaccgaatcaatcccccccccggtcccccatgtcatcatgattgaaatgatagttaacaatgtgaaacaaattaatttttgttcggttagcccaatatgtggccttaaatggctccaatcagtaatcactacatctccctaggtcttgattgaggggcacgaaggtcttttccttcctcttaattgatatgtactcaaactattagaaatgctacagcccccctagtactggtcctttctatgcccatgccagcggcatggatgatcgtagagctatcttcatggaagtagaaagcatgaatagaaatattttttttcaatgatgataagcagcgatggagcaagctagaatttcctcatgcccgggtcgaggctaaaaacaagggaataaaattggcaggcgactgatagcattttaatgatgtggagcacaagtagttgggcattatgaacacatcaaggtgtgaagagcttgagctgatgagcagtccggattggaagcaaggtcattgggtgcagtggcatggactagcaggaaaaaaattataagattatagccctaagagactatgatcaggaaaaagaaaaaaaagcactccgctgcaagttggcgactccaacccatagactcgaggacaagactaacgctatgcgtgctcggttgctatcagcctttcgaagggagaacaaacatgtcgcctagatcaatggttctcgatgagcatgtgctttgtggatctatgatcatgttcaagcaaaactggtacaataaagtatagatgttaatagtgaaatagttctagtgataggctcattttgtaaggctcatgtctacatacttttgggagcaagacaccattgagtccatggaccttttttttcttttaccgtaccagtttctttacctatcaatggttctcagtgagcatgtgctcgtttattatagttttacagttttcaaatatttctaagtaaaatcatttcctacaatacacaatataaatctatgatcgttttccatatatctttacataaggaaaaagttcaaatacccccctaaactttggatggaaatccgtcaagcaccttgaactttaaaatcaaacacccattctcctaaactttgtaataccatgtatattactctctaaggtggttttggatggtgtttttgcatatttgaaggcttaaacgagtggttttgaataactaatatacatatttaaatatgattagttagtaggacatcaatttatattatatagtggtgccatattattattatgttgatactcattttgtaagtgagattgaataaagggtacaaattaaagaagggatatttaagtgaagatcttagcatgtatatctaatgtatatgtcacgtgatcaaactcattcaacttatatacaaattagattaaaaacatcttatcgggttatataaatagtactataaagttcagagagttgtatgtccgttttcgaagtttagggtgctagatagacttttactactagagaactcatcttttatccaatgccccaaacatacaaatacctcggatggattaagaagcgttactaaatctctttagtaccggttctaaaagcccaagtccctagaaacatttttagtaccggttggtgttatcaaccggtattaaaaatacatctgtagtaccggtgttagcaccaatcgagattaatgctgatggatctttagtcccgttgatattatcaaccggtactaaagatgtatttttagtactagtaggtaacaccaacccatattcaagatatttttactaaagatgcctcctgagttagttcaaaaggaaatcatctctattcaagtcaaatgtgtaaggtaggtgggatcgtaacacgcgtgagggctgaagtgagatatcttgagtttgattcccacatcccacatattttttttttgacttggtttgcatcgttagtaccggttctttagtcttgatttttttttgtcacggttgctaactggaattaatgggtatacatctttagtaccggttcagatcgagatctttagtctcgattttttgtcacggttgctataatcgggattaatggcggttttcaactgatattaaaggtgatttctctcctggtgtttcaatcaaagtttagggtgatatttggactctctcctgcatataaatgtactacatgaagcaaggaaaaatgtagggtatgtatgtttttgacctaatgtggttttatatatcctacactttgaccattgtattttatattatattgctcatgatcttgaaattgacatcattggaaaatgtttcgaaatatgaatctaatcataccataatgatttttattaaggacaaagaagttttgctttcagacttttgttaaattatttgaatgcaattcaggtttggagcgcgcggttgtgacttttttttaaaaaagtaacaagaaaagataaaaaaaattaaaaaaaggctaggcatggcattagaaatgcatgatgaagatgaatactgcgtacctggtaccaaaagggagactgatggcattagatcctacaagaaaccactggagaaagatgcagacaagaaccgggacaatcaggccaagaacatagccggtgtgcctgctgtccctgcagctcccggcggcgtaggcgccgccgagtcccaagatcgccgtgacggtgagcccgtacagcgggaacttgatgcgcttgaggtcaagcttctcgtagtacacgttgaacgtgatggcgagcagggacgcgatgaaggagatggcgttggagaagaagaagaacttgtaccggattggatggaggcccggcagcaccgggtcgccggcggcctcggtgctccgccagaagccgccgggtgggttgagcccagctacataggcgtcggtcgccacgaagatggcgatcaacatcaggatcccgacggcggcggcggtgtcgttttcgccgtgagggttgggacgatgaagacgatgacataggcggcggtggcggagacgagcgcggcggcgccgatggtggtgaacttgtcatggctggtcccggcggcgtaggcgcccatgagggcgagcaggtcgaccaccatcaccgcccgggtgagcgtgagcagcttggtcccctggtgctggtggtggccggcccttgtgcaggaggaggaagaggaggctgaccaccaccagcgacgccgcgaaggagatggcgttgaaccagtagaagacgatgtagcgccagtagttggtgtcctgtaggatggcgtcgccggccagctgccaccggccgccgccgccgccgtcctccagccacgagccacccggcgggttcagccccgccgcgtaggtcaccgtcgccaccagggtggccagcagcaccaggtacttcttcagctggcactccattggcgacgacgacgacggctgcttgtcgtcgctgctgccgctggaagaagtgaggttttgctggctacttccaccggccaccgccggagccgccattgatctgctactgttgatcgggtgatcgatcgaggtgaatctttgagcaataatacacacgatggcatggctctatgcatgcatttatatagagggctgatcgatcgatcgagcgtgtgtcacaatcatggcatatatgtattacttgatcgtctagtcatattttaggctttattcccttgtcatttttatgccctttgcatttcattcggtagtgtcatgcaagtgacattcattcgtgcacagtgacccttgcacgcacgccaggtttctattccttatgtgtgtcgcgcacatgctttgttttgagctgctgattaaggccgtgatctctcggcacacaaaacgaagcacgtattattgcatgattaattaagtattaactattttttaaaaaaatgattaatatttttttaaaacaactttcgtatagaattttttttaaaaaatatacaccgtttaccagtttgaaaagcgtgtgtgtggaaaacgaaagaggtgagttgggaaaactaggggaagaacacggtctaattatggacgtttttacacgaattatgcaccagttcattgcacaaatcgtgtgtttttccctttcttatgagtacaacgtaaataaagagcgtgtaattttgtatacactagttatagggctagcctaatgggcgggtgatcgccttgggcgatcagcacccccatccctcccctaacacgcacacgtctccccttttatcctcttcctaccacactatgaaatttcaaaccatttaaaaaatataaaagaaatctaatacacttgaaaacatattcatgtgaataaactttacacttataaattataaatatatagactttatgtatagaaatattctatataaaaatatatttgaatccaaattcaaattcgaatttgaagcgagtatataaacttttaccctataaactttgggtatatatgtgtaaactgggctgatagccgcgcgtgatcgatcacgcgttagctttctagctagttatgtcccctgcgttgcaacggttttttatccagtttagtagaaaaaattggaccgagtagaccatcggtttttataaagtgaccgggctttttttaattagaaattggttttttaggatggatgtttttttatgagaggtaagatatgtttaagtagaaatggaggatggattgatagaagaagacaactccctctttaagtagttgtgagatataggtttttattcggttaagagggcaactccctctttaagtagttggagtattttttttttataaaactagagtacttgaaattaaactatcaatgtagatatgttatgacgttttagtcaaattatataaatttatctaaagtaacaactttcataatttattgttatgtaataatgatacaatttaaaatgaactttcagtttcattggtatgtaattcatcaagggaacatttttttatggaacactaatactgtatgatttaaacataacacaatgtatgccaaactaagggccttcaaagttcaaaccaacctttccaccggaaatgcatttaatgtagtggacgaattccggcccatacgtatagatgggctgaggggtagtaggaccacgtgaagaaggaaaaagtccacttagactcccttaattgttcacc

SEQ ID NO: 6255 - DNA, 97591 bp, Oryza sativa
tgcgagatgaatttattaagactaattaatccatcattagcaaatgtttactgtagcaccacattgttaaattatggcgtaattaggcttaaaagattcgtcttgtattttacacctttttttatatttaatactccatgtgtccaaacattcaatgtggcaggatgaaaagtttttatgtgggaactaaacaggcctatactagtcagtactcagcaagctagctatgagtagtagtcgctactacagattcagacatccacaatccttcacgagtaactcatctttaaaggattgagaaatagccgattaaaatatggctacggagaatgctaagtttccttcaacaaatagtttccttttataaattgctatgagtcgatgtcgccattatctttctctcttttccatgtaagcaaacttaccctcttaacaactctaagaaatctctatttttttagtagtagctatatttatggcgctatattttttaccaaaaaatagtcaccatatatttacattgtaaattcatataaattacatatgtaattttagcttattaacaatgtaggtcctaaaattacatatgtattttagtgtattaaaaatgtaagtcctaaaattacatatgtaaatcatatggaagtgatgggtaagttagacaaaatgagttagttgctcgcatggtaagcgtcttggtttgtaatgctcagggcatgagtataattctgctcgtctcttggatctctgattctttttgttttatgtattgcacgaatcttaacatataccgtatggattatgaatcgacatattctttccacaaaatatggagccatttttttagcagctccgttttttttatcattgtgcatatcctctaatacggtttttttttaagaactagggcacaaagcccccctttccattaatggaacggcataattgtcttacagattctaaactagaaacagaaagcccagaaagagggttcccacaaaaagaccagcaaaacaactggttgagggagaatatcctctaatacggttagaataatatatatgatcaagctaatattcggaattgtcttttttcctcttcttaatcccatcggccataagtggttagatctatattcttcttccctcatcttgctctccaactctattcttaacccatacccagtaatataggccggtatagtccttccctcatctttattttcaatcctattcttatcaacccatacccaattatataggcaagtatagtccatcctaatcatatagacccgttgcaattaatgtgtgggcatgttactggtgtatagaaagataaagatatactgtagaaatgaaaattgttttaattaaggtcttctgacctatagggtggtaagagcaaacaattgaattttcatttgtttcaccaataaaaaatcggaattgctaaatatttgttgacagatttttgatggctaaatctttcactttctaaaccgttggatgtgtcctagattcatgttaacagtttaatacgcatcaagatatgtgcttttaggaagaaaaacaaaatcatatttagggatcgatcctgtaacctcataggatgaagacgtgactgccccattgggctactatatttttatgatccagtttgaacttatatcttacttatactataattacatgcgagttacatgcaagttatatatgtaattatagtgcaaatatagtgtaattatgaaaattacatacgtaattatagtataaatatagtttaattatgaaaattacattgtaattatgttacagttacatttgacagatttttagactaatttttagtcgaatgttgtatagatagtcccataaaaaatattattttttaatttcggatcaataaatcgatcacagcaaaaaggaaatcaccaaggtccataattaccctatctaaatttaagcatatgcatccatacaagaaattaatgctccggtacggttaaagatgcaaactttataccggccatttgaactgctcgtgaattcgaatatttttgtttggttatatcataaatactacaagacgggcaaccatctggacgggataactaaagaggaattttataggacttgaaaaaaaattttggtaccttgaggtaccaaattttatattagaaaatgtggtacctctaaatataattctcaagaatagtaaaattaccctaattaaaaatatctagcgctctacagatttactctattctctctacctctctctctctgactaccatccccatgagcacggaggtaacaatgatggctggccgtgtgggtggttcatccggcgcagccattgccggtggtgtgttgggcgtggaaggagccaccgtcacaggcgccgctggtggtgatggtggaggtgtgggtggagtagaggaggagagtgtggagttgtttgtgtggcaggtgcccaagcacatgatggaacacagagctgcttgccattttctataggaggtggccatcgtcgataaggtcaccgtcatcaaggacaaggcttctcaaggtgcggatcctacatccagatctgggcttgtgaccctgtgctcttgcattgtttgttttggagtttgattatggggtgttctacatgttctatgggtgtttctacatccatagcaactttttcctggaattgattttttttagctctctcttgatgatcatatgatttgttgttcttattgcaatgatattttagttgtatcatgatactttggtacatataggtcttgaatctagtacctataggtatcaatctagtagcgaaatattatggctggtacatagaggtatatatcgtacttggtacctataaaataccagacctagtatacaggtatcatgttcgataccaataggtattacacatggtaccacagacgtatatagtgatggcatcattgacgtgttatctagaatatcagacatagtacttaggtatcatgttctgtactaataggtattacacatggtaccacggacgtatatagtgatggcatcattgacgtgttatctaggatatcagacatggtacttaggtatcatgttcggtactaataggtaccacatatgcatggtaccgaactgtacgtatatagtgacattaacattggtgttgatacgacattatcaagtatctagtccggacgggataccgttctgtagcagtccgttatttgaattcgctaccaataaaagttctacaaaaactagtagtacggaaagaaactgaaatgcatcaaaacgaatttgtactttaaaatatcaaattctgggtgttaaaataaaattaagtactgtccggtttcaaaatacctgaaagttgttataagcacttgaattctttatattctgaatgttcatgtcctaatatcaaattttctatgggattttatcataaaattaatttaaatttcttatatgtacaaatatgcgaagttcagaaattcttttgtatattgttaatcgaatttaaaaaatatagcaagtgatgttgttggattaattgcttgaatttttttacgatgagcatatgctaagcttgtttacaccgtctagttagtactacaggttaatccaatggatcgagtagtcttacctcatcggaggatatactccctccgtcccatgatacaagagattttaacgttttgcttatactgtttgttcacttgtcttattcaaaaattttgtgcaaatattaaaaacgaaaagttgtgtttaaaatactttagataataaagtaagtcataaaaataaataataattccaaattttctttgaataagacaactggtcaaacagtgtaagaaaaatgtcaaaatcctttatattagagtacggagggagtagtaagcaattaaaagagttaaattttgcgtacgcacgcacctccactgccttcttcaaggcaggtctgaaatcggtattgccgctggccttgagcttgtctaccaaattttccagcttcttccggctgtccgctgaatttcttgtcagcccgtactcgctgacgaccgcgtggttgaaggacacgatggccagccggtcggcgtcgcgaaccaacttgatgatgtacttcatggcgatcttgagaagatccagcctcgacgacatgtgctttccccggacaaactcctccttgttcatgctcccgctgacgtccagcaccgcgaccaggtctatgggggcgcgcttctccggcgccaccaccttgggcgcctccaccgtcaccagcacctcgaagtcgtccttccgttggtcccgtgcgatcgccgcccggatcggggtggtgctcactcgcacctcttgccggtcaatagccgccttcgacgttgcctgcactagctagctagctcatcattaatctgatcagcgttgggaagacgaaaagtagtgtactacagtattagatagctatatatgttatctagctgtgtactgtatttgccatcaattcgatgaacattcaaccagaatccactcttgatcgatttgaaagaattattacaattttttcccgaaattaagtttttttaataagtccccaatttaatttcgttgcaacctacagatactgcagatcagccaaccaatgtacatgtatagatatatagctccttacttgcagcaagcacaacacagagaataatggccaacaacaaattaaaaacaactaacaacaactaatttaatcaaagatatagaacagccatatagatcgatcagatcataacctccatcttcgtcttcccagcgctggacgatgccatggctcaggtcgatccagaataccgtacaatcttaatcactctccctagctagctctcaattggattagcgcgttgagtgcagatcgagagctggtatgatcagcttaagctaaatgagaatacggagttgtagacaggaacaaatagatatgtatatatgttgtgtgtttggagccgagcgaacgcccgtgaggccgtgatcatacgacaattactaaaaggcacatccttgataaacaatgacgcgaccctcatcagtcttaatcttatcaatggaaattaattaatattgtagactagctcgtgaccggcaatgcaaattaccaagcgcttaatgtggaaatgggataagggcagggttttcaatttcgaaattaaatattatacttgggggttaccgaaattttggaaattttgagccaaaattatttgaaaatttgactgtatttgaataaaatttgaccaaattcaaaaacattgcaaaaaaccaaaaattttgggcgagatttgagcatgctggtggggggctgaaatttcagaaatttcgaaccgaaatttcaaaccctatataatggcgaggcgcccatgttttcttccgcatcgggcacccgttgggaagtgttttgacattcgatcaggacaccagacatgagaagtgacacaaatgtgagaagaaatttagagggaaacatatactatgtacataagtttttcatgcacaccaactaacaaataacaaatgccactaaaaattttagaaaaaattggacatatactttaaatagtattgcatctatatgtgaaatctgatatttaaattcatttttagtcataacaaaagagacaaaattttgacatatttttactcttaaaactgccagattgttcacttttttattacattgttttgcgatagtgctgtaatatttcttggtccatcgtttctttagctgcaattctgcaaatgcaacgcaattgaagcatcatgaaccactcaaattaaacaacacgcacagagaaaacgcacatgcagtgttagggtaaacaatcagtttaaatgtttgaaaaattctgggtaggatagctttcgttgggttcaatgcttacctgcgtagcaggagaaggtggaggacatgatcagaagaagcatcaaaaccgccgcgatggagtaggacatcctcttggtagctgccattaggagattaatgaagaaacaggctccgatcgagctgttattgtacagtatacagtaagtatgtatatatatatatatatatatatgtatgtatatatatatatatatatatatatatgtatgtatatatatatgtatgtatatatatgtatgtatatatatgtgtatgtatatacatatatgtatacatatatatatatatatatatgtatatatatatatatatgtatatatatatatgtgcgcctgctctgtttcgcaatgcgctcattgttgtgcacctttgctcatgtttttagatgagttcttgcatttatgccttcagaaatctctagtgtacaattaattgcttttccatgtgtaaggctgtgtttagattcaaagtttggatccaaacttcagtcatttttcatcacatcaacctgtcatacacacacaatttttcaatcacattatctttaatttcaaccaaaatccaaactttgtgttaaactaaacacagcctaaggtttctttgctgtcatttcaaatgttccagcattaaatgccccttatatctttgtacagttaattgttgtcatttttgttttggatatacacgtatttatatatgacaatagatctcttcagatgtgcaaaattttgaacagaaaaaagtttaattgggccgacaagcgttggcttgtcctgttaggcctgcaagcattatgtatgcatgatcggttcatgactactcgcccatgaaaggagtatgcatgcttccccaatgtttcggtataaatagatcagtgaatataaggtaactatgctatgttaattaagaaatgtacgctctgactttaataattttatgcgagatatgtgacgtcttatatgtatatggcgagagattggagtgaaacaaattataggaactatacaatgctagcaaggtatcatgtataaacagttaatttgctaataggtaacttaggatagaaaatagtaacataagtatagaatctggcactcgtaattatattccaagttacaacaacctctaattcttcatgttgttttcagccagcacagtttcccaccaagcgactcgcatgagcttgttcaacttttgctaaatattataaaaatttattattcggggttatatgtgttctaataaattatatagcactttgcaaatttattcatagtaagtcatgtagtatatatactaacctaattttatgattcttaattataagatgtaagagggaatctttagtccaggcttaggctcttacaaacaaaaaaaatcatagagattaatccttcaaaatccaaatcctttgtttttactccaaaccgaataactccaaaagtttatcattgtttacatgtcctgcagctatagattaattacccaattttagagatgaatcatcaattgaagcttaaataatataacactatatatattctaaaacaaagcagtttcattaagaacaatccaacttaattcctttattaatttccctttaatatagcatttatatctgttcatgcatcactgcaaaatctaagaacaacctcagacattattttccattcaaaataaccgtatgaagtttcttgattatgttaactcttaattaaacctcagacattattttccattcaaaataaccgtatgaagtttcttatttacgttaactcttaattattccacccagctgtaccaatttaattgggccagagcagtatcacaaatatgtgggcggccaaatttagttgagctgagaaacgctggctgatcttgtcatgtctctatttctaatctatggattatttgggccgcaagggaatacggttgtcaaagcatgtttgcacgtgtaacgtcgcgcttttagccagacgttagaaactaattcggcaaaatcataatttcaaaaatttggttctttgtgtgcgagtctaagtcgtgccgtggatctcaattcaaatcccgttgttccctctcatcgccatcaaaatccccctcctcaaaatgtcaattctgattcaactcccaatgtcaaacaccgaaattcaatcccgtccttgaactccttgccaatatttctcttggttctgagaataccaaatccccgtttggaattccttcgtcaactcctccctctcatccaaatcccaaatcccgaagtccaaatatcaaatttgaaattcaaacctaaactccaatactctccaaattcaatctttgtcaaagtctatttcgcctcccttgtcaatgggctgttcctctctcccggcccatcccctcctctcggcccagctctctcctgcgcgtgcaccggacgtgctcggagcgagcgagagagcgccgtcttctctttcccctctgtctcgctcgttctctctcctctctcaccggcgccgatttcccgccaccgccatccgaacctccaccgccttcgtcactccggcaccaaatcccccgcccgtcgccattcaatttttggccgcgccagccgctccttgcacgcgcgccatgccgcctggtcgccgccgcgtcagccctgacgccgcccatgccctgttgccgcgtcgtcggttgtattcttgggctgttctgagctgcaacctaagttaaggtaaataagtcctctatttattttaaggattgcgatgaatcataattgtcaccgtgggtaccagcgctatgtcctgggactggtactgagatcatggtttcgtaggaagcggttcgcactgtttttcctacgacacgctcctgtcaggtaccgttgtacagcggtatcagattgggtgtgacagcacgatcacacaattttgtagcagaatgcatgatatgatgatctatacatgcttgattaaataaccggttcactcctaacacacaaatgggatgaagggaagaatgcatgcttctcccaaaatctcagtataaatacgttaaggaatgtagagtagctattgtatgtcacaattaccttatatgtaagattattaaataaggactaacccaagcagtcacgtgtgcggtcgggagtgagatattggggtagaacaaaattaaatggccatgtctatccttaattattgatttgatcatacttataacttagaacaaacataattgttgtgaaataatcaatatcttttagaaataattatccatacactcgcatgtattctattcctgatggatctatcacatttaacactagaaaatttatttaattctatagaagatatgatcaatgatgccatgtcagttaccatcttcatctggtcttatgtttgtgtaccacaattattaattatacttatttgtgttacaaagcacttaatttgaatatgaaatcaactacatgcacacattttacttgggctagaatggtgtcatgacacatatgtgggcgccaaaatttagttgggctgagaagcgctgacaggtcttgttacacttctagtagttctctaagtattgggctgcaagggatcggaacatcactgtaaatgcatgtatgcatgatcacacaattttgtagccgaatgcatgatcccatgatctaatcatgcatgcatgatcaccagcatcagtgacggcaacgcccatggatgtgcttgctgcctctgcaaattaagctctgctgcctcctaacatccaaatttagttgggccggaaaagtgataacacaagtgttgaaggctccctcttaacatcgaagcgttggttgattgatatgcagttctacacatgttaggctagaatgggattggttgcatcctgacctgatggccgatacactactcctaaagaagcagatcgttcttcttttgacctttatcgatagatattagcttagctagcatattatatctctccatataaatacgtaagtatataatcatagaaagctctacatgacaccaaaatagtgtaaattggttttaattaaacatgtgtctgccccgcaaaaaaaaattaaacatgtgtctgagtaatattgttttgaggtgaaatattagagtgaaacatattaggatacccatgtctgggttttgtagttggttattattggtatttgttacagttaccaataaatccaagtgtatgaataccgctgcaacactccacctaacagtatttcaaggatatcgaataatagatgtgtatatctacaaacatgattctaccatacaaatggtaggcttaaactagaggggattcctatgaattaattaactaagcttaaactaaataaaaatctatcaattggtgtccagttcatccctggtctaccaagagatctatgtaagtaaacgtggggatagaagggatgatggacatggttgtcacacctgctgtctatcatactttccgtggagagtcacgtagatattaatttaagtgcctacctcactataaatttggcgtctatgtggcaccttctgtctgccgtacttactttccgttgagagccacgtagctattaatttaactgcctacctcactataaatttggcgtctatgtgacattgttcatcgtgctatatgtctatgagagaatatgattagaaaaataaataaaagaactcaacagaacccacatgttatgattagcttaaataaaaataatattgtagaacctagtaggccagcggcagagggtaatcgatcacttgagcaccgccgtgggatgttgcttccccattatcgcaccactagcctactgaccgcatcgctgaaactgtcctctgtgccgagctcgagacggtaagagctcgagccttagccaacgcaggggaggacgcggcgacaatgatggggacgatggtggatgaccaccgttgtcatcgcacgagccgatgatggagcaggactagccacctctagggctaggctggccagcactaagctaaggtgccctccttgctctctcccgttgtgtcattgccagctggtcatgcatgtgccagaaggcatagcagctccgatccctcatcatcgccgatcactctggccaggtcaggcggtgatctcggtggagggtgcatcactcttgttctcgtattacctcttagcaaaagtgtactgaagcatctaggtgcataaggacgactgcccaaccatgcaattgatctagtagctcttgaattaaccggaacttacgtcgatgacacgttagcacaggttttctggtcacaaaggacaaaattaccattcaatctatcgggggagtttcgatagcggaaggagtctccctatctgattttagggttgagaaatgtgatttaaactggggctataggtgagaaaggtaaaatggacggtttcctttgcagaggcagcgatcaaatacaagcggcaaactcaatctctctcattttctttttcccaagagaacacggtccgcctcggtttccaaatttagttgggccggaatggtgcaatagtgaacgcttgcgggcgctgggccctaaaatcttacttgggccgacgttcagtgggacacagaggccgcatgaaagtccggctgatctggttgggccttgtagtcgtacggctcattatgagttgcattgggtcgaaacgagatttgcaaaccaattctccatttaattaacccttttttttgtgttctctccgaaggaagtaataaaagaggaagagaagaaaattttgatattcgttgcagttctgttcagagtaaatggaagagacaaaatcgatgcagatcctgaatgtgatttcagctatatcatccctgttttgcactgttttcttttcttattttgaatcttttctgaatacgcatgcaaatcaacctttgcgaccagctcgcgtgatacacaaacacacgattacaatgttaggaaacttgttctcaaggcgcaaaacttaccgtgacagaattgcatgatggagagatgctacttaatttgatgtctaaatcgaaacctcttacacaacaatcttgctctactagcttctcttacacaacaatcttgctctactagctagtgtattatatatagaacatgttggtgagagaattttatgtttgctatcagtatgtaatactcttgggagattcgaggaaaacaaaatatgcatctcgtactctaaacctcactattgcattgttctccacttatattattcatgtagtaacatctgatatgttatttaccacagcgaaattctcttttcaagtcagtgatgtaaaaacatctaatctgttagttgccacggcggaattctcttataaagttgactaggaaaaatacccgtgcgttgcaatgggtgttgactagaaaaaatggccgtgcgttgcaacgggtaaagacgtttcttcaatgatacaacatatatgagtagttgagcaataaattaaaacattagggccactatacattataattaaaactaaggataaacggccagtcggccatcatcaacgatgaagattaaatctaataaattaaagctgaattgaaaagagaaatcgtgaaaaaaataatgaggaaaaactaatccacttttgcaattaattggaggagaaaacacacggaaagacatattgatgtggcagcgggacatattgacgtggcagcggtgctaagatttggcccggtgacggcgggaggctcgcacacggatgggaaaataaacgaagcgtgattggaacaaatatcccaccaaaacaaggacaaaaaaaaatccaacccattctaaggaaacaaaaacaccatataccatgtctgcacaattaaattctcttggaacatctccccttgcctaagcaaagagggaaacatgagtttgactgatcttacattttcaaacaaacaacggtgataacctctttaatttcatcataaaccccgagataaggactgcatatgaatcacattttgtatgcatatgcaacatgtttttctccgaaaatgtcaatctataacaggagcatggcatcgtcccttcagttcagatcttcaaatattatctgaattcaatcctcgatctgataagtagtgtttgtatcccataagcaaagcctgcataataccgacaaatcaaaagatcaacacaagctagctatcttcttgcagcaatttcagacctgctgtagcaaccagcagcctgaccattgaccaacctgacaaacgaagggtatatgaactgaaatgcctgaatttcaagcaaaattcgtctttaatcccctcaaggaacctgatatatatgttctggtctttgcaatttttttttgtccttcacttcacatcatccatcaagtagcttgatgaatcatgagtcaaacacacttttagctagctagctagttgcttccagattacctatcatatccgttgattttttttgagcaggctggagaaatcctgattcaactctgccacagcacatagcacttaattactgcctgattgtccaatcaacctcatgtaaaaaacctagctttccacttgcaagaatatcagcagatactcatgtcatcgaggcgctaatcgtgcactgactgatgcgtcgcttcagaggaagaaaactgcaaagctcgtgcttgcctgcctgcatgtcaaggcgacacatcttaatatggaccttatcgttttatcacaattcacaatcctatcattttgacaatgggaaagttttctttttctgagggaatgtaccctcgcttttttattttatatactacgatttttttagaaaaaataacaacatttaaattaatatgtgacataccactcgataaacaagtacaaatttaactttacagattataacaaataataataaatataaatttgaatgcccatactaactctgggcctgttcggtggctgcagtcgctgcaacagtacacacgttgttcagatcgctatgatgcagcggcagtgctgcgttgcagccgcagccacgggctgccgaacacagcctctatttgttccttttattacaacccatcgaagttaaatttaatcttaatatgtttgtgcaattatatatctcatattaatttatcttaacatttgaaaaagttagtaacaactcttttgagtcgtcgtgaaaggcagcaacaacctaacagtgacgtacgtgcaaaaccacggtacagttatcagctatagcaacgaaagaaaccaaaacccctgcagctgaaaaggaccataatattttgcagaagattcgcaggtttctgtcaaactatttggtgttgaattgacacacagtacacgaagtcattatccaagcataccaccattgacttgaccacagattgagatgcatagcttagattttaatattatataacacaattattttttgaaactttgatcagaaatattttgttaaattatttagtaacgtgaagtaaaaaaatattatcacattgtcatgctaatttaaaacgtgtatgcttgtttgttttcttcaatatttttaagaaaaacgaatggtcaaacaaactataaaagttaactgtattatatatattaaaaaagtgtgtattggaaaatatggtagtaatatactccttttgtttgatgttgtgatgttggttagctcaaaattgaactaacagtgcgtattaaatgtttggaaatggaaggagtattaggttcggacaaaattaggttgtgctcagggacaagacggtcccaatcactgggaggaaatttaacagtgctccggctttgaaatgtgtgcatatatatgttggtcgatgacgtggcgtacgtgcaaagttgcttctctgccgaattaaccggcatgttaggcagccgttgtggcgccaccttggccggccatgttggtgccgtgctgctccgacaatatagttgcttatgtaaatttggttgcagatgtgtcaaattgcttgtgggatatgaaaacttataacccctaattaaactaccactagtaagtaagtgtgcacgtacaaagcacgtcatacttctcatcgtctgctttgttaacttattgtcatagcttatactcgtttcggtttcaaattaattattatcatattttagatttgtctgatcagatcattaattcttaggaatgtatgtataatttaacaacatatgatttatgtattattatgaaggtatttctttacgatgaagctaaaagtataaaattttgtaatattagaccatatgagtgcatagaaattaatggtcaaagattgaaatatttgattcagaacaaattaacctagaatgcaagtaatctgaattagatggagtactcaaattttgaaatttaattaatataaatttgattttagtttcctttttttcatcatattctattttttcgtaactgtagcttataagtcgagtacatataataaactgatgaaaaagaattcctcacgatagcttataagtcaacaacatattataattgaattgataaaaataattttagggtaccacaaaattatcaccgttgaggattttatatttacatattcttagctgttctaaagccaaacctgcgagtgaaaagaaaactttgaattaaattctaaaatgatggggacgtattgagggtggtcgactgaacttggatctcattaatttgcatgcattcctaattattggacagttatatgtccgaccaacattttactgatgtactaggcgtgctacaaagagttgtggctgatcatgtagttaattgatggcttaatatttggctttaatatgaaggagaaatggaacaataattcttcgtccgaaacatatatcaaatgaaatttgctgagcagagattaaatcaatacttacatggcatgttttactgcattattatcatacttcttccttttctaatttttatattagaagtcgtttgattttttttcttagtcaagctataagtttatagaaaaatatactaataattttaataaaaagtatattattaaaatattcaacattaacttaataaaactaatttggtgctgtaaatattattaaattttttaataaatttaatcaaatctaaaaatttgaataagaaaaaaaatcaaatgatttataatataaaacagagagtacttaattattcttttttacaggaaacacagcaggagatactcctaccgtgatgcattgcaaaagacagagagtgtttacgagagactgtagggtacttaattatgtccaacagccacctaccaacacgaggggggttaaatcactgacgcatacgcaacgtactgtttgcatttcttagagtataaacagtactgtttcaattagcaccgctgtttcttgaatcttacaggcactgtcactgtgtagtactccattatgaaaattaagaagtttggtgtcagttaacaaagcaagttcaacatttaattaatttcctgcgacgagccaaagcaaagtaagtacaaaagcaaactgagtacatttaattttttttcaccacacatatcggatgagccacaaattaaagcggataaactgcacctagggcaagcgtggagactgaaaacataattcttttctatctatacgaatagatcgaaaacatattcgctttgtaggtctaaaattactcagcatcagtcattcaattttttttctctgtggaccgtggagaaagctggagaaaaatatattgtaaaccgttagacagattttgatgaaaccaaattataacagtgtaaatcgataataatagttgtatacaaaatataattatgtatatatagaattagaattgtatattaaatttaaagttagttttaatatatgttgtaaatagacacatctaaatagacgtataacaagtccaatcttacaatctcacgcaaaattacgcagaaaaatcccctagttgtttttcattacaaacaattaagcaaatgaacttctttactgcttgatcttcttagatctgcaaggaaattaaaaattctactatcattagtcagctcgacttatcgtgagtgtttgtgattatatctgaaatgatatggttgcacctcgtcagcgatagattcatgcttgttgcatgtatgcagtctccatctctttcttgtggtactcatacatttttcttccaagcacgctaacaaactcctttggctgcatgctgcatctatctcaagttctcaacccaaaaatgccaactttggcacgcaaatcacgcacaaatcattggccaccaccgtgtataatgattatttagttatatggagtgtagaaacacccacataattccagatgacacgtggtatacaagttcaggttaagttattcagaggaaaaagttcaagcagtacctgctctgttgtttcacatgtaccaatcagagaccaaacctgctgcgatttctcacaattcggcagctgttgattgtgcctactgcctagatagaacttaacatcttaacggtattttgacctgtatgtgctggcctaatcaatagcattcatccatcaactgaagaacaaagaggccattcatggttcagagttcagactgaacctgcaggccaggtagctagtactaatgtacaagtgcttgtacatgtgagaagctggtataccgactgcttgcacatgtggcgacaatgtaaccgtcagattgaacaaaaattgaagccgatcacacctactgtagttctacagtccctttcttccctgccatgaatatacatgtactatggctactagctcatgctggacggttctcaatgagatcaagacatctagtgtgcgatctatgaccaaatatctaacatgctatcctgaataagaaagtaaactgtgcattatttatttcagagtttgttactaaaggagaaggacagccatgtaggcatgcatgccatgcatatggtccctgaaaattaagtactagtaataagtatggaactttcacctatctatctatctagctctttcatgcatgatcaggcaggaaatccaagtgttgtcttgtcctataaaagaagggaccattgatctacctctccacaattcaatccatttcttcctctaccatactatacctagcttgccaccaacaacagtacaccatgcccaagaagaagctgtcacataggctgttctctgccttggtatccctactccttcatgggaagcctatctctagatcatcatccaacaccaacaccacattgccacacccttccttgctgcacaagtcctcctcaagcttccctcccatggagaagctcgccgcgaaaaccctagtactcgacgtcgaaggcggtttgcttagatcatcctccttgttcccctacttcatgcttgtggcactagaggcaggagggttcttgaggggccttgtgctcctcctcctctacccattgctatgtgtcatgggaagtgacatggccttgaaggtcatggcaatggtgtccttctgcggtttacgggcaagccggtttcgggccgggcgagccgtgcttcccaagtggttccttgaggatgttggggaggaagggtttgatgtgatgaggagtgccatgaggagggtgtgtgtgacaaagatgcctaggatcatggttgaagggttcttgaaggagtacttggaggttgaggttgtttcaggtagggagatgaaggtgatttgggggttcttcactggcatcatggaggaggaagaaggtggtgatcaagaggaggtgttgcttgaggagaagaaaatgttggttgatgttgtgggcttctctacctccttggagttcctccaacatcatctctcacattgttgcaaggtataatatgtcataagtaattaattcaacatgtaaaatttgcatgtttgtgttaattcttatactttgttatatatatatatatatatatatatatatatatatatatatatatatatatatatatatatatatatatatatatatatatatatttgacttaacttgcatgtgagtttagatcacctagctaaggtagctagttttacatgtataaactcccctttttggtttgtgtgatttagctagttcaggtattagacatgcatgtaatacgcgtgattggattgaaacaacgtatataatatctgcatatttacacctgaaagtaaaattagatgtaatagttaattacgtgcacgacgtcttttcaacggccggtctcatgctgatcgtgcaatcattgatcatatatacatactttttttcctctttttatgtattctttttgtatctcatcatgtgagaccaacaaaagcataatatctgttactgttagacggccactcattaattttcccagaaagaatgtgacctttaccatcaagtcacaggttttaccccttttcccaaactccccagcactttcccgtgtcaattaaatttaagaatattttgatagtcctccaaaaaaatagagaatattttgatagaaatagagaattttcctcatgtgaagtagtactgtatagtgcatacacaacatttcgtcaaatctctaattaatctgaccatttaatcacacatgcaacagtttcgttcccacgttataaaatttgagatctgaattactgtgtatgcatttcatcttgtcaaatctgtaattaattcgaccatttaattatacaacagtttcgtgttcccacgttaattaaatttgatcagaacaatttgatacaactaatactactattttcaaaattaattcccctcatgtgcattgctgtatgcattccatcttgtcaaatctgtaattaaattgaccatttaatcacacaacagttccattccccacgttaattaaatttgagaacaatttgagatacaaccaataccactattttcaaattaatttccctcatgtgaattactgtatgcattccattccattccatttcattttatttccccaaccacttttgagatttgctagcagcatagtgtggtgccaccccctccctcttgtttgttggagtagttttttttttcgcagtagtccttttcttttcgcaattggttgttgcagtgattttttttttactctcttccagcatacgtatgtctagccgattgcgttgtgtatcaaaacctctatttcttactaatatattgacgtacaatccttttacgtattcgcaaaaaatctgtatttaatttgacaagttaattattaattactcactcacacaacacaggaggtgtacctggtgacacgtgaggagaaggcgaggtggtcggcgctgccgcgcgacaagtacccgaagccgatggtgttccacgacggccgcctcgcgttccggccagccgccggcgacacgctcgccatgttcacctggctccccttcggcgccgccctcgccgtcgcccgcctcgccgtcgcgctcgccgtgccgtacaggtactcgacgccgatcctggccgccacgggcttgtcgtggcgcctcaagggcgaggcccccacgccgctcgccggcgccggcgacggcgcgcgccggcgcgggcagctgttcgtgtgcaaccaccggacgctgatcgacccggtgtacgtgtcggtggcgctggaccgccccgtgcgcgccgtgtcgtacagcctgagccggctgtcggagctgatctcgccgatcgggcggacggtgcggctgacgcgggaccgcgacagcgacgggcgcgccatggcgcggctcctcgacggcggcgacctcgtcgtcgtctgccccgaggggacgacgtgccgggagccgtgcctgctccggttcagcccgctgttcgcggagctgagcgacgacgtggtccccgtcgggatcgccgtcgacacggcgatgttctacgcgacgacggccggcgggctcaagtgcctggacccgctctactacatcgccaacccgaggacgtgctacgccgtgcagttcctggagagggtggacacgtcgccggcgagggagcggagggcgccgtccaccgacgtggccaacctcgtgcagaggaggatgggcgacgcgctcggctaccgctgcaccatgctcaccaggaaggacaagtacctcatgctcgccggcaacgatggcgtcgtcaacaccacccaagacaaccactctgctccggggaagaagaagatgcaataattatgaattagattagccaaaaaagttctcaaaaaagttctagatagatttcggttgttcttttatctttttaattatttttttatgttgctgggtagtttaatttggtgtgtgtttatactgtatttcattcttgcttcagtttggctggtgtgttcatcaggttgatttcttctgtgtgttttaatcaaattaatgattgtatagaaacaacaagaagctggcaccatcaaggagcttgtagagaaagtactactacgtgtgtgaattaattagtgcatttaatttgttaggtatgctcgaccattgttgcaatttgcttgttttaaaaaaaatctatgtatattttcttagggcatattcaaagatagagtctgatatagtcttttagtttatttgtagactatgattttataaccattgagataacaaaggctataataattagtgaactaagataagtttttattatctttcttttctcttccccaagcaaagtttctttttataaatgctaagaattgatgttaagtcattgttaagcttagagcaagtttaatagtatagccagctactagctccaaatcatctatagtcaatttaatagttaattcatacaatagttacctatgaatatatatactatattattaatacctggtcccacctgtcatacaaacattgccatcttgaagttagtgctacagctggctataaatctgtagtctgctgctcacctctctcctcatttatctcctcgaaatatgtttatagttttggcttatagtccgctattgtacctactcttagtatgtttctctctctctccttcctcctcttttttctactacctatgttctaaaataagtttatttttttatccattacacacatatcaatacaaaagaaaaggactagaatacacctactttatcaaatcctaatgtaaccattcatcattttatccacctctaaatacaattattttctacatttacaaattccgatgcattgattactctaaaaataaacttaatgtgggacagagtaagtatatcagcaaacttaccttgttacctactcaaagaacctgctattaattattgtacatactctgacatcctattaaatgaaagtgaatatgggaatcatagacttgctgtctctctgaagaaaatcccaaaaggagaaaatggagcatcttggacttgtagtaccacaaattttgggtaaacatataatggaaagtgatctaggagtaccatttatcaactatttattgttcattatgaagactggcatatcctagctgaaagataaaatttttggaagtttgaacattactcctgtctgttggaagaaatatgcaatctatcatgggtccattccatgaagatgacataatagagaagcaacaatgcaatccacatgccactatctcatttaataaaacatttatactagaatatgtaaaccagcacaaaacataataaactgtcgctcttaattttgaaaggatcataatcttctgtactgtctaaattgaagacatgaaaatgccattatgtattttattcaagtatttaaaatggccatcatgaacttaaaaaggaatcagaaaaggctttcatgatcttctatacggtctaaattaaagacatgaaaagaccattatgtattttattcaagtattttaaatagccaggatgaacattaaaaggaatcagaaaagctgaaaaggcttcaggcaagtgaaaaagtgtctaaattaaagacatgaaaagaccattatgtattttattcaagtatttaaaatggacaggatgaactttaaaaggaatcagaaaaggtttcaggcaagtgaaaaaggaagaaccatgcaaataattgcgtttgccgggagtcgaacccgggtctattgcttggaaggcaattatgctaaccgttggactacaaacgctatttgtcagttattaatcaaatttattaatgttcaaagctaagcacaacgtgtgacactactaatcattgtcaggcaattatctatggtgcctaacaaaaagacggtggaagcgattaatggatcataacttcataaggatcgttgcacaatcattttctagcataaaactaattaatcaagaacctctcactgtcatgacattcatgcatagattgacgcctatctcagagggaaaggaagtaaatgtatcacactctatctcaagcaaacaacgaccccaatgaaaacagcggccatcgacccatgcattcgacgtcgatcgtcgacctgcaatgcacactgatctgctttgcttggttgcgttcatgtcggctcagagttcatcagcctacgatgcttgagcttcctgatcatggtggactctgcctgcccctgctaattccggtgaccacgtagtacaacgaacaggagtctacttgacttgtagtagtagtgctgtgcattcaaagttcagtagttgaggtgagcatttcagcaccagccatcacatctccattagcccatacgctgcaaagcaatctatcatcatgggccatgaatctataatcatggaccatgatctatgaacaaagtggtagttacgtactagtagtactgtattaatgcaccgccgagttgtacgcacttacgaggggagagaacaaaaatgtgatgtcatgtttaattcgtctacatcttggtcgccgtctgatctcctcatgatctgaaaaaaaaagctggtgatcaggattggatcacatgctacctaccaacagaataaaggttcagcacaggaacggacccccacaagagaggccctgatcgaattctgaaccaggggaacagttatgttcagtaccatgttattactgttgcagcacgagctccttcgatccccaaatgtacttatgtactatacatgtgtgctcagcttgcgtgcccacactgaactggtagaatcagatctccaaaacttgtagtctagtgtaatggacagaccaaatctgagtagcaaacctttgatgaaaccagttgtttcttgctcgtactgtctcctttcggtgattgaactgccaggaccaccacggcgctcgtccaggataattgaactgccgcgcttctgctgcgaccctgcatgaaaaagcaaaatgttttgtactgaatcagtaattacggtgagttgtaccgtggaaactttaactgcagacttaacactaattaagttcagatttttagtttcagatatccataacatagccaggaagagcatccacaagatcagctctttggtgtagtagtaacagatttaatcatttttctaggaacacatggaagactttgcatataattgcattaattttctcaaggagagaataggaggaaaaaaacatggagaagtcataaaaacaatcgagttctttgttcaagccacccgtcagattgccaagggatcatgatagcctggaggatttgaatttcatatcccaagtgccagacgcaaatgtagaagagagcagaaattaaacaagatgtgtgggatgcaaggaacaaggctagctaagacacaatgatttaatcatggacaacaagcattctgttgaattccctgggcaactgctcccaggacagactcaattaagttgcaaggaaatgtagttgagatctggataggaatggcatggttcatgtcaattattgatcagttccttcattttagtgtatccgtggagtagtatgcaagttgcagccgcagcaagccatcaacagtagatgagaataaggtggttcgaactgtgacattcttgtgaggacaaatttcaaaatcaggccacacagtttctcaagcaatttgattgcacgcattaatttaggtgtccatgtcctcttattcactgtatgtaaatcccatcaagcatatatacggcggattcgaccaacagtacaactatactgcagatacagcctgccaatactgcagacacagcctgctacagaatcactgtccatgccactgtatagataggatgacttccaacaacccaacaactaaatgaagacatatgtgaatgtgagctctaaaaaaattgaattagttgtgttaagatgtttacttgattatattaacaactgatggtcattacataagcaacaaaaggtggctgagacatacttacagagatcaccaaagagatgattatactatatatcagagctgtcactcatccagtggtttcatccagttgcgtctcacctcagagctagggtccgaaatcaaattagcataatcttgatctatgtgtcagttaacacttccccaggatataatttttgtaaatcctaaaaggattcgtgcagccaagtaccatcgaaggttccaaacaagcatcaatgctactagaggtgttaactgctgatccttgctgcagacgaaaaaaaaagaacagattagtctcagaaatactttttgaggctgtagagaattgagagacaccaaccacaacatgaaaagaagaccagtatgataccatgaatcagtgtgacaacattgtccaaaagcaaaagatgtggtcaacattatcccattgttgtcattgcaccgactctactatgaaatctgacaaagacaccaattgtggaaaagaaccatgcaatcagctgatcaatttctcccatctgacactacttgtcaatgcaccaagtatggaacataaaaatcaatgtactggaaagtggaaacagaactaaaggcactcacatatgcgcagtaatgacaatcactgttcccatgcaaagggagataggagttaatttctcatctttatcattttttgttctgtgtcctttggggtgtggaaggatcttctgtaggcatgctcaaacttaaacattgaaccaatagcccatttgtggacgactatctcaccaaaaatctgaacaagaacatgatcctactttgaagtggtgaaacctatatgggtctctcaacacaatttccctattaaaaaccatgctaaccagcttaaataccagatgacagtctgaacagactctgagattcttgaatattcttactgtagatccttctgggacaacgataaggccatatgccaacgcaagtttctcactatggttccaaaggttctgctccttctgctcttcatctgtatcatgcagtgcagatgatgtgtcagcaatataacctacttccctgagtttcagcaacatttcatctaactttgcgtagatcttctctgcatgcttatgaccccggtcaccaataccaaaggtgcttacttcattcttaagcttaagccaactgcaagctggtcttttgtttatattgatggttttcatgtgacttcgtaatttgtcaacatccgcccatcttgcatttgtagcatataagtttgacagaagaacataagctgaatcatcgaatggatccaattcaagaagctttttggcggttttcctcccaatttcaagatttttgtgggttctactagaggacaacaaactccgccatatcagatcatttggtaagactggcatttcttcaataaatttctctgcctctgcaaaccgacctaagcgtccgagaagatccactatgcatacacaatgttttattccaggggaaacaccaaaggaagaagccatagagttatagtaatctatacccttgtctactagaccagcatgactacaagctgagagtagagcaacaaacgttacatagtctggctttctacccgttgcaaccatttgcttaaatgtttcctcagcttccttgaaatacccatattttgcataaccagatatcagcgtattccagcattgttgaggtcgaatggcttggtcaggaaccacttgcaacatttcatccatctttccacatttcccatacatatccattgcagcattaacaacgtatgagtctgaatccagcccagatttcataccaagaccatgtagctgcatgccttcttctaatgatgcgaggcttgcacaggatgacagacattcagctaggcaaacacgatcaagtttgtttccagcatgctgcatatcaatgaagagctttagagcttcctctccatggccaagttggacattcgctgctattatggcattccatgaaacaatgtttttgttggtgatactattgaatatattagtgcttgactctaaattgccacattttgcatacattgtgattagagagttagcaacatactcatctgacaaaaatccagtgcgtattatgtatgcatgtaagggccttccataattatgcagatcatttgaagatgcgaaagaaccatggatatttatcattgtaatgtaatttggctttatccctgcacttctcatccaagaaaatacttgcattgcctttgtaccatcctcaagtactgcgtagccaccaataagtacattgtagctgacaatatcatgagtcggcatggactgaaaaactttctcagcatcttccatagaattgcatttcccatacatcgtgatgagagaattaccaaccagtagatttctctgaagactcaactgcaatacgatggcatgaaccattttgccatctatcaaggctcctggacttgaacatgctcctagagcactggaaaatgtcaggtgatttgggctttcatttgtatgaaataactgacctagtgtcttcaacgcgtcggtgctattacagttctgcacataggatgaaatcatagtgttccatgatattaggtcccttctactcatgttccagaacagaaactcagcatcactcaattttccagcagcagagtacatattaaccagagcattaattactgttactgatgaatccagactgctcctgagacacagggaatgaattccacttccatggctgaaatgatctgaggaggcacagacagacatcaagctgcacagggttgttgcatcaggccttaatccatgatgacgcatatctgaaaacaccagaaaacatttgctgcagattccttgatgtgagtacatcgatatcatcgcgttccatgaaatagtatcatgttcctccattcgatcaaagagcttctcagcatcatgcacccttcccaagttgccaaacatggtaatcaacgaattcgccacagagacctggttttggagtccagagacaatgacctgggaagcaacctgaagcccaggcacctcattctcgagcgatccacacaagctgaccactgtcgcgaacgcatttgcattgcatgggaccccatccctcctcatctgacggtaagctctcaatgcctcttccaggtaaccattggatgacaatgccaccatcagtgctgtccacgacacgacattcctctcgggcatctcccagaacaacctctgcgcatcggacacgatcccacgggagccatacaagtgcaggagcgccgtgccgatgtagacgttgcccatgagcccggccctgtgggtgagcgcgtggatggcggcgccgcacgcgatgccctcgtcccggccccggcgctcgcacgcggtgacgaggctggcgagcgcgaacccgctgagcgggacgccacgctcccgcataccgcggagcatctcgaaggccgtcccgtcgcgtccgcagcggacgcagccggagacggcggtgtaccaggtggatggggtccggtcggccatttcgtcgaacaggtggagcgcggcggcggcggcggaggcatcccgttggcggaagtagaaggcgaggagggtgttgcggtggaaggcgctgagcgggagtgcgaggcggacggcgaggccgtggatggcgcgggcgaggagggggtggtcgccgaggcgggagaagccggcgcgcgggaactccgcgacggccgggtgcgggtggtcggcgaggagggcgagagtagatggagggcattgttgcgtggaggcggtagtggttacgcggcaggaggaggaagtggtggcgaggaggaggcgtggcggcggccggtggatgcgacggcggtggatggccggcggccgggtgcgccgaggaaggagagagagaaacagcatccagagcttcacggcggcgaatttgcggccttttggcccatcaaataagtagaatactgagtaggaatagcccaaaagaatttggatccataaaggcccatgaatatttggcccgaaagataaaaggaataagttcactttgaacctcaaaactaatcgaaatctaatggaaaaagtacaccgaaggtccctcaacttgtcatcgagttacaaaatggtcccctaaccgcaaaaccagataccgggtgtccctcaactaataaaatcgttagtttagatcctccggtggttttgctcccggttttatctgacgtggcggctgagtcagcgtgcaacccacgcgggtcccacatgtcagaatgtcaggttatctctcccctcttctcttccttcctcatctctttctctgacttctttcctctctacagggcggctggcgggtggggaggaggtccggcggccaccgccggcggcgacggcggcggcgcatgcgacctcggggtcggaccatttgacaggcccgggaggcggcggcggcgacacggaagaaggaaggcggcgacggctgcgacgcttgagatgggagaggcgcccggcggcgccggcgcgggaagaagttgtcttcggcgtcgtgcccgctccgcccgccaccgcctgctcggctcgccgctgccccgcgctcacacattcccaccgccgacgccgctgacggcgcgggcgcgagatctgcggccgtggacgacgatggcggcggcgtcctcgctctccccatcccgctccctgtcagtgccatcttcctctcccgcagcgcgcctgctcgccgcttgtctgctccgccagccggctgctccccgcacagtctgcggtggcgaaggtgaccgtgccagcatcgaggtcgtagccgaaaatcacccaggctatatatagctattagccaattctagagccaaacgagaattcagttgcaagaagtaattttcttatatcaccgctctctacaaattaaacgaaccccaccacaagaagctagcacatatgagctagcacgcaggatcgattggatgatgatgattatggaggtttctgggagagcgcggatacgatttcatgggcatccttctcgatatattgaacgagatccatggcaggccgctgtgaaaccatcttcttcatccgctccgtcattgatagcaggaatgtcttgacagatgattcaaggctctcaaactgcctgccgaccgatttcacaagcccatccaattcttccagatccttcacgagtgttttattccaagattaagttattgctgaacaaagaagaaaaagtaccattatattataaaggatgagatgaattccgaagcgccttcttcggcgatcgtcgactccatttgtgttttcagcccctcgtacgcacggttgtaatactctcctacctcctgtgcacaagaatttaattgatcatgcatgcatgacaatgtataataaagtactaattaattaactaactaacattcgcatggtttttgcagcaaccgtcccatatattgattcctggcgcgtagaggttggtaatgcgctaggcctcgagtttgattattctttcttgcctgcggtcagccggagtgggggggtgttgcttgcctggcggacgaccgtctggtctatctcagatgttcaccttgcggatttctctcttaccgcgttggttcggcacctttctgatgttgccccctggtggctctccatcatctatgggacacaggaggagcctgacaagcttcgtttcttagatgagcttcgttcactacgctcctctcgcacggggccgtgggccatcgtaggcgatttcaacctcattctcgaagctcgggataaaaacaaccttaatctcaatcgtcatatgatgggtcgttttcgtcggctcatcgacgagttggaactccaggagctgccgcttcacggacgttgcttcacttggagcaatgagcgcgagtcgcccacgcttgttaagctcgaccgcgtcctcttctctgcggattgggaggagcttttcccctcttgcctcctccaagcggcctcttctgtcgcctcagttcactgtgctcttctccttcatacctgcgtcacctccccaaaagcgcatcgttttcgttttaaggccttttggcccaagttcgacggcttttcttcaagtcgtgcaggacgcctggcatccccctgccaacctaccccctcttgctgctcttgcctggtgcttctctaccacggctaagcgcttacagagctggagtgaccgtcacattggcagtgttcgtctacagcttcagatggcgaaggaacttgtcttccggcctcatgttgcgcaggagagtcggtctctttcccccttggagacctggctgcggcgagatttaaagttgaagtgtcttggtcttgcctcacttgagcgtaccatcacgcgtcagcgttcgcgtttggtctagcttaaggagggtgacactaataccaagttctttcacctgcacgccagagctcgtaggcggaagaacttcatcacgcaccttcgtgatggtgaccagcttgccatctcccatgatgcgctgcaagagcttgcctcctctcacttttgcgccaccttggggacgagcgtcgagcgtgaactcgccctagacctccactctcttggcctctgccctgtgcagcttgaggggctggactgtcccttcacagaggatgaggtctgggcggtgattaagtccttgccctctaataaggcgcccggtcctgacagttttacaggctgtttctacaagacttgctgcccggtgatcaaggtcaaaattctggtggcccttaactccttgttcctgaccaacggccaaggtttcacttccctcaacgacgccctgatctccctcttgccgaagaaggacgaggctgttgacgttaaggatttcaggccgattagccttatccacagctttgggaagctgttctccaagatcttagcctcttgtctctcccctcgcctggacgagcttgtggcgcctaaccagagcgctttcatcaagggccgctctcttcatgacaacttccgctttgtccagcttgtggcaagggcgctccacgccaaacgcgttccccgacttcttctcaaggtggatattgcgaaggcctttgacacggtcagctggcctttcttgcttgaggtgctagcccagcttggcttcagtcaacgttggcgtgattggatctccctcattctcagtgcctcctcttcccgagtgctggttaatggggtgccaggtccacggttcccccatcggagaggtcttcgtcaaggagatcctctttcccccatgcttttcattctagtcatggatgtgctcaatgcattgctccgcaaagcctctgactcgggtggttttcttcccctcaattatcgtgctattcgacatcgtgcatccctctacgccgatgatctagttctcttcctttcccccgttcggcaggaccttgagttcatccaaggcatcctctctgtcttcggtgccgcttccgggcttcggaccaacttcaccaagtgctcgattactccgatccgctgatccgctgctcggttcttgacctggagctagttcaatcctcttttccttgctcgatctcggagtttccctacacctacctcggcattccactgtcagttcgcaagctgccaaaagcggccctgaaaccgcttgtggataaagtctcccatcggctcccccctggaagggccgtctcaccactctggcgggtcactcggttctagtccagttggttctctcttccattccggtctatgtttctgtggcgatcggcttgccaagctgggttatcaaagccattgacaagaagtgtcgcgccttcttgtggacgggtacggactcggccaatgggggacagtgccgggtgtcctggatgagggtttgccgtcctagggatctcggtggaccgggcattccggatctcaggatggctggctttgccttgagtgttcgctagctctggcttcagcgctcggggcatccctactggtctgatctgaaggcccctattaagcggagcgtctccgacatgtttgtagcatacaccttctctatcctgggagatggtcaatccaagctcttctggattgaccggtggatcgatggtcgctcgatagcttctatagctcctgacctcctccacgccgtgcctccacgcttccggggatcgcgcacggttgctactgggttagcgaactactcctgggttggtgacatacgtggcgccctcactgtcccggtcatctctcagttcctgttagtctgggacgcggtgcttcctacccagctctcgccgggtgttgaggatcacctcgtctggagttggacgggtgaccagtgctactcggtgtgatcggcgtatcgggcgttcttccttggccagcactcttttgcctgtgccgacctactctggcacgcgaagggctctgctaaatgcaagttcttcctttggtttgcatttcagcagcgctgctggactgccgatcttctccaaaagcgtggtatcgatagccactctgcttgccccttttgcactcaggagtttgagacggcgaaccacatcctcatcgattgcgtgttcgctcggcaggtctggctccgtgtgatgtcccctcctggctgggctgccctctctccccctcgtggcagctggctccaggattggtggtcatcctccagggcctgtttacctgagcacctccgcagcggcttcgactccttggtactcctagtctcctggcagctgtgcaaggaacgaaactccagggttttcgactctgcgctcgcttcggttgcagtcgttttggagtccatccactcggagggccagctgtggtctttagccgacattgctttttttggggatttcttggagtgtagcgtgcctctaccccctcccgctgtttggagttgtgtttttaaccgtcgtagtagtttctcgcttcaagttttctttttactttgttccccctctttaggcataagccagtctggctgattgctttgtgtaacaaaaactcttttcatgctaatatattgacgagcaattcttttgcgcgttcgctaaaaaatgcgctgtggctcgaactttcaccgcattgaggacactgctcagtatagtcactagctgattaatcaagcaacgcacaactaattaattagtggagtagtaattacctttgcttgtccagtgccgcgttgaagaacagcatgtagcagccacttctccaggcacgatctgccgtaaacatgtccacagggaatgcaactgaaagaggaaatgcatgcaattaacatatataaattaaggaggactactatagtactatatatataattgattagttatcaaattagtactaattaacaatcgatcgagtagctcatcaattgagacgtgtcatgcatgcaggaacgtatagtaccagatgcgatggtcgccgttgcaggtccagggttgcagacaaatgctgcaggtcggcgccggcgcctcctcctcctgctgcttatcaacttcttcgaccagctgcgtcgtagcttggccgctgagtcgccgccgcttgtgaccacgaccatgtccctctagctccatcgtcgtcgctactgatgccgtctcattatccttctgctccgccgccggcatcgacgaccatggccaagaaacgccctccccgccggatcccgccgcggcgcggtggccagcgtccttctcctcctcggccgccacatcgacgcgtgccccgctgctccctcccggccgcctccgcggcgtcgtccctacgtgcggcagtgcttgacgattgagggcgatttagtgcgggattaagtgggatttgttggggaaattgatgcccactacacaaggaaccgatttttgcaattaatttggaggagaaacgatagggcagggagatcaacgaaggcggcagtgcttgagtttcacgggagagatgaacagacgacggacagaggtagaagaagctcctagcgagcggggcccgcctgccagcgcacggacagcgaacggaagagaaagagagggggaggatgaggaggatgatttacgtcggcctcgtatgtcagtaggtcccacacatattttttggtgaatgacaaataggtcccacacatcccttctttctataaagttaatgccaaaagttcaaacctcatgcttccacatcatcatcagttgtgaatcattggatgaatgcattagatcgcttcttagccgttggatggaacgcggcatagagcccaacccatcaggtaccgggtgagtctcttcacctcctcagtgccaaaatgtagcccacatgaacacattggctcatcttcattcacatctacatgtatccggcccgtcaatccgtataaaaagagctttatggccgaacacccctttagttgacattacaatttgttaacttatgttagaccattttgcttctttatagcttacgctttgaatgtgctatctaaattatctacaaaatttggatagggctgctaaaaagaatttctccaagaaagtcatttattttgtccgtttcttcttgagattgtacctcctatctaacaaattgatgttaaccaagtcctgcagcaacgtgcggggcatcctctagtattttttatttctaataccacctaagcgccacgtcaacgccacgtggaaaggagaccgagtcaatactgccacgtaggcgcacgtcagtgaaaccgccctccaaaaccggttttgagagttgggggtcgagatatccggtttcgtggtttagggtcacggattagatttcgatcactttttcagggtcacaaagtgaacttattccaagataaaattaggtttgggcccaccatagtctggacgggtggggaaaccgctgcgagtgcgacccccgccgccgtcgccggagaagaatgggtgggcggggcggaggaatacaggcgattccctccataatctccggcaatagctacatggatttttctagcaggttagtgctaccgctcgttccctcactcttcagggatattccaaaggtaatttccagatttattaaggaaaccggtatcatgtttatattcttttcttatcctctttttgctaaagaaaagataattttgctttgttgactccaagtctccaactcgggtcacccaagtcttcgcggtgcttaacttggccaaattgttaggtgcctgaagcatttcgcccggtttggagaacgagagtagctctgtttgcagagtatcgatcactgttcctatgcagtgatggggcttcaaattttggattcttgtgttttaagccggattttattgctgcttgattcctgcagttatggaggcttggcttctgatcaggtgcaatgccggcgatctgagctggtggagtataccaacgtaagggtgcgcagatggatgtgtagctggagatcgtgcgggtgctgtactgcagcaatcggggctacagaggattgatatatttgcctaaacttccatgaacatcggaagcgtgtcatgcaaggtcatgttggtgctagcttggtactgctatatgcttcttcttttttcaaatcatttgagaataaattgattaaaacaatctactccaaagggcacaatgaactggtggaagaagagaagcatccttttcaaattgccataatgggagcaatagacaaactgcatggtacttgttctatttttatgttaaatattagtgacacatgttacaagatcataagttaattaatttagtgaacctactagattttaccacaatatatattgatgtattttcattaggaacaatctgaatatattattcatctaatgtaaagatatagctatggttctacgcagttaatttctgatttttcccaaaatgttattttgtatggaaataaaaatgaggcttggtttcttctccgttgcaatgattcatttcttgccaacatggattccatgtgcattattgtactctgtttatttttcattttcaacttcaatggaaaactaaaatgaagcttgatttttatctaaaatggaaattgactttttttgtatgcatatatgtggggacacctaaattaggcctggtgccccgaaaatccactcgtgatcgtccaggatttcgattacgcacagattaatatacataacaacttttgattaattatacaaatttgatcatacaagctaattatacaactgttaaaggtttaaaagttccaaactaacacatccttatttgaaaatacaaggaagaatccaaactacccaactactaacctcctaaactactaatttacaactaataaactccataggcaaaagctcgagtgtagacaagcctagaaaaactcgttgttgctttagacctcactatcttctgatcttcttgttagcacaattcctctatatgttaaattatgcaagaatgagtacttatgtactcaacaaggcatattataaataattaaatgtagagagatatgaataaataaaacaatgagaaagtaaaagagtagtaataaaatcatatatcatttttgtgctcaaaattttagttttaaaactacttatacttcaggagtatgaatcacccttatgacacaactccaaaatcgggagtacagcgcattcgaatgatttaatttcacctctgtagatactatctagctttacccacacgatgcccacagctagctagaggctgagaataacagagccgttcgaaggtcccacttactactagttagtgcacagtggggttttggcccatcatagtagttgaactcttgctaggcctaagcaaggttactttatcatcatactttcatgggacccactgttgtgaagcatgcagcccaaactccttacgcacgttcaccccaaaacctgctcctagtgagccaaccaacagtctttcatatagtgggacaatatactaggctaagtccaattacttgatcgtgtggatggacacaaactatgtaatttccatggtataagggggtaattataatccggttaaaccaccaaaattatctcaacatccaaacttccataccaacaaacttcatcattcataaacattcaacattcacaatcctcaacattcacgacctcaactcataaatgcccattataaccggattcttatgtttttaaagatgtttgaaatagtaaaccacataaaatgataaccaatgcatctttctataacctcatgcaataatgcttgaaatcgtttaacatctacccatgagatgttaaaagagtaaggtattatgcatcaaattaaatatgaagattataattagttttctatatgatcaaaattttagttatgtcttgccttgtgccccgaggtttcctgcggcttcaacgtagctatctgagtccacgtcagctccttggatgtcgatagatcttgctgtacagtctaacgtatgaataccaaaaagatagcaaataaagcctataagaaaaatgctacaaagaaacgataaaccgagaaataaataaaattggagcaaggcgaaggaaaaaggaatggttcaaaatatattttaatttgaaaacaaaagagaggtgatggtttctataggttgggaatcaaataaaattgaagaaaaggtaatttggataggtggggtttatttggtggatttggtttctagtcggtgctagagtagggcagcacaacggctagatatttggagttggttagccgatgctaaggttggggagcatcacggctaaatattggctcgtctagttgatgctacagtcaaacaacacaacggctagagagttgggaagtttgtgccggtttgtggggcggaatagtgttactttacagctgtgagttgtagcaaagctgctaggttcgcacagagcccgaaagctagtgtgcggcgtgctatggaggttgatggagtagtgaggctccaaccactgtacgcgttaaggcgtggggtgcgaggagcaatactttgaccttgggattagcttatgccgggttttacgaccaacggtttgacatcggggtttgagaccacgtgaatgtctccatggaaagcgtaaagttctcacggcggctgtttagtggctatgggatggtataggtatggtttagaaataaaaagggtatttaaataaatcaaaggaatttgaattcaaaaaggtttttaattaaagaaatttgaatattcaaaaagggtaataaagaattttgaaatggtattttaaatcataaagatatttaaatgacgaaaatgtatttaaataaattataggaaaatttaatttaaaaggggtttttaaataaaacaagagatttaaatttaaaggtatttaagataaataaaataaattaaaaaggtatttgaataaaatataataatttaacaaggttatttaaaacaattttaaattcagaatgtaaataaataaaaggtatttaaataaataaagaaatttaaataaaatgtttaaaataggtaatttggtatcaaaataaagagtttggaattagatgaatttagatcaaagaatttctgggattgggtttgtggttgaagagatatgggtgtctaaagtttgaaattgaaataaaatcaaataaaagatactgtttatgtgggacccactatcagatgctccttcttcctcctctatttcttcttcttctcttcttctttcttgtgacacagataggggagggagaaaggcacggtagaggaggacggtggctccatgttgatgcgaaaaacacacactggcctaagagatttgcttgagtctagtgtaggtccgaatcttgcttttgggtcaaagggcgtgccagttggtttgatcctgcaactaacaagaaacaaacaaggaaacatagttaaatgcataaacgatagccgatcgaccacttgccgatgacgtatcgtttgtagactagccgatataacgtgaattagatcggcaatggtatataaaacataaagaaagttagatctagtcgatcggctgtagatattaacaatatataatctatacatcgaaatatgtttaaactaagtgattgggatagatcggacagcttgccgagacagtataaatcacttatgtataaaagtacttcaatataaagattatatatgttcatagcatagccgatgttgtagatataacatgtatcggctaataccctgatactactttatattaagatatcaatatagaccaaatatattaaataaggattaatcaagtgttaaggtagattaacgtattaataacaagtttaatatatttagttacagtgagatcttaacataaagggcagatttagcatattaagtaaacataaagtaaacaaaataatcaaatcaggtaagatcggttgaaaccccgatgaaaccctaatcggcaaccaataaacaggctagagattgatattttaatcacgacttataagatcaaaattaactgatgcagttataagtataaaaagaagaacaatacctagaaaatcaagtcattggatgtcacgaccggaattaacccaacgggcgttccttacgtgcgtgtattattccttgtcccaggaggcaaggtacaccaaaagttgatacatttcagagtttatcaagcggaagcgtaaatagttaatttattacatgggcggcgaaggcccagcacacacaaagacaaacgggaaacagcggaagactagggcgacgatcacaggcgcttgacggcatccacgagctagacaccaaagccttcatcttccaggaactccacttctgggtttgggaaaaattgagcaaaactgagtacaaccaccgtactcaacaagacacacccacaagtgcaggataaatacaagggagtacaagggggttataatataaagggttagggtttgcagtaaacagcattaaaagacacttagttgctcaaagctattttgtaaacacgattctagagctatacaatattattaatcaaggccgtgaacccacacgaacctgccttaacccaaggcctacgatgattcagaccgaactggcaacccgaccctgggtcccagctcgtcccaagccaacccaagctaaccattccacattttagttgttaagcaggttttaagaatttaaaacactaacttgggtacattgctcggcttgcccataaccgagggcgcggctattcgaatagattatactctgatcagaggtgtacatctttacccacaagacacatcttcctcacgtgtaatcacgtgccacataccaccacggtatacggacggaagacgtgacatagtttccaacccatcctagccatagacaagagtaccgacccaaccccacctacggccggaacccccgggacaggtaggcaggactgagcccctagcagcaggacaccggccctgtgccatgacatctcgactaccgggccgcagctcgtgtagccttcatttgtcctagagatgtccatcgacccccaacttcgtccatctccatccgtgtacttttgtttataaccagactgagccacaaactaagccttacccactagacatgtggaagtacggtagtgctttgcaacagaggcccgaagaccggtccttatatggccgaggtgctactatcaaaaccatgcaccccgagcccagcctaaaaccattttgagggttttgaatagagggggacgtgtgaatccaattccacaataatccaactattccatagtgtccaggtggtgagaatattcccaaagtctagagttataaaaccacctaatgttgcctaattaatcagcgaagcatctacctaaaatcatactagtggtaccatgagtagagtgtccactagttggggttttgtttattctagggtgaacaaggaaataataacaataacaataataaggtcataacaaaggtaaataggcatggctagataaaacagtgataacgcgggaatttaaataaagcggtaatgcaataatttaaatcaaaataattttataaactgggattcaatatgttcaaggatgatgtgacttgccttgctcgctttcccaaacgtcggcttcaacctccacgaagagcggatcttccgaagctgcagcgtctacatgaccaacggaaaagaaaaggcttttactctgataaactccatataacaagcaggaacaaagcacaaaaatgggttcttgacttcttaaggaaaaattagagacttgaacggtccaattccgagttcaaatggccaagctatggtcatttgaagttatatcctctttaaatgaatatttgcgaatttcttcatttaaattttaattttaaaagggtttattgcgtcagccgaggggaggggacgcgcggaccgggtccacgggagtggggcccacgcggcagcctcacggtccacggtggaccgggtgcacccgggctcacaccggccggcgccgtgggtcccacgcgtcagccgcacccgagggcgcgggcggctgacggccgggccccacgcggcagccactcggcgcgcccgagggcggccaagccggcgcagccggcaggaggcggcgcccgcgcctctatggtcgccggcggcggccataggcacggcggagcggcggccgagagaggggaagggaagggggaaaagaggcggtggtccacagctcaccctaggtcgacggcgacgacgaaaaaggcggccggagcggaggaaggcggcggcgcagctcgggtcgacggggtcgacggcgttccggtggtcggcgagcgaacggaggggtagatgaggtcggcgaggatgcggcgaagccgaaggaggcggcgccgaggtgggaggtggttcggggcgacgacggcggcggaccggagctcggcggtgacggcggagagagagagcgacggcgcgagctcgattccggcgaggaggaagggcggcgagaggcggaaacggacggaggaggtgcggggagggtataaatagagccggggcaagagagggcggccggggaaggaaggaaaccggcgcgggaggtcggccgccatcaatggcgccggcgagatttgcgggggcaagtccgtccgtttgaacacgagagagagaggaaaaatgggtggaaagggagagggaatcacggggaataattccccctattgattgcacgcggggacgatggcatgcgccggattcggcggcggcggcggcgctagggcgcgggcgaggcggcggaagcggcgggaggaaggggatgacgggtgggccccacccatcagcgagggtggcgggcgggcccgcccgtcagcggcgcgcgcgcggggagaggccgagtgggccgcggggagaggagagagagggggagggagatgggccgagccggcccaagagggggagggagggaaaggggacctttagggtttttctttttataaaaccattttaactttgtttattcttaataattattatttgtgctctgaaaattccactaaaatttatttacgcattttaggcttttaggaaatatacaaaaatcctccaagccttatttgacttttaactttgcacattttaatttttttggaggctttcacacggattttaattattctaggcataatttagaggatgtattttagagtcgttttgggacgtgacactatattagaaacccactcagcatatcggcatggctgaataaaaccagcatcatacaaacgtttaatttcggccttaatagcctcaaacatatcggccttacatcttctaggaggttgtttatacagccgatatcctggtttgattggtagccgatgttgaacaatcaatcggctaagtcctggcatctcgaaatattcccaagcaaagcaatctctatattctttcaatagctctattaacttggttctaaattcagatgacaaattcttactgataaatgtcggcctcggcttgtctcccggaccaatgtcaacttcttctaagtcatcggccgacatgaaaccttgtcctagtttgccatcgagatcatctacaatatccttggtgtagaagcttgaaccctccacaacgccctcaaaggagcaattggggctctccatctccaattggctatatgtcaaaatcggacacctttagaaaatctccttcccaaactttgccagacaagcaatcaattccatccatctcccaaatagtcaaatcggcattagcaacattgactgacttgtcggctggcacaacttcaaccttatcgccttgccattggatcaagctttggtgcatggtcgaagggatgcaacaattggcatgaatccaatccctaccaagcaacaagttgtaagaacccttcccatcgatgacaaagaaagttgtaggtacagtcttgctgccgattgtcaattccacgttaagaacacccttggtttccgaaggattaccaccaaaatctttaagaaccatgttggtcgtgatcagatcttctgcagtcttccccaacttcttgaaagtagcatatggcatcaaattaaccgcagctccaccatcaaccaacatcttggaaatcggcttaccattgacaaatcctttgacgtacaatggcctgaggtgccgattttctgctccatctggcttctcaaagatagcttgctcaggtgacagaaccaacttagccgaggattcctctaccacatcttcttcctccatatcggcatgatcaacaccgaacttggcaggcaacacaaaagccatgttaaccgacgaagaaacaacagattttcctttagctaacctctttgcttcatcggctaacacgtctcctcttattcagctgatggttgatttcttgctcacctcctcaaactgctccctattcctcactctgaactctcctcttctggttcttggtgaaagggcctgaaggacaccattgcttgttctcaacttgctcccgttcctgagccgattcatcctgaaagtagtcttcatgaatagggcccaatatctggtgaacaggaagtttcttctgaggtagccgattctccctgggacgtgatcggcttgagcttgcaacatgcccccttttatgattactacaactagggcaatcttcgatagatggtagcctcatcccctcattccagcaaaacctgaagaattcacaactccagtgggggtcaaagctatcatcatcttcataaaatttctcttcatgccgatcatgtctcttctgatatttgttgataatccttgcagaattgagttgcttggaccgataatccttcttatcggctgtcttcccagttgtatgaaccatgtttacttgaaaaggattacgctcaattttcatcagcctcttggagttatcaaacttgatcttaccatcttgtatagccaactagatctgttgtcagaacagcttgcactcattagtagtatgagatccagtattatgccatttgcagtatttccttttgcctagttcctcagccgatggaataacatgatttgcaggcaattgaatttgtttctcccgaagtagcatatcaaagattttatctgccttggtgatatcaaaatcatatttctcctccttggaagatggcttcacccacagacatgtagtaacctttttgtttctgatccattcggctgctgctacttcggactcatcttcataatcggaatcagaagcataattgtaagaataaacactattcatctttttgacaatcttcttagcttcctaaaaccgttgttcatgcactccaactttctgggccagatgagccaagctttcgaagtcctgagccgaaaaattttctctgatcggatgcaataaaccctggaaagccagatcggctaattgagaatctgaaaaggacaaactatagcatctgttcctcatatctctgaatctctgaatatagtcttgaatagattcatcatgcttctacttgactggaatcagatctgtcagcttcatctcatgaacgccactgtaaaagtagctatggaattgcttttccaaatcggctcaattactgatagaattgtatggaagattagagaaccaagtaaaggccgatctagacaaagacaaagggaacatcctaaatctaaaagcatcattagccgatgcctctcccagctgagctagaaatcggctgatatgttcataagtagaaaatttggaaaaatctagcaccttgtatcagtgtggtaatggaatcctatcaaactactcaagatatggtttccgatacaaattaccagaatctttaggcttgaaaccaaactactccctcataatataggctatcatatcggcccagggcttctgctgttgctgctcaggtgcaccctggaactgctgctgtgctagatcatactgattgaattgaggcacaaactacggctgtggtgaaggtgctagccgatactgtccttgaggtgagtatggttgaaacatgttacccccatcataaggtggtggagtctgatgcaccatgtggggttgttgaattggatcagtgtcacaccctgaaaatcgctaaattataaatcgttgtgaaaaaggaatttttagaaatcatttaataactaaagaaagtgtgtgaataaaatctatgaaaaatttgaacttaaacttgagctagataaaattttattaaatactttgtatgcccaagtattttctggatttttcccagaattatttgagcattggaagtatttttaataactgaaagatcatttcagcaattatttaaattaaaaagttaattaaatcctcttcctcagtctgggctgaatccggcccactcctctctctcccttctcccttccgcagcccgtgcctctcccttggccgaagtctgcattagcaccctcctcctcctttctctcttccgagccgggcccacctgtcggactcgccttcctcctccagccggccgctcctcccgtgacgtgtgttgcagcgccgccttctccgttcgatccggtgcatcccgtgctccgtttccaaaattggttgcaaaaacggattcccctcgatctcctctatcttatccccaagaaatccccttgaatcccgtggtatatcgcgtggattcgacgtggttttgagttcctattttccggcgaaccctaactaatccgtcgccaattccatccgttcctgagccgatctctccctcttccggctataaatagcagtcccaagacctcctcttccgtttccctctttttcccgagtttttccatagccctagccgcctccccacgttcggcttctctctcctttgccggccgccgctccagccgcgctgtgctgcctccccggtcgtccccgatctgcgccgtcgcttccctcggcttcgcagtgaagagatccacctcggccacccgttcctttgcgccaaatcccgccggaagccgctgtcaccgtgaaggccgagttcgctgcctcggtttgatcttcggcgaagctttgccgtcgactccgtggtcgccgaaccccgccgtctcctccgttggcattgcagcgacaacagcaagcccggcagccacctccgcgaagacgcaagccatcggagcaccgtcgtcactgtgaagccaatctgttccatcttcagccgcgccgttcgtcgccgtccatcgccgccttcgttcaccgtcgccaccctcgggatcgcaggagcgaggtgaagaccgtccgcccctcggttgctgcctctcgttgccggaaagccgttgccatcgtcaacccaaggtcgccgccttttggagttcgtcgcctgccatgtccctcgtcgtctgtcgttgcgtaagtggtggtaagggtcgccttgatctcctctctctcccggtgccctccgtttgcatcattgtaccgtggttcgctggtaactgccgttcccgtgcttgcggtcgtcgatcctgcgtggcagccatgtcatcgctggcatcagcgccatcttggccatccaaaattaatataaatttgtcatctcatttcaatgacatattattcctttttaatatatgtcatctaccaaatatgatctaatatttttccggaaaatgttttaatcttctgtctcagctataaatcatttgtaaattgtttaatcaatttggaatagtcttttctttaataggtttaattagaattaaatcttgtaaaattcatatctaattcatacgaactcagaatgaggtcgttcaagtctcatgattcatctaaattcaagctctacctatttatgaactttaattgtactattcatttgttttttattagtgttttactttgttttgcgttctaggtttagttttccgttgttttggaggatcgttcgttcgttggagaagttcctgaagacgaattgaagatgcttgtttgcaaggcaagtcacacaaatcccaaacacaattcctttgagcatgttgatcctacatttaaattctctatttatttcaattgtgcatttattttcgaatgtcaccgggtggtgagcctttcccatttaattatggccgaagatgactttatttacctatgggttagaatttgattagctagaagcttatatattggtttggttcagctagatgcttataatagattcttagccatgcttagaaaaaatagctcactaatgggataaatcatacttcactatcacttatggatatttaatggaagctcacgatggttaatcgtgattggttaattaattaatatgtcaactaaaacttgataaaggtgggttgtgagcacatggttttgatggtcgtgctcatgacaattaaggaccggttcacgagtttcggttgtgaaacattaaccgtgccaaccacaagccagcatgggcaacggctttaccttttgtatagcatggttcattgcggagcaccagactgagaagtggcagagataagcccacgggggtcgctggggagtccatgccttgtttataagggggtgattatgatccaggaacggtgcactgtggtggattgtgttgtgcgaggggtactgtcacagctcctttccgaggtaccgtggtgatatcgaggcgcatggtgacatgttgtggggctgtgtcttgtgggtacagtggtacacctctggccagagtaaaactattcgaatagccgtgcccgcggttatgggcgggtctaacaatgtctttcgtgattagtctcacacttctcaccataatgaaagatgatataactggtaataatttgattagctcctggtttggaatggtacattcctggtttggagatagatctgtacagacgggtatggttgttcaggatggttgggcctgtgcggcatgggtatgttgtatagtgttgattaatattgatgattaattgctctactgttttacaattctcaaatgtttgctaaatgctgcttttgcaaataagccctatattatgccattctttggtatccttgtgcacttgcatatttgctgtgtggcttgctgagtatgtcatatgctcaccttgcaataatcatcaaacctcagttgaagaaaaaggattcagaagaagaagacgtttggcttataccccagttgagctgcctgtgggagtggagctgaagctcgttaggttttatttttccgctgcagctttcttcatggtgaggactaagtgcctcttatgtaagtatttattcgctttagttattgatgaatctgtatattaaattgtcagtttgtgtacctcggctgattcctggacgaggattttatgcacaaatgagttcggaaattactagtgaatttctgggcgtgacaatcagacatgaactgagcaccgatcaactgagtttgctgaattggagtctaaggcctgatcggtatgttctaaatcggctgttgaacaggctgttgaatctgctgctgaattggctgagtgacatcgaacatagacgatatttgctcttgattaacttgaggaatgttgtgaccaacgtgctgaggttgtggtctcatcaggatacgaggtctgaactctggttgtttgtgagctgatgaaatcacagttgaattcggctgagccgatgctggcaccatcgggttaggttgagccgaatttgtccccgtcaagttaatctgaggttgatttggtcccaacgggttcagcagagccgaagtttcccctattggattaggttaagccgatgttgatgcaatcggctatcctgaagtaatcccagaaacaggcagtccatctgtaaccaaggtcctgtaattaggaaacttgtcaccagggaagaacgctggacctctggctcccctttcttcaaacttgcaatccatcatcttctccatcacattgctcatcacattagctaagattcctgactgattgatgagagcatgattaaccgcatagtcaacactgtcttggaaattcttgaactcgaggttggcatcttcttgtttaagtccttctttgccttcttccttgttgcgtccagaagtaccagaaccagaagcttcactgtttgaagggggtgggatttctaccttatgcttctggatcactgttccttgtcgagtcagagcaaaagaatcaaagtatgtgttctgtagcttgctcaaccatgcatcatattaacccctttgctctggtgtcagcatgtcgatggttatcggaatcttgtttgtggaatcaacttcagtcctcttgccatcatcatcagtaggcttgacgtccaccatgatgaaagattgtcacactcgtgtcccaccgggcgtgccaaaagcgtgttgatgcgaaaaacacacactggcctggaagatctgcttaacttcagtgcaggacctaaaatctctctttcgggttcagggcgtgccagttggtttgatcctgcaaccaacaagaaacaaacacagatacaaagttaaatccacaatagccgatcagccacatgccgatgacgtatcatttgtaggttagccaatataacgtgaattatatcggcaatgataaataaagcaaaaggaaagttagatctagtcgatcggctgtagatattagcaatatataatctatagatcgagatacatttaaaccaagtgactagtatggatcggaccaagtgctgagacaacatgaatcacttatgtctaaaagtactttaatataaagattatacgtgctcatagcatagccgatgttgtagacctaacacgtgtcggctaatactccaatacaactttatactaagatatcattatagaccaaatatattgaacaagaattaatcaagtgttaaagtagattaacagattaataataagcctaatatatttaataacagtgagatcttgatataaagggcagatttagcatgttaagtaaacatgaagtaaacaaaacaactaaatcagataagatcggctgaaacccccgatgaaaccctaatcggcaaccgaaagcaggctagagattaaaattctaatcacgacttataaggtcaaacttaactgatgcagctataagtatgaggagaatcacaatatctagaaagtcaagctgttggttgattcatagagtggtagataccctatataatctaagtcaaagttgatatttaacttgatcggctgccttccagtcatagatgttagccgattgaaggttaaataacaatattgccagaaactatataggatatatgataactcaacaaacaatattagagtgtcataaatatggaagcactaatcccgagaacacaagccgccataacaagttttacctcttgtcagagatcgaagccgatgcagcccaactcgaaagcaagaactcgtcgaaaatagaacaaaacgaaagggtggcgatgcgccgaatttgattgaactaagcgttaattgtttacaagggttcgggcttacttttatacctgagatacatgatatgtccctatcggacacgacttcgagccctattacaacttaggatacgaacaagtccctaaggcggactcttaccgactcaaatcataaggaaattacataaaatatcctaactaatagatacaattgcctttccaggactcaaatcgtgtgcagcaatccatatgaagcactttgattcaacccaatgatgtataccgagtcgtattgccaaaattcggctcaatcggctaaccttgttcgactcgaactctgccaatcttgaccgcagccgattcagacttcagccgattcttactctgttttcgaaacagtttatctcttagattctgcttcgattttatccttatctcagatacttggattaccaaatttggtcgttaacacatgccccccaagtccggaatatttggtaatgtttcggatttgccatatcatatctccaagaaaatcgcacattgccatttttccaaccgttaccacacggctttaaatactaaccgacctccccgagaaaattcacaccgttactttgccctcaaccgctcaagcgatttctgtcttctttctctccggcaatcccctcggcgcaaaaagacgatctcaaggcgactccctctccggtcaacttccacccgcggcaatgtcgtcttccgccggtccatccaccgctccatcggctgagtacgcagaggtaagcccttatcggctaaatcccttcttttatgcaatagatcggtttctcttggtctcagtttgccttctcttccctttgctcttcttttgtagcatcttgcaaatctgattgtgatccctagcttgtcccgcgagcatcagtactttctcggtccgattggtaactctcaccgggcagagtttattagtgctgaaatcaataggatcccctacaggatagccaatcctagcctaggccactggaaaaacaccttcaagtcttggccttctctagagaaaagctggcccgcatggtacaagcgcatatcggctagcaagcagagccactgggatgagctgggaatcggccaggctttagccctaaccatagcaaattcggctaaagatgaacccttgatagcttctgcagcctatttctggtccaacacccttaatgcttttatgttcaaccaagggccgatgacccctactctgcttgacatcacaatgataactggcttggacattacctcatcggctaaccacatgaacctgaactccaagaacaaatttgatttcaagactaagagtataggaggatggtcagggttcatttctgctaatatgggccagggatctgttaacccccgagagcacacagcctatctgttagtgtggctagaaaagtatctcttttgtggatccagttgtggccctacttcgaattggcagcacatagccgaggcccttgaagaaaagaagcttgttattaatatattaaaagaaaatatattaagcttgttattaatctgttaatttactttaacacttgattaattcctatttaattatttaatctatattgatatcttagtataaagtggtatcggagtattagccgatatatgttagatctacgacatcggctatgctataagcacgtataatctttatattgaagtacttttagacataagtgatttatactgtctcggaaagctatacgatctattccaatcacttggtttaaacatatttcgatctatagattataaactgctaatatctacagccgatcgactagatttaccctttttcttgctttatatatcattgccgatctaattcacgttacatcggctagcttacaaatgatacgtcatcggcatgcggccgatcggctatcgtttatggatttaactttgtttctgtgtttgtttcttgttggttgcaggatcaaaccaactagcatgccctttcacccagaagcaagatttgttcctgcactagagctaaacagatctctcaagatttttgatggggaaaataaggggctctcaccggcttttataggcggcgaaggcggcggagggagagaagccgatgacagcacggcgcggctttgggagagaggcggcggcgcgtgtcgattttcaaatgggcggcaatggcggctcagtggtcggcgttggctcacagcggcgcgtggcatagctcagtggttggcgatggcttgaacaatgggtggcagcggcagagcaatgggcaacagcagcaatacagcagcggtggcggcatagccgcggcggccacaggatggccatggcggcggtggcggctgttggggtggcacggggtgcccctaggtttggcagtggcggcggcgcgtagcggcgtggcaacggctggtgaaaggagcggcgcggcagggcgatgtggtagcagttgggcggcgtgtggtttggggcgaggcgatggtggctgtcacgccctgaagtttccccctttttcttgctttaaaaatttgttgaataaattgcccaaagaaattgtttaaataaccatgagctaattccctaattaataaatgcattcaataattgtaaatggcatggtgggatttcgactctagaggatccttgggttccacatgtcacaatacattaacagcatttttagtggaattttcaaagccctataaataattttaaccaattaaaatcatgaaagtgcaatattttaaatccaaggaaatcaatttcctctttttcctttttcttcttttctttttcctcctttctctctttttcttcccgcgccctctccctccttaccgggccggcccatttcctcttcccctctcgaagtcaacccggccaccctctcactctcaggcgctgacaggtggggtccacctgtcagtccttcccctacctccagccggttggagctgagctccaaccgccggcgcccccacctccccacgctgcctgccttctctgctccacctcgcgccccgactccgcgccgctcccacgtcgccgcccctcccccgctcctcccgcactcacgcgcacccgagaatgggcgggattcgatttcgaatcccaccccccattctctctctctccgcccccacgtcaccggtgatttcggccacctccttggccacgtccgcctcccccttcacctataaatcgctccccgcgtccccctctctcgtttttcgctctcgccgcgctctcccgtgcctcctaccaccgccgcgccgtgcacccgagctccgccgcccgccgcccacctcctgccgcgcgccgccgccgctagagccaccgccgcgccgcgccatcgccgccgtcgtgctcaccgagtccgcccgcacttcagccgccactcgattgccgcaaaaacccactggagtccccttctcctcgcacgctggtgagtttgtccctcccctccgcctccggtcgtcaatggcatccgctgtggtcattttccctactcgtagctcctctcctcccctcctttaggtatcgccgccgcccatccgcccctccgctcacagggtcatcgtcgccgcctttgccttccgttccggccgccgtgctcgccagtgaggagctcctctcctccctccttccctctgtcccgcacgtgccgccgctctctgcgctcgccatcgccttcggccgccgccgccagcctatgcgccatccgccgccgcttgccgtcgccggcggtcgcacgccgccgccgctccccatggccggccggccggctttatgccgagccgagccatgcctagccccgcccgcgccgtccgatcggccacccggccaatctggaccgtcggtcccgtggaccggcggtggaccacccgcgtggtcccggtccacggtagaccggccgccttgtgccgctgccaagtggggcccaccagccagcgcctccctctcccttgagtcgctgacccatggggcccacctgtcggtgcccccctgatgacgtcagccctgagaatatattgcacaataaataattaaggcatttctttttatagtaaaaacacagagaatcttctaaaaatcataactaattcatccgagctccgtttaagtccattcaagtctcagtaaatcaagaaaaatgcaatgaatccattaaaaatggttttgttttctgtttcagtagtcttatagcatgttttgcttgtgtgctttgtttgtcgcgtagatttcggccgtttcgtcgatctgcggttcctcgaagacgttgctgaggtctcatcagtgcaagagcaaggcaagtcatgcattacaattgatcatattgtacccaatttacaaatatcccgtatttctattaaatgttgcattcttttacaatgtcatgtgggatgggtcctattactcagccatttattgtttaccttatgccattgataacttgggtatcaaaatgactagatgttggtttaggaaaatgcttagccatgcctagttcaactagtacacaaatggggatcacattattacatagactttgactatgagcatagctttggattggtgccaccgcaatggtgttagttaattaaaatacactaaatggtgggctgtgggtgcatggttttgctggtcgcacccatggcaattaaggaccggttcacgggaaaccctgggagacttaccgtgcttgccacaagcgggagtgggtaactgcttgatctgaagtatagctcgaccctttcctaggcaccggtggcgagggtgggagtgatggagttgggtcggtcgaggtgtccggttgtccagctgccggattcaccgcggcgcacgaggggactacccactgccttttgaggggtgggggtgaaaccttagcgtggtgtggatggttaggggcgggttatgcgaagggtcttgtcacgatttcctcctttgcagtgctatggtggtactcggggcatggtgacatgtgtggaatcgtgtcttgtgggtacagttgtgcacctctggccagagtaaaactattcgaatagccgtgcccgtggttatgggtgatcaaccagattcaccgtgattagtctcacccctagtttagcttaatgaactggtgtagttcaggtggtgggttgggcctattgcaacgtggtgtagcgttggacagtgattgggtaatattgcttaatctactgcaattgttttactgttttcaactactgtttttaaatgctagctttatgcaaaagaacctttagcctcttttggttatatcctgcatcataccttctcttccggtatgacttgctgagtacagtgggtagtactcagtcttgctctcttttcccccacaccagagctgaagatcttcctagttggtgatgtcttattgaagttggtttcgtcgctgccgtcaaggattgcctgtggagtggagtcgccccgctgctgaagtcaagcttccaagtttagctcgctttttccttttccgctgcatttgtaatcttttatatttttgtaagacgtggatctgtatgtcagcaattgtcgtttgtgtaccctggctggtcctagacaggggtttaatgcactttcaacttggaaattctggttcgtgaatttctgggcgtgacagtggcgcccgcggtggcgtggtgatggcggcggcacgcccacagtgagagagagcggaggcggctcagttgggctggcttggctttggctaggccgacagcccgagggggagaaggaagtagaaggaaaaagaaaaaggaatgggccaaatgagagggttttatctcaaattgaataggaagtttaaataattttgtgtggagggttttgattggaattcaatgaagataaaaaactaaaggatggatggatgtggactttttaaactttgaacaaagaatttaagtataattttgaagggaatgaaaatgaagagtatttgtttggagactttttgaactttgacaacgaatttgaataggatttctaggaaatagaaactaagggagaagtttgaggacttttagaattttgacaaaaatttaaatatagaaatttttagaatacaaaaggagtttgaaatctttttaaaataaaactaaagatatttattttaaggtataaatttgaaaggataaaataaagatgctccaagtttatagaattcaataagaaccaaatataaaacttgtcacaaaagattttctctaatattttataatttaaaattgaaatagttcacaaatgatttaatttctgactttggatgaatttttgggatggtggcaaaaataaaaggaagggaataaattggactttagcccaagattatgtggtacggatttctgagtgaaacatttgtgggctaaaggaaattggactttctaaggaagcgattggaaatagtgttcttaacacaagagcaatcatttaatatttgtattaatattattcttctgccgaggagaatcaaaccttgggaatcaaattggcggtttgatttatataagaatttggatagtggaacatctagaggagtttgtggaaggtgttgtatgaaggagaaacataaggatttctaaagataggtatagatcaagggtttgatccacaataaattccagcaaaaaggaaattatactggtttagccctaaggataaaaagggttaatgggatataacagaaagttgggccgattagagaaacattggcccaaactaatttgtagacttggaaattttgaataggtaatttagatatggaggattccaaagggagagtatttgttggaggataaatttggatttggagataaatgtaggtggggaattataggaatttttataggaacggatttggtggtagtataataagctctaaaactatgttgactcagagggagattgaaagttgatattttatgtactctagagatatttgggtagagatcaaagggaaagtattaactctgaggaaattgaaaattattgttttatgtactctagggatggttggaaattattatttcatgtactttgaagatagttgagtgggaatcgaaagggtatttgtagatgtggagatgttcgggaatggattcgaaggaaatataatctagagccaaagttatagattaaaataaatggaagggttttgtaaaatttgaaataaacaaaataaggaataaaataaggattttataaaatttagaagagagcatttaactttgcaaataaaatttggatccaaattaaaagatattaaaagaaagcaaggttgctcaacgtaagaattgagaagagcatgacttaaaacatttcgcaaaaaattttcatgaaattttgagtatgttacaatatatattgagtgtgcaatgcaaaatgttgggctcaaccaagatataatgcagaaaagaattttgtggataaattttagtggttattctaaccttataactatcattctatattcgattggtaaactattttgatccctcaaggaatgtccccttgtttgattaaaaatcatctaaatggttatgaaaaattctaaaaaaattgtcaacactcatggaacatacttatacaactccacaaaatcttaagtccaaaatcaactcatatgtcgagatatgaaaaagacaaattcagcgtatgtgttcacttctaaatttgtatttttatctcaatgtgtaggtcaaatttgaacttgatttttggtggaccaatagatatcactatactctacattgttaaccttttcagaatttttcacaactatttatatcgaatttgaaagaaaaaaagtacgtgagaggacatccctggtgggattataatacactcccatattcgattgctaaaacatgtattgtaccaatgtctcttacatgttttattttgaataacaattgccaccgtagcgttagcacaggcatattaatagagactgttcttctctgaaaaaggcaagtacttatcttctgtcaatgtcttgagcgagtgaaacactggtggagaaaccatcttttgtcgatcggccgaattccacaatagtcccggttgcaacaaaaaccgggactaaagatgatctttagtcccggttaaaaagggtaacgggcatatttgatctttagtcctggttggtaacaccaacctctttagtcccggttcaaatgctgtcagggcttgtcaggtccccccgggatctttagtttccggttggtgttaccaatcgggactaaagatcgtaactttagtcccggttggtaacaccaacagggactaaagatcccccctctttatatatgccttcttcctcctccagcccgagagcaagcttcaaaatttcttcaaaaaagaggggaggtcatgccaaaatttatagtgaatttactttggtgattatatacaaatcggaggtgcctaaaaggttagcaacttcatcctccaattttttttggtcatattacatttggagctatgttttgcacactttttttgtctccaaaattttgttgtaagttgatgagagagaaaatttgtgtgggaaaagaaagaatatatagaaattttgtttatttgctaaaaaaggttttataaaatagttgagtaggaaaatatagtgaaagttaatcctaaataaaagaaaacaaactaaattgaaaattaaaagaatttaaaacttaaaaaataataaataagaattatttggtggaatattttataatttttgtatgaataatgatatgtcattattgtatgactgttgaaagagtttgtgattattttatcattattgtatgactgtcattattgtacgaatgaatatttgtgtacgatttttttttcatttcatgtagatggatcggcaatggatgtacgctgaccggcggtccaaagagtttattgatggcgtgcattattttttgagagtggccgaagctaacaagcagaagggttttatttgttgtccatgcaataagtgtaagaatcagaaggagtattctgcatccaggactattcatttccacttgtttgagtcggggttcatgccaagctataattgttggacatcccacggagagcaaggggttgaaatggaagaagatgaagtggaagacgacaatattccagactttgctcagtacgctggatttgaaggaaatcaaacgggcgaggaggatagagatgctgattataacgacattgcggatgatcttggtcagatgttgcaggataccaaggaggactgcgaaagtgaaaagagggcccataaattggacaagatgttagaggaccacagaacatcgttgtactcaggttgcgagtaggggcacaaaaagttggataccactctggagttcttgcaatggaaggcaaaaaatggtgttagtgacaaggcatttggcgatttattgaaactcgtcaagaacattcttccggagggaaacaaattgcccgagacaacgtacgaggctaagaagatagtctgccctctaggactagaagttcagaagattcacgcatgtcctaatgattgtatcctatatcgcggtgaggagtacgagaacctagaagcatgccctgtttgtaaagcactataatacaagattagacgagatgatctaggtgaggttgacgggcagctaacgaagaagagaattcctgctaaggtgatgtggtatttccctataataccacggctaaggcgtttgtttaggaacaaggggaatgctagaatgatgcgttggcacgctgaagaacgtcaataggacgggatgctgagacaccccgcagatggttcgtagtggcgaaacatcgacagaaaatttaaagacttggaaagcacgcacgaaacatatggtttggtttaagtacggatggcatgaatccttttggagagatgaccagtggccatagcacttggcccgttacgatgtgtatctacaacctccccctttggctatgcatgaagaggaagtacataatgatgccgattattattcaaggccccaagcaacctggtaacgacatcgatgtgttcctaagaccactggtcgaagatcttaaactgttgtggaagaaggaaggtgtccccgtgtgggacgaggacaaacaagaggggtttaacctatgagcgctgctgttcgtaaccatcaacgattggcctgcacttagcaacctatccgggcagtcaaacaagggttacaaggcttgcactgactgtatggatgaaacagaaagtacgtatcttaagcactgtaggaaggttgtgtacacgggtcatcgtcgatttcttgctgcaaaccacctagtacggaagaaaggcaagcactttgaacataaggcggaccaccgtacgaagcctaaacatcacagcgggaaaacagtgtttgctatggtgaaagatcttaaagtagtgtttggaaaggggcctggcagccagcctatagactgcgaagatggtcacgcggcgatgtggaaaaaaaactccatattttgggagttaccctattgggaattcttggacgtccgccacgcgatcgacgtgatgcacctcactaagaacctttgcgtaaaccttcttggcttcctaggtatatatggaaagtcgaaagatacactggaagcacgtaatgatctgaagcatatggaacagcgcagcgaccttcacccggaaccaaaggagaaaggcagccattacttaagtccagccagctacactcttagcaaggcagagaaggaaagtatgtttcaatgcttggagagcatcaaggtaccatctggatactccacgaatataaagcgaataataagcacgaaggagaagaagttcacaaacctaaagtctcatgactgtcacgtgttgatgacacagcttctaccaattataataaggggtatcctcccagacaatgtccgggcaacaataacaaagctatgttctttcatgaacgcaatttcgcagaaggtcatcgatccggataggttagaagcccttcagaatgatgtggtgcaatgtcttgtcagctatgagttgatatttccaccttcatttttcaatataatgatgcatctgctttgtcacctagtgaaagagatcggtattctcgggcctgtgttcctacacaacatgtttcctttcgagaggtacatgggcgttctgaagaagtatgttcgtaaccgtactcgtccagaggcaagcatcgccaaggggtatggaacagaggaggtcattgaattctgcgtagaatttattgaagaccttcgcccaatcagggtacctgaatcacaccatgaagggagactatggagaaaggggactctcggaaggaaagcaataatgacggtagacaacaatttattccgtaaagcccatttcactgttttacaacaatcttcattggtggctccttacatcgaggagcacttggctctagttcgcgccagaaacatcggtaagtccgatgcatggattacacgacatcacattgatactttccccgcatggctgcgacaacatctcatgggtaacgagacgattaaccagcaactggccttcctggcgaggggtccatctggctcgatcgcgacattccagggatatgagatcaatgggtacacattctacacacgagcccaagacataaagagcacgaaccagaacagtgatgttcgtatcgatgccatgggacacgatggtacaactggcacatattacggtgccatcgaggagatatgggaacttgactatggacctctcaaggtccctctgttccggtgccaatgggttaggttgactggtggaggcgtaacgattgatgacagtgggatgacaacggttgaccttaacaaggttggatactcggacgaaccttttgtccttgccaatgatgtaacgcaagttttttacgtgaaggacatgtctagcaaaggaaagaagggcaaagggcctgacgagccgaagcgccacgtggttctcccaggcaaaagaaaaattgtcggagtagaggacaagactgacgaggattacgatcagtttgatgggcaaccccctttcacggtgacgattgaccctagcatcctcctatcaaatgaagacaccccttactcacgtagcgatcacaaggaaggaacaatagtgaggagaaagtacgtgcggacaatcgtcaccgccgatgtattgccgtaattgttgtaaactattttggatgtattgaatatgctagttatatatgatgattaacaaatttaaatcatgcatatgctaggtatatataattattagaatttttaaaagttttaaatcatgcatgtgggatttacatatgttaattagaatttttaacaatttaatatcatgcatatgctaaataaatatgattattagaatttttaaaagttttaaatcatgcatgtgggatttacatatgttaattagaatttttaacaatttaatatcatgcatatgctaataatatatgcttattagaatttttattaattttaaatcatgcatgtggtatttacataggttaattagaatttttaacaatttaatatgcatatgctaattatatatgattattagaatttttaacaattttaaatcattcacgtgcttattatatattatccacttaatttactacagacaacaataatttttcgaaggttttgtcattaatttttcgactttaaataattttaatgcattatttactattttagaaacacatatgcaatgaaattcaatattcagtgctattatctttagtccggttcttaaccctaaccgggtttaaaaagaatttggaaatagcgggaaaatatctttactcccggttggtgagaacaaccgggagtaaagatatctttactcccggttcgtaacaacaactgggagtaaagatcatctttactcccggttgttgttaaagataagatctttactcccggttgttgttacgaaccgggagtaaagataactctcaccaaccgggagtaaagatctgggggtatatatattcccagtgcgccctcgtcttctctaccaacacttagacgtttttcctccgatcggcttctagctccttcgccgccactgcctaggcatccccgtaccgacaccgccgtcgtctctcgccatcgtctcgcggtcctcgccgcctccgccgccgacgccgccgccgccgcatctctcgggtgagagccgccgctgcctccctctcttttgatctcgatctcgatctctctctctctccaaaccgccaccgcctagctcgttgccgacgccgccgccgacgtagacgcgccgatgccgacccctcctccgcctgccgccgatgccaaccccgacttccacgcagccgccaccgacgacgccgccgcgtccacgcggctgccatagccacagcaccgacgcccccgcctcgagctcgccacgccgccgcgccgccacgccgcgtccacgccgccgcccccgcctcgagctcgccacgccaccgtgccaccacaccgcgcgacgccgccgcgacgccccgccgccaccacgccgccgcgacgccccaccgccaccgcgacacgctgtcgccacggctgcccgaacgtgtacgaggatgtgaccgtggaggatgcgctcacgtggaggatgtggccgtggcagccgtggcgaacgaatgcgaacgaaacgtgaacgaacgcgaacgacgtgaacgacgtgaacgaacgcgaacgaacgtgattgaaacgtgaacgaacgcgaacgaacatgaacgaaacgtgaacgaacgcgaacgaaacgtgaacgaacgcgaatgaacgcgaacgaacgtggctgaaacgtgaacgaacgagagtgttagtgaacgaacgcgaacgaacgtgaatgaaacgtgaacgaacatgattgaaatgtgaacgaacgtgaatgcacttgaactaaaagtgtgagaacgaacgcgagcgaaacatgtacgaacgagataaattaaactattgttgaacttagcatatatatatgattatatatacttgaaaacgtgaaatacattatatgttcctttgcgtttagactaatacatttttttgcatgttgcagagaagacgtcgtcgtcgtcgtccctcaagccgaagtggtagctagccctcaaaggaattcacgcagacaagtgatgtaaagatgtgattgttaaatatataatataagattgttagatttctaatataagattattagattattagagttagcatatgtgagtattagagattattagattattagacttagaatatttgagtgttagagatagttagagatttaatataagattattagaggtttaatatacaaaacttaattagacttagcatatgtgagtgttagagatttaatataagattattagagatgtaatattcgaaacatatttgattgttagaaatttgatataagattattagagatgtacaaatacacgacacttagacatagcatatatgattatttgagttttaatacaagattagtagagtgttaatattacgcttagcaaatatttcttctatgaacagatagctgatcgcgatgaggaacagatactgtacgaaacaatcgtagagggaagcagccagtactggaacgaaaaaaaggggaacgaggatccaaactagtacttgaatgaggaggagaacatggagagggatgaagaggggaacgaggaggggaacgtggagagggatgcggaggggaacgacgaggacgctagtggaagtcatccctccgctggacagaagagggcacgcggacaacaaggtgccgcgaagaagatagagggtcagcacatcataactgaggtggacgcagacggccgacctagtgccccggcaaaagcagcgaagaattttgtacgccacatcggttgggttgtgagggataacgtgcctgtcagcaaggtgtactggcgcagaacaagggcacgcggggataatgacagctttgtcccggaatcagagaaagagatgctatggaccacaatgctcgagacgttcacgctccctgcgggtacggagaacatagtgaaacagtggactcttaagaaaatggcagaagagttccagaccttcaagggagatctgtaccagaaatacatcctgaaggggcagacaccgaacttcgacgtattcccgaagctaagggatcactgggatgagtacattgcttacaagacaggtcaacaagggcaggcgatgatgaaaagaaacaaagaaaataccgccaagaagaagtaccatcaccacttgaggtcaggcggctatagcgtcgcgatgccgaagtgggaggagatggaggcaagcttgcttgagaggggtatcaaaccggccaccgctaaatggcctgatcgatcgaagttctggtactatgctcatggtggaacgctcaacccaattgatggctccttggtctttagcgatcagatacgcgaggctgcgaatcgactaacggacgcagtggaagcctcttctcagggcacattccgacccgacagagagaaggacgagctgtcactcgccctacagactcccgagcatccaagacgaacacgagggaaaggcgtgattccctggaagatgggattcaaggaggacatccacacgtacaggagtcggatgaggagcaagagagataccgaggcgaagattgcagatcttgagtacagggtatcgagctaagagctcagcatgcaagaggaggtggcccggaaggtggatgaacgcatggcagcacatcggtcacacgatccccagccgtacatacctcctccaatggtcagcccatcaggcaatcgtagcagctgcgcctcaacagggcaggtaggatcacatagcatggacgccatgcaaacccaggacgaaaccacctgccccgttgatgagatcacgcaacggacaccatgtgagctgcatattcccttcaagaacttatcaatcaaggtatgctcgatgtaatatatgatttttgactcgtacgttccgcaagttgctgcttaggttgattactaatagataacctctcgtcatgtgaaggtggtgtcaggaatggccatcccaacagacatttcagggacttaccactgtaggccgattccagcaggatactcgatggtcgaagttgagctggtggaagccgtgtacgaggacctcgagttggactacccaggaggagacggtgagacgcatctacgagacacaagccacgccattatactatggcgcaagcggtacatcatcctccctaggcgacaagcggcgtctcgtgcaccatctcctccggctctgccgtctcctcctgcaccatctcctccggttcctccgccacgtcctcctgcaccatctcctccggctcctccgccacctcctcctgcaccatctcctccggctcctctgcctcctccacctccaccgtgtccgcctgcacctcccaagacaaggtctcgccaagctccacctcctgccagcacaagggcaacgaagaaggccaaagttgacaccaccaaaaacaaggagccgccatacggttgcagtcaagaggagcttgacgcttatgtggcaggagaagtgaagaggcaactcaagcctcggagtcctgaaaagaagatagctattgacccgagtgtgaagaatttcttcaagggaatgtccaccacaaacaaggaggccttaaagctatcggattatgaccgaacacttaggaaagcctattacaagaagtccaaaccagttcctcagcttggagaacaaccacaccaagtgttcgagccgttggtgaccggcgaacactttggcataacggatttcatttcggacaccggtctaaccatggctcagttggttggaggcgcaccaatcccgaaggtggaagtggcatacaagtttgaactcggtaaaccgcttgtcaggcctaagcagctgcagtatatacatatatgtgtgtacatatatatgtgtatatatatatatatatatgtatatatatatacatatatatatatatatacacatatgtatatatatatatatgtatgtattctatatacatgcataatatatatattacaatgcatatatatgtattttgtgtgtgtgtgtgtgtgtgtatatatatatatatatatataatcaaccatgcagcaaacagggccatgcaaataaaaaaatggtacatagatctttagttcaggttggtaacaccaaccgggactaaagatggatcagccggccacgtggctgatcgatctttaatcccggttatttcacccgggactaaagatcgctatctttagtcccggattcgtagtttcggttggacaaccgggactaaagggggttacgaaccgggactacaaacgatttctccaccagtgaaagaggaggtcagtaccttgtcccgtgccttccatctagctatagtattttaacttgttaacatcacgattatttcagtagattaatcatgtgcatgcttgaatgtaacattttcctctagagtgcttcatagagatgcacttgatagtgcagtggcaagagatgtgtggttttaaccgtaaggttctgtgttcaatccctaacacactcacaatttcttcttaaaaactatttggaggtacgtctcttcctctatacagtggcgccaggaagcaaatagcgcgactctgagcattcatctctaaacaatgagtaaagaaattacttctatctctgccctaatttgtaaagggagtaaaaaaatcactctcgagtaaaatatttttcacatcacttttgatcagttaatggtcaaatatttttcacatcacatatagttaaaaattaactaacttgttcaatgtcagtcgaaaaaagaacatttgatttacaaaaaaattaaaaaatcatagacatttaatttttcaaaaacataatgaaacagaagaaaaataataataacaagaaaatactaaacgtttatcatagtaaataactcaatatgctaggtcacgtttattatagttgatgaatcacacatagttaaaatttaactgactaaacatgaatatatatggtgcgctatatagtagtaaaaatttaactcgtgaatcaaagtgggtggagtcgggaggggagtggggtggtgtcacgcccagaaattcactagtaatttctgaactaatttgtgcataaaaccctcgtccaggaatcagccgaggtacacaaactgacaatttaatatacaaatccatcaaaataataacgttacatacttacaaaagaaaagaaaactgtagcggaattacggtctagcgaagctccggctccactcccacaggcagctcaactggggtataagccaaatatcttctccttcgcaacttgtcttcaactgaggtttgattgattattgcaaggtgagcatatgacatactcagcaagccacacagcaaatatgcaagtgcacaaggatactaaagaatggcatagtatagggcttatttgcaaaagcagcatttagcaaacatttgagaattgtaaaacagtagagcaattaatcatcaatattaatcaacactgtacaacatacccatgctgcacaggcccaaccatcctgaacaaccatacccggctgcacagatctatctccaaaccaagaatataccattccaaaccaggagctaaattaattagcatcaattaccacattattattaatgaatagtgtgggactaatcacgaaagacattgtttgacccgcccataaccgcgggcacggctattcgaatagttttactctggccaaaggtgtaccactgtacccacaagacacagccccacgacatgtcaccatgtgcctcaataccaccacggtacctcggaaaggagctgtgacagtacccctcgcacaacacaatccaccacaacgcaccgttcctggatcataatcacccccttataaacaaggcatggactccccagcgacccccgtgggcttatctccgccacttctcagtctggtgctccgcaatgaaccatgctatacaaaaggtaaagccgttgcccatggtggcttgtggttggcacggttaatgtttcacaaccgaaactcgtgaaccggtccttaattgtcatgagcacgaccatcaaaaccatgtgctcataacccacctttatcaagttttagttggcatattaattaattaaccaatcacgattaaccatcgtgagcttccattaaatatccataagtgatagtgaagcatgatttatcccattagtgagctattgtttctaagcacggctaagcatctattataagcatctagctgaaccaaaccaatatataaggttctagctaatcaaattataacccataggtaaataaagtcatcttcggccataattaaatgggaaaggctcaccacccggtgacattcgaaaataaatgcacaattaaaataaatagagaatttaaatgtaggatcaacatgctcaaaggaattatgtttgggatctgtgacttgccttgcaataaagggtcttcaattaatcttcttgaatacttccgacgcactcacgaaccttcgaaacgacggaaacgacaagctaacatgcaaaacgaggaaaaagactaagaaactccaaataaacagtacatataaagtaaacaaacatgtagatcatgattttagatgaatttagagacttgaacgacctcattccgatttcatatgaattaattacaaattttacaagattaaattccaattaaacctattaaagaaaagactattccaaattaattaaacaatttacaaatgatttataattgagagaaaagattaaagcaacctccggaaaagattagattatattggtagatgacatatgataaaaagaaccaatatgccattggaaagagaggaaaggatttatatggctgagattaatcttgaccgagtcgaccaagatcggatggcttagattgatctggcaagcaggcctcacgggataccaactcaacgagtcaattctacgtgacacgggatcacccaaatgatcaaccgaaaccggcgaacggaaccggcggctctgaactaaaggacgactcaacacggacgaacgaacgaagcacggggaacaccttattcgaacgaacgagcgaacgattcaacaacggctgcaactaaaccggtcggctagaaacgattcacggtaaagccccggtacgacaaacgatagaccggtaggaatttagggatacacctacggctagacaacttggctaccgagcaacggctaaagcggcggctaggttaaagcggcacacagctgcgacatggcggcactagggcgacttggtttggctaggcggctagcacaacggcggcaacaagcaacaacggcacaaccggtagtgacggtgcacagggcagccggcaagtgacgcggcagcggctgcgctagggttagagcaacagcggcggcgacatgaccgagggattgaaacctaacccgaggggacacggatagaagtctcaccgaaccaaagcgatcggagatagatgacgacggtgaaccggcggcaacacatggagacgacgacgatgctagacagacaatggattagattgaattaagaccctagggataaagtacaccggtgaacgacataggagcggcggttgccgacgaaataatgcaaacggagggcaccgggagaaagaggagatcaaagtgaccctagccaccacttatgcgacgacgaacggcaacggaagatggccggcgacgagctttgaagggcggcgaggtactggccacggaggcgacgactttccggcgatgtgcggcgacaacggaggggtggccgggcttcacttcgcagctgcgaatccaatggaggcagcggcgaagcttggcgatgacgggaggagcagcagggcttcgccggagatcaaaacgcgacggcgaacttcgggttgacggcgacgatggagctccggtggattttggtggcgacgaaggggcggacggggtgcagctccttcttgcgaacctgacggaggcaacggcgagcagcagcggcgaccacagcgacggcgcggggcggctggagacacggcggcgacggcggcgctccggttcacgacgacgggctacctccgattggatttggcgcaaaacaacagcggccggggtagggctcgacgttgcggagccgagggaggaggcggcgctgaccggcgacggccggggcgacggcgaatggcggctggagtggcggccggaggtggagagagagggagctcgcggggagagcgtttccggcgacggcggcggacgggacttgaggggatgaggagaggacgactagggggtcctttatataggcacgggagctcgggtccgggcccaaatcgacgagaaaaaaaatcgggaaagtctagggttttcgccggtaaaaggaaggatttgatctgcgaaattggaaagaatttccatagaaaattttggggatttcttggggaaaaggaagaggagattgaggggattccattcccgcaactaatttggaaagaggagcaacggggaggtcggattggtgggaggaggcggcggcactgtgcacgagcacggctggctcggctctgtctagaggtagaagaaggagcactgtagccacagggaggaaaaacagacttctatgtgggctgagaggaagggagagagaaggggaggcaatgggctggattcggcccaagctgatgaggaggacttttatttacttttccaaataaattaaccaatgagatgatctttcaattgttaaaaatacttccaatgctcaaataattccaagaaaaatcttgaacatacttggacactcaaagtatttaatataataatatccagatcatttaatgataaatttattatttaaataattgctaaactgttctttgtattattaaaattaggaattgagctctgaaaaatctgagaaaattccagagagtataactaatcatggagaatttaataaaaattaaatccatccatgctttatatttaggaaattttatttcccacatttaacttcacttgtaaattaatgaacatttaatataaattctattaataatttattaaatgatttataaatccttaaacgaaaatcaggctgccacaggtggtgggcagtgggtgggtctggtcactatgtcaggtgccgtttaatacgtagacgtttaaattttgcaaaaacattatgaaacagaataataataataataataataataatattaataataataataataataataataataataataataataataataataataataataataataataataataacaaaaaaaaattaaggcatgagcaaaaaaaagtttcctttagttaataaataactcaatatgctaagtcatgttcattatagttgctgaatcacacagttaaaatttaactgactcaacgtgaatatatatggtgggctatgtagtagtaaaaatttaactcgcaaatcaaagtgggtggagttaggaggggagtggggtggtgggcagtgggtgggtctggtcactatatcaggtgccgtttaatccatggcacgccacccagccccacccgctgtgcaaccataatccacagttaaaatttaactcacgacgccccacacatgcgccactcctccacacccataatctgactaaaattttaagttgatattcccaacttttagcatatatatacatgtgttgttcccccaccctgcaaccaaccacatactgatcctatttttccagacatgagagaggcgactgagggcgcgacgtcggcgggagggagacgcggcggctccacctccactgccgagcgacggcgggcacggcatcggcggatccagcatggcatggcacggctacaggcgtggcggcgacgggcgatggcgtgagggaggtgaggaggcggcgtatccggccaccgctccgtgccccacgcatgtggatccggccgcggtcgggcgaatccgccgctgatctggcactgggaggctagcgtagcgtcggcggatccggcacggcacggctgcgggcgaggcggtgacgggcaacgatgagcgggaggcgaggatgcggtgcgacggcggatccggcactgatcctgcacggggagacgcggcggctccacctccaccaccgagctgcggctggcgcggtgtcagcagatccggcgcggcatggctgcgggcgaggctgtgatgggcgacggcgagcgggaggcgaggatgcggcgcatctggccgctgctccacaccccacgcgcgcggatccagccgcggtggggcatagccggcgcggctgtgacgggcgactggggcgggaggcgaggcggtgatggatccggcctccacgccgcctccatgcgcacggcggcgacctccgtggtggcgagctcggactccgatggataggcaagaccagtggtgccacctccacgacacgccgccgtcgatgtccggagcaagtgtaaacaaaattttaacttttgctcataaattgtgaggatgtatatgttgagtaaaacttttattgtcataccaagttaattttttacttagtaaggataccaagttaattttttacttagcccgccctccaatgtttttaaccttattcagctgcatcccgtgtaaaatacggttttgtaatgaatacgtgaaaacttatacgtgttgggatgtattttttgataacaacaaattacaaaacaatgcgaacaatcctctgaattaaagaaaaatgtcaactctacaacgatatcatcgcaccctaccacacaactgtatctcggttaaattttaactccgcgagacgggttggttgtctcggtcatggggtgtcacgagttaatttttaactcagcagtgaccaggttcaatcacatatcgttcaaaattcaacaacaactaaatttttaactccaaaaccatgtcatcgtatcgcaccacccaactgtgtttaagttaaattttaactcaaaccaactgaattaatgcataatattaactcctcaacgatgtcatcgccccccaccactcaactctatctaagttatattttaactacacgggtggtttggatgcctcggtggtggggggtttgtcgctgtgtgtcgcaccatggagttttcctggcgcacagcgcctatgtgtcgtgccgtgtagcgcgaccgtgtctataaatatatatatatatatatatatatatatatatatatatatatatatatatatatatatatatatatatatatatatatatatatatatatatatatatgtatatatatgtatatatgtatatatatatatatatcagggttatggataccacatatctaatagtagttgattgaatcttgacaggacccaccacttgatgaaaccatgagcacttgagcaggagcatgaagtcacatggaatttcttctttaaaaatgcatggagggacacctctccctccaaatctccttttttttcctagagtgcttcatatatgctatatatatacatcacttgatgaaatgatgagcacttgagcgggagcttgaagtcacatggtttgtctttttttttccgcacttgtgacagcatgaacctaagcttaatctatgtttttttaatgtactgatgtacaagcacaaaagattacagatgggaggcttgtgggtcagctgctgaacctgaacaatggccccaagctcctgaaccaactgaaactcaacagatgcagcccattgggatctattcctcaacaaagcgagctgttcactgatcttcgttcgctcgtgatttggtgttgcagctgggactccttaccagataacatggagcgtctcaagtcactcgagaaactagagctatttctttgccctcaaatcttgctgcttccagtgctacccctgtctcttaagacgtttcgactttatcgctgcagcgacgtgctcacgagttcgtgccaaacaattggttatgaaaactggcaaaagatcaagcacattccaaacaagcatttataagcatccatacatgttcaatgtaaagtccatgtgtgctcctccatttcttttttttttatttgaaaagttatgctctacggtgattatactgttactcatgttgattctgttttgttgatcaggaagtaattaagcctgtcaaatatactaaatgctgggggcggatcatggtgtgcacatgcacgccaatgcacggcatttggaacacagccagagaagaggacgttaagcatggtggctgagatcagtaagccaaaataaaactggcatggccagattgtgaatttgtgatctttggattatttcttgctaatttcagtataataccgtacattctgtgtttattcattcatttacctgtttcatgtttctcttattattccttgtgttggtcaagcgcatggccgggcttgtcggtgcagcgccctttgtgtttgtggtgttcctcatgcgtgggatgcatggcccgcgtcgcggaggatcatgttgcatttccacagatttcctgttcttgcttgctgttaaataagagaagaaaaactaagaaaagctgcacagttctggtagcacaaaacattttgttcaagtgtttgtctaagtgcttgcttaagtacaggagcgtctcccgtcagattgataattactacctccatattttaatatataacaccgttgactttttatccaacgtttgaccattcgtcttattcaaaaaatttatgtaattatcatttattttattgtgatttgattcatcatcaaatgttctttaagcatgacataaatattttcatgtttgcaaaaaaaattgaataaaatgaatgatcaaacgttggttaaaaagataacggcgtaatatattaaaatacggagggagtatattttctctttacatgtgacttaaaaatatgtgcagtaaaaacgcgtacgaaacgtacaatattttcacattaccaagaacacatgcgtgttttctccctaacatatttaattacatgaaattattggaagcacaccggatgcgttcaaatggtcgatagatatttcttcattcattcatgagggcgtcgggccgtcgcctcgcggagccatgcggagactccggacaaaagacttgtggagtcattggtcaacggcacgtcctgttgatctgttgatcgtgccgttgaccaatatgttttgtgatcgttatttttgacgcatcattttttgtcgctgttgatgatatatagaggactatatacaaaatatatataaagactcgaatatcctcgacgcatcgctgttgatgataaagaaaatctcaaatatagacgacaaagacttgactacttgagtacgtaggtactcagtcatcggcacaatcgagatgcatggataaaaatttaaaagcgcgagtcaaaacttgttctgagtctctcactccctgcagtatgatatatttttcaatgtcttcacgcgggcccttggtacaattttatcgttggtattagatcttcgatagaggaccgtaaaatcgatcataactgaagcgtgtggagttgtgggtgcgtaagtattccataacacacgcgtacatattccctgaattcccgtatgttcgtttctaacccatgctcacatagacggttcatgtttgccgtcatcaccataatttttgaaagcatgtccatgtgtgtctaatatttatgcacactaaaaaaatagcccgcgcattcgtggtggacatgcgtattagtttgtttcgaaaatagttctaacaaaacaaattatttaaggtaaggtatttttgatttttttaattgagtgttcattatatcttttttccttgaataaatctcgacaaacttttattgtttttgttggtaagaaatgtattttttaccaccctactaattatatctttaattgcttcacatatatgcaaattcgttatgcatgtgaaccaataaagatagaaaagttctttaaaaaatatttattgtattttgaatttagtgattgagtgattctaatttcgaatttatattcaaatcaaattattgttttattctaaattgtatttttaggaatttgaaattgtacttaatctcgtaacgtgttgtatttggactcttctaattttaatacttattttattattccaaatttaagatatttataacttatacttttatatagactcttgatattttatattctacatagtatcttgttatgttttttagttttaatttttattttatttttaatgcgtttttaatcaaattgcttgttttaatttttttctgaatttaattacaaactccttgtagtaatccagctgtcaccatcggcctcgcggatcatcttgtcggccttctcattagtgagcctctcttgatgtattggacatgatgtggcaaggctcggcggtagagatggaaccattttctagtctttgtcaaagacgtggaacgtctccctctgcctctcctctcagtccttgcccttcacctaatcatctagtacgctgttagacctaggaactcgtggaagtcattgatgtcactgtcgtcggtgtccatctctccatcagtttcaagcccaaggcatgcatcatggttccaagctccttggtggtgattgaacatggattttagactcacatatttcatcgctttcgaagtgctattatgctcaaatatttgttgtcagaatgaccgcactatctaacttctatatagcaaaatatgggtaatatggatcttggattatgtatttacttataaataacacaacaaatcaaataattgagaaaagtacatttaacttgagagtcatgattatttagctattcttttatatattatgtgttagctaatagtatcctagaggtgagtaggagagtggagggagtacgtacgtacgtgcgtgcatgctcacataggtatttgctcagacttttaaaaaacacacacacatatacaatatctactcagggtgcggtataattaaaacacatctaatgttagtaatcattttattgagagtggaatcatcataaatcttcatattaaatctaacagttttactatcaaatatttaagaacatataacgtgtagtaaaacatttcttttcttttggactaagcatttcataaattattagaatactggaaatttaaaagttaggccaatgttatccaatatactataaacaacttcaagggtcgtttatatttttttcattgcaatggaaaacctatatgcacatatacatgtgcgtaattttacacacttcttggagcatttacttttaaatcaacaataatatagatataatgtttaaccccctaactatattttggttgtcattttttttggcctgtcagccttgagtaaacaggcacgtaatatgttagaatcaaatgagctagacccaatttaatcctaataaattttatagacctacaattaatgttaacaagattaataccatcttgaaaaccaacgagaaagaacctcaacttaaatatgctgctatatgagagcacttgttgagcgattgaggtggtggtgagacttccacacacgcgctgggctagtccatgagcgagggtgaggcgtgaccagcgggcgtatggggacttgcctgcctccctaatgctaccttttgttttgatgaacaaaggcataaccgacgggtgacattacttgaagtattggacgataacttaatgcgcacacaacgttatctccgacgggtgacattacttcaagtattggacgagacctcaatgcgcacgcaacgttatctcccctactagcatgtacaaaaacctctcttgattctaagcactttgagcacacgagtgttcaggacaaggttatcttccccattgggaaagacataaacctctctcggttctaagcacttgcgcgcacaagtatttgggacgagcaggcttccagaactccattcgcttgagtacgtacacaggttagacgagcgatcaagtttttgaggagcacgttcttcacacggctgctctcggcactgcatctccttccactacatcaacatgtcgcccgtaacctgaatggcagcaacggaggtggaggcgagaatgacaatgacaacggcaatgaaggcaacaacaccaaccatgcctcatccagtaccagaacatacactctctgggtatatcactctattcaccttagtattaaacatgttgctagatgatgctattactgttattagcacgttcatgtttacatacaactgaatcatcctattatatacatgttttgcttattatgtttttttgattaaaatataccgaatcgtaactatatttccaatgtatagtaacatactggtatatatttcacactaccaaacaatgaaacacgcatgggtgttttctctgaacataaccaattaatcattgaaacaccggatgcgctaagaaaaccagccgcccacagctaagccaaaatgctggagatgtcattgttccaaattgacaattttgcctactaagcacgtgggccctgcaaagactctggacagaagactttagatcaagtcaatcaacggtgatggattcatgtctccggtctccctagagggatttactcaagtagtctaaaaagttataaaaattaaaaaaaaaagtagtaatagaaaattagtaagatcacgacgagactacggatcatgcaccctattctttttttttctaaaaaaccgggcgcccatctctagctagtaaacctgcacttcactccctgtcaactgtccacttgtacgcattccattccctgggatggctgagcactactttttttttatctgacacgcatgcaaaccgtatactcccttcgtcctatagagaaccaatctattattggatttaatattttctactacaatgaatttggacaggagctaaacaaatctggacttgttcctgtccagattcgttgcactagaaaatatctcatctaatattaggctggtttttttgaactgaggaagcatatgtgtctttttagtcgcatgcaataacattcaaaatgattgttattttaaactattcatccaatctaaagatctaattcaaccattgtatttatcgcaagtaaatttttataacaatatctcgcatgactattttctgataaaaatattattttatatttttagcaaaggttctgttttttatgttgcacatcatattctttatatatttcgatacgtacttcctgatgtttcactaggacgtttgcagttgttgcatgtgatgttctaggtgttttatagtaagcattttgtgatatttcctacaattaaattttccaataaatttaagtatttgaatacatataatatgttccttatgaattctttttaagtttcattagttgggattcaatgttaatttcctgcggtgctttttgtggttgttgcagtatgacgtcatgaggcatttttcacccttctctgttggttgtaggagcgagaggctttggcaaccggccgcaatatgcctatttcaccgggtgccaatcccatctatgtcttggatgagatcacctaagatttcataattggaagtaaaacaggccaagagcatgcggtaggcgccggtagggggtttggtggcgatccaacacatgtacttttttttactagaaaaaatgtccgtgcatatttaacaacaggtgaagattattttatttgtattgttgttatacggtctagttaagatgaaattcacttagatatatatttttttagaaaatcataagctgcaattagaagtccgatcgtcttagcatgcaagtctttttaaaaagaattcttatatgactctttctatattttcaaaagcgaacgaacttaaaaaccgacttaaatacggatatgtatttctaaaaacgatcgaacttaaaaaccgactcatacacgaatgacttattaaagtaccggcaaaaatatttttaatttttataacagtagagatagaaatagagatggagatagagatagagacacgtaacagtacgtaaaaattagagattaggtgggatatgatttggcttttttaatctaatccaattagaggatttgccggttatacctttttttgacatgcaatacgtacatatgcgaattacgtacttacgtgttagagataggagggtgtgattagccgggatgaccatgaggagtgattagtaggattttttaaattctaatccaatggtcatctattgatttactgaaaaatccagggatatgtactttttttgtcaaaatttttagaatttctaggctttgtatttttagaaaagatagatctaatggtctaatacatatttaagtgaaaatcgatgaacaaataattttattaaaaattacgtgaaaaaaaaggtaggtcaatatttgtacattcgttcctacttaacagaaggaaagatgagactatgtaaggaaggagtttggttcggttttttttgagaaatctaatctaatatagtttataatattagacccataaatttaagtgaaaatcgaggggtatatgttttgtttttttctcagagtttctatatatgtttttctttaatttattagagtgccaagtgatggcttgagattgttttgagaaagtttgatagactttataatagatagactaagatgcatgggtgttaccgcactctacacacacagtattgccccgtttttaaatatacgcactagttgagtctatgtacttttaaccattcatcctaattaaaatttataatacaaatataaaaaagtagaagttgtgcttaaagaacctttaaagataaaataagtcataataaaatatattgtatttatactaaatttctgaataacatgattgatcaaacgtatgtctaaaagttagctgtattactctctccgtttcaaaatgtttgacaccgttaatttttcagtacgtgtttgaccattcgtcttattaaaaaaattaagtaattatttattcttttcatattatttgattcattgttaaatatacttttatgtacacatatagttttacatatttaacaaattttttttaaataagacgaacggtcaaacatgtgctaaaaagtcaacggtgtgaaatattttgaaacggagggagtaaaagttacaagcactttaacacatacatagaagatacactgcactttaacacaatagagaactatagagcataaagcttggcaccggatgtacgtagtaaaggctattggtgctcatacgttttgagctggaccagtgggtcgctccaagatgccaccatgtgcaagcaaagcccagagatgtgtgatgaactctcctccccttggcagggtttccaggtgcgctttggcatcattcgaaggtgcaatgtacagcatcatctctgcccagaaatcacacagcaccttccatctgtcccccgggtgttcgatctcgatgagattgtttgcgagccgaccgcccacaacgaggagacggttgtcgccatggtcctggcttcttagcgcttccttccgctgctgcattgttttcttacccttcagcaattcgcgggcttcctcgaccagggcgtcaaatatggattcggagacgaagctatgatccggtaacaattccggagcaaaggctactaggtaggcacagtaccttgacaagctacaagctacgtgctgattagtagtagtagtagtactgtctattccatgttgatcttcgtcttccacctcgcaaagagtagtggcgatgtgccaagccattatgatatgtgttgtagttgggagtgtggtgcatgaccatgaaagttggtagtatacctcgttagcgtgcagagatatgacacagtttcccagttggccaaggcctctattcttcttcagggtttctataacggttttctttacatccatggataatctgacacgcttatcttccttgcggcccttcttggtcttattgaccaaggagaaggtagcatggtacagtatgttcatcgatttgtagtcaaaacttttgagcagtgtgtactgaccgagtttatcttcccagctccggaagtacctgaggctcgtgatgcatccaatcaacttggagaacaatacgctactgttccatgaatctgtggtaacatatttcgatatcatggctactttgctccaggccgaggccaggtatatgtacacctgtaaaccctcaagcagagcgattgcgatcgctgtcacggaggtgaagagagcgtcgtagttcctgtggttagcattgacgaggaatttgagctcatcttcatcgggtacccggaggaaatgctggaacagcttgtaggcaagccaaccgcaggtcgggaccatggcaaaagacaacgtgacgaacagatggtgactgctatagataaggaagtacttggtgtagaagtagtcgtgcacaaaggctaattctacctcgatgaccctgaaggttcgttcgacgcacctgtcgccatggagcaggccaccgaagaggaagtcgcgggtcttgtggagatttgattcggcgagcacctgaaagccggcaaacctgcggttcagcatcttggacaaggccatggagaggcacacgtccttgagcctgccgccattgccaccggagagcagactcccattgcagttccagatatcttgaacggtaacgagctttgcccggtcatcgtcgttgtacctaagatggtactcgggaggctccaccctaggattctgctcgtcctctcctgcaaccacatagtggtacccttgcatgtcgacggcgtctcgtcgttggaccccgtcgccggcaggtcgcaggtgctcgtagctcatgtagtctgccacccatttggtactcttggagagcatggagcttctactggctagcttgaacgacgcgacccgtgtgccggatttcaatatgactatgcagtatatgacccatagaatgtactggaaatccgagccaccagaggaaaccaccagccaacccacccagaaagactcgatgagctgcttcaagtagaacctcttccagtcgtcgttgtctagtaggctataagcagagaaagaatcggcgctgccgaggaagatgaagaggatgatggcccagacggagaagaggctgttcttgtaaggggacgactgcatcagccccagggtgtagctcaccatggggatggaagcagcgtacgccacccagatggtcattttgacagcttcacagctggaccgccggcggtaggagccgaggatgaggagcacaaacagcccgacgacgcccaggaacacgagaacctcgatgcggatcaatcgcaactttgggctgttgagcccgtgaaccatatcgacgagtgccatatatacgtaaatatgctatctaggcctaggtgttggtgtactggttaatatataggcagcagttgcacgaaggatgatagccctaccagctgctgctaggtagctagctaggtcatcgataattatacactttatccaaccatcccccctgccttgtccagaccatctgacggtcggacccacttacacataacaactccacttacaatttcatttttattttcattctcgtttcgtacaaaagggttaatatagttgaagggacaagctcttataagttgattccacttttactaaactagcaatgtggtatgaaacatacatacacagcttacatgcatgtaccacacatttctaattcaaattgggccgtgatgtcacactgtcctaatcgatctcttaacttttgcccgatgttataattaggaactgaagacttgacgaagtcacgcgaggatcatttccgaccttgcacactgaccctcgtttgtacctcagttctattaattaaggggcaaaacgtacagtatagtgctagggtataagtttcgcctcgttctttttaatcactagctctattagatttttatggacacgcttccattttctgaacacggtacgtaccgttgaatccaacttcttaactagttaattaaaaaatttgcaactttccgttcgtcacatcaattattttttatttgtaagtgcgaccgagcgatggcctccattcccacacacgtaagtaacacatcgcgtaaagcggatacaacacaaattcaatagatacaaaatctaattggacaattcatatgatatttcacactattgataatatattataaaaaataatgatcaaattataaagtttgtttaaaacttagacaaagtataatattggagactatgcagacacatattgtcacgccccgaactagccccgagcggaactagcccgtgacgctccaaattaacctgttaatcgataccagtcccaggaaacagtgctggtatcacaggaagacagaatatcacagcaacagatgtctctttattatagagtaggagtatagtcatgttgggctgcggacagatcccgagctcacaactgcattacaaaagggaagcagaagccaagacttggaccaaacatcacaggcgcgacttgggaactaggccgaaaccctaaaactcatcgtagccgacttgctcctagaagaactcctcgtcagcgggatccgcttcatcttcttcagcaactagggaggattatttatatagagcaagggtgagtacgggagtactcagcaagccatggggattaagtgtttaatgcaggcttcaaggaaaggctgttgtttttgcaattgattttatttaaactcttttctgaaacaactaagtgagtgcttctcaaacgacacggatgagacagtgcgtctcgtccggtcggagtatgtgcaaggtatcagttttttatgaattgatcaaggttggcatccggccaacagctttcaaacggccacccgggcctggctgatcccattagccgcaaattttccaaacatcgaacccaaaccacctcagcaaatttcacaaagcagtagtcaaacaaaactacactaggaatcacctcacattcgcccatgaccatgggcacggctattcgaacagtttaataacctctgcagagggggtacactttacccacacgacattactaacctggatcatccagcccgtgcagaacggccacgactagagaccttaaggctttcatgacaaggcatttcgaaagccgacacaggttcaccatatgccaacaagaggggtcccagaccaacaccagattaggtcccagaccatactgtgccaggaaacccgggggttctccccgacaccaccccgttgaatccacatgtctcttggcatcatggctcccccgattagctagttactcagccaggggtgtcccattccaaccatgtggtcgcacttgtcttatgttcggatgaaattccaaggaaacggtccttaagtgcaagagcgggaaaccgtacacccggtacgttccccggtccccgattttttggaaattcatttagttcgcaagcaccgacccaggtgtcgggttttccaagtcttttgtaaaacccaagttttacccatggttggatattttatattttgagggggggtgttccgatgcgcgtacccgaaggcccgttaacaaggaggtttaagtgttcaataattcaaggagggtaattgcagcaattaggattggggccggcaggccgtctcgcaagccgcggccgaattacttgtgtaaatcctattcatgcaatatttgcagaaaagaaatacttagatttaaattataggtgcaagatgatcaaaggtgacttgccttgctcgagatcttgaacttgatcttcgaaatcctcgcactgcgggtcttcgggctccgaaactacacgcgaaatgggacaactcaacaaacggcgaaaataaagccatattattgacctctaggcgtgtcattagatagatctcgagatttgaggagttttggaagttgaacggagtcaaacggacttacggttgggaagattttgaatttctaagtttattcgatttttggtctaaaggaaaaggatttatttaaatcctttttgagagaagaaaagaaaagaaaagaaagagggaggggaaatagacttccctcgggcggctagggcgcggcccgagagaaaggggcggcttggccaagcttaatgggctggccggtccaagaaggcggcccaaggcgcgcgcgcgggcggggaggagagagagagagccggtgggccgggtccaccttgcgtggtcccgggtaggacccgcttgtcagcggctcggcttaccatgtggagggagtacgcggcgcggcgctagggtgtggagcggggcgcggtgcatgcgcgtggctcgcgggggtgcggatgcagcgggcccacgcgcagcctcacggctcgcggtggaccgcgcgcgcgagcggggcggagggaagcggcggaccggggtcagcttgacccggtcgcggccgaggtggcgccgacgtggcgcctacgtggctgccacgcgggccggcgggaggtagatgacgacgtcggccggaacggacggcggacggcggcagcgagcggcggagcgaaccacggcgatacaggcaaaagcgagcacaccgggaggttgcacgggacgaggggagacgagccaatgactcggattcgccgggggttgctcgactgcggtggattgcggcggcggcaaccggcggcgagagaaggggggaaacggcgacggcgcgacgggagaccaattcgggcaagctagagcatctacgcgactccgggaatccgttgctagcgtcggattgggcggagctacgccgagcgaggccggcgacgagcggcgctacggagcataggcggcgacggcggcgagcacacagcgagcggcggcgagcacacagcgagtctaaggggaggagatggaacgaggagggaaaacagagggaggcgagcacacaacggtcggggcggcgccagctagctacggggaggctactcgtgctactacccgagtctaaggggaggagatggaacgaggagggagaacggagggaggcactaccgtgcggggtgatggggagcagtgacgaggggccgatggcacgggagtgatctctccggcctcgggccggggaagaggaagaagacgagcacccggagtccccttccgcgtcctagcgcgcaccggctcctccggcacacgcgacggcggcggtcggcgagagagacagagggacggcaatggcgcgggcgaaaaacggggaagattgggagggaaaaagggaagggagggcgcctgggtttatagggcggcaatgtcggtttggaaaccgaccttgggcggtcaaggcgcgagctggcgctcggcgctcgcggccaaaacggcgacagaggcggatgacgccgacggggaagagggagagagggagagagggaaaaaggaagggagaaagggggcttgccccttgcctctttgggaaaagaatgagggagagagggcgatgaggaggagccctgcctcctttccttggaagcacgcgcggggagaggcggggccgagtcgatgacgacggcgatgacggcgggggcggtttggaacggagcggcgacacgggcggcaggcgcgggctcaggcgcggcaggcgctgacggcggcggcgtctggccggtcggccaccatggcgcgcgcgcgcgggaagcaacgggcggcgccgcgatttcgcgggcggggagctcgcggggatggaggcggggagagggagagcgagggggaggcgctcggcgcggctcacgggcagagcggggagagagggagagagagagagagagagagatgaagagagatgggccgagaggaattcggcccatcgaacctgagggaggcaaaacagacttttgcggagggatttgatttgggacggatcgagattcgggatttgaatttgacgatagaacggggatttgagatccggactgactgcaagcgaagaaacaattttcgcaattagggtttttagaatttaattttcccgcaatgcgccacgacggaatgggcgctacacatatataatatgccaatatatttttcaaagtgaggttgtatcctctcttactataaagttataactcactaacttttaaagcttaacatgcaaaaaatactacatcatcatacactaacaagatgctatatcattatcatccactaacaaccattaaatttaaacatcatgcaaacatgctatattatctataaacttatatttaacatgtgatcatcatttcatataattcacataatatttcaatgtagattttcattatttttttataatatgctatgtacctgttgacagagtagatcacaactaggttatttgcagaatatggagatcgttgttgctacgatatacgcgagattgggggtaaagatacagagacaaggatgtttatacaggtttgggccccttaactgacaggtaatagacctactcatattggtcgaagccagtattgctcttcttcatcagaatcaaacaagtacaatatttgggataacatatctagtcatcattgacttgacggcatggaacaccacacgtagtcgacgacggaatagtcttcctgctcgaatacaaactcgatgacataagagatggcatttgagtctgtctaggcttgtctccgatgtctatgtctggtgatgtgtattggtatctattctcactgagcgtgtttattatggttaggcttggcttgatctcccccctctcctcctagggggcttgtatttataccacagatgtcccttgtccaaatagaaataggaagacaaaaatggatacgatccgagtagtccttgtagtttccatgtagaactctgcttctccttctgtataaggaatattttccatatatgaggcatgattccatataaaacttggtatatggtgggccccgctaagctcaacctaaggctattgggtttgccttatccataacactggcagtacctacatagttcatcctcacgtagttaatatttttttctcttgtttcattaagccatatcacatcaattgtttttagtgcttaaatgattaatctatggtccaaattatctctctcattttcttctctcattagtccatattacctcaattatctttaccctttagatgattaatctatggtccaaactatctcaatacttttcttctttcataaagtcatatcaccttacttttacatttgaatcatcattctatttactatttaaatttaatttatcataaacctcattaacttacgtaattgttaacggaattttgcatctgattcggagaaggaagaagatcgatcggcgaagaagatggcgaagccggcgtgcacgctgatggcgagggaggccgagaacggcatccatgatccaatgaaaggtaggcatcgtaccttctgttgtttttctgttcgcttttcctttagatcaaaagcgatgggtttccttctttcacttcgcgatgtacttcgcgagagcgaaagtgctcataacgtgttgaaagtggataagattgattgagcgagagaaagaattgaatacaatagagcgaaaaacaatcgttaattaatttatattaattaagttagatgaccagataaaaaaagaaaagtgtgtgcatgcatagagggtatcgaactttggagttcgatagcgtgtcaaacaaccgtagagttcgattgggttgtttattagataaaataattcgaagtgcatacatgcatttgcatgcaggtcctatcgaccaatgtctgtcgataggtcctgcacacccacatgcaacaacaggccatttactggtctatgcgcatgcattgtacttttaatattttttcaccataccaatccctatcgaacatacatattgaacagtgtttgtttgatatgtacctaatagaacatcagtagcaaaagtgggaccagcggaggggcctgtcaggtgatgaaagggagccattgtaggtggggccgatggagaagtaaagaaagagagataagaggaagagagagaatgacatgtgggcctcacaggatgactcagcgggatagaataggtcaaagcgttacgtaagtgaaatcgtgttttacatggctactgtgtgtaattctttttcttgcaaaagattcgcctatgcaggtgtccaatcggatgttacatgtatataacgtgattttttttctaaaaagaaaaagaaagagtccttatctacttcaaattctcatattttttattttattttatttcaattaatatgagaatttatagaccttgagagctacagtggagacttttttttctattactttattaagttaattaattaataggtttatgcatctcataggaagacatgagccatcgagcccattagccttctgttttccgcaacgattgatacttctcgcaagtttcttcttgaagatgacgtcatgacggcgaatatattccagcgataatcagctgcggttaatttgttctggcaggtcggcaccttggccttcagtagttcagtgtccgagggagattccaaaaccaagttgatcacggtggaattacggacgatgatgagctactagctcttgattgttttctgctttgtattagtggatacttttgctgatatactacgcgaaagctgtcaactttgacgccggatttctcaagtagcttagcatggaactggacaacgttttgtctcaaggtgctgagatactaaacatctggacagaaaaataaatgactactagtgacatgaacatttaaaaattgcaacttcccattcacaaggcaacatgccaattgtaaattgatgtttgacaattggtttgctaaagaattcgagttggcgatggcacttcaagttgggacaactctgtccttataaaactgatcatcgagactgtaccgttatatgaacaagtatgttttttcccccattgactacaactcatttgagtctgcaagtcaaatactgctgtgagcaatcaagaatctgcattctaccctcctgttatgaacttttttagattgtaaagactctttcctgcccaaaaacgattccattagttgagatgctcttacactcatatattaaattccttacccttccataactaattttgaactattcaacaatatcctcttcatacattggtgctccccagccattcattgccccttcacagtacactgatggtccctcgagtcatcaatctgaatgtaagtatcctcctcctcacggccaccgaagagctccgccataaaaatcgacgatcgtgcggcgagcacgtccgctggcgaggaggtcgcggagatgccggtgcaagtccggtggtggcaccaccacggacgacgatgacgccgcctcgcgacggcggtggagggcactcagtaaccacggcgatgtcacacctgataccatagccctaacgttatttgtagccatggacaattaaaggagaaaggtcaccggcgacgatgggggaattttcatgcggaccatgtggccgctcccgtcgggtatactgaacacgtattctgcggtgacgacgtcggcggcgtcggccggtcgaggtagaggaagacagatacccagtcggcgaactcccggcgatcgccgtcgggtagtaggcgacgtatatatataccaggtgtccaggtgtcacccctccgtcgtggaacttacaggagttgatgctcttgccgacgccgatccctttggttctactgtagccggcgacctggatggtgactgacccggtttccattgctctcttgctgtcgatggccgacgacgacgtggttttgccgccgtcgccggtggcagacttggaagttgtgagacccattagattttcaatcaactttgctatacgtccgacgcatgtgtccgacgcttgtacgactgaaacagtggaaaaacgagcaatgacggcgtcagatatgactacgggtcgctgggcctcgttgttgtttgcttgcgtactgggctttctgtacactggggccagtctggctgagaacatgtatcagcttaggttgctattaaaatgattcactccagatgttagattagtttagacctttaggatgtgaaaccaatatattctcacagccataacatgcaagtcctctaaaaaaagccataacatacaagtaaaaaatgattgaccagacctgtgaaaagcaacgcaccacggcttcaatttccatattcatggccaaaatcagttcattaaacagaatacaggtagagtgacattcaaaatacaggtagagtgacatccaaaatcacaagcatactgtctaacattgaataataataaactagcaaatgttgtttagttcgtcgattgagatcacaagtaatgcaagcaaaaaatcattctctctttcatccattcatatgctgggatagaagctccgtcaaatcaccatttccctgcaaaagtaaaaggaacagagcaacaagttaggggaaagtactatgcactgatatatactagaaggcaacaatgaaaattagcacctgaagaagatccatgtaagaactaatgtgagatggtggtgccgggtgatttgattggagtccctgtacaacaatattgtcaaatcaattacagcaatgcaaaattatgtatggcaaatcagtcacacaaattacctgaaactcatttgcagcaaactctgcactgcctgcctcatatgctccaccatagcaatgatcaaaatttacctaataatgaagtgcatatattcagaaacgatagagagatgaaatatttcaagtacttaatactactgaatagaatatgctgtacacattttaataaatatattacctccatttgtctagagttctgaatattgataagctgtttatcttttgatataacatttttggtccttgtctttctccttcttcgactttgtacttcaattgtagattcttgttgcttcttcattctcaatctccttaccacttgatccaattttgattgttttctcagtgaaggaggacgacctcttctacgaactgatattgggcttagcaccatttttccttgtttcagcaccatatctttattcttcccattttgctgatattcctgaatttccttgctgccatggtgtgcatcaatctttatttgcaattcatttaggccatccatcactaaattgcacaatgcatctgaaactgaaccattctctgccacttcattaaaacgcttgcacaacgtatcaaaacgcctaacaattggcgtgtcaagctgatcatcataggagcatttaataaatgtgtgcttgcgcttgaaatcctttctccatcgttgtagtatatatttggaagggactttttctatatcaacaagagggagtattgaaaggatatgtctacacaagatccctcggaattcgaaatgccgacattcacaatgcaagtcacaatcctcttggttgaacaaaacaagtaactctgaaacaaccctttgctctccaatttttcggtcctctctgacactgaaagtatgaaccaacccttctgtcttccgaagagttgcatagtagtagattttgcctcttagctcatcctgaaactctttaaacttcttgttggtatatgccacctgaaattgcctctcaaattcatagtgagtaatgcaaggaattgcctcttggaatgatttacaatcagacttgttttctttctctactttgtctcttagtgcattgtcatattgctccacaaattgcttaagtgtggttctagcattaacataaccatcaaagaaggcattcacactctcactcctttgcgacgaagacattccagcccaaaatgtgtctttcacataagccggcacccataattccctgttatcatataacccagcaagccattcattatcctgtaagctaaattcatcaatcattttcatccatcccttatcaaaatcatctctgtttaatgaatcatacaccacattagacaatgtagagctaataacttcatattctaagtacccaccaagtttttcaggaatcttcttcatgatatgcc

SEQ ID NO: 6256 - DNA, 7184 bp, Oryza sativa
ccgggagagagagggggggaaatggagctgggccgagaggggaggaggcccaagaggagggagagaaggagagggagagaaagagagggaggagagggagacttatttttagattttcttttttaataaacttcgataattgttgttgtggcttaataaatatttccggtgctctgaaaattcaagtaaaatttgagggctcattttagaccaaggagaatttaacaaaaattctccgggccacattcgaatttttcttgtacgtattttagtgtttgccaatttcttttcgaattttaattaattctattattccttttagaagatgatttttattttcgggatgaatttatcaggacgtgacaaatccaccccccttacaagaatctcgtccccgagattcgaggaggctagcaagaagataggttgggcggtcttctcttcttgtccgacttcttccgctctgtcttctataacaaacttgcctaacaaaacttcttcactctggactgcttggctcgatctcctgttgcagatggaatcttctcttcacctgacttgtccctggttgaacctttagctgacttcgactgggttgcggcacttgaagatggggcttcagttccagaactttgcatagttcatatctttggagtcaacctcatacaagttacccacttcatgtcatgcgtcgagatcagctcgtcattactaagataccatgcttgtcatcatttagcattcaaagtattcctttacacattcagccctgacgtattctttttagatttctcttatcaatcacctttcgacctacttctttgcctggtaataaacatctttttcgatatcttctatcagtcatcttttgaccttggtcactaagtactcttcactccgagagttgtggatgcttctggtggcgatgaggtcctttggtctgctacctttcagtgaaaccttgaagtgtttcgccaaaagctacactgactgtcattgcctttgatccggaaaaaacacatctgaaactcttagtccaaacatatgtctctttggttaatcacttgattttcttttccatcctcaggttggttattagctcgaggttagaatatagttcctctggcacgagaccctaggtctcctttgtcagtaaacaattatacacatgatcacatatccgcatcttccgaaagaatcctcttagaacttgtttttattaccaatttctcccatattacatgaatacaaggcactgtcttaaacaaaaagggaaggtgcttaacatcggtacattgtttctactatgggttagaattaacatgaggcctcacaggtacggcgtttgctccagtgaccacaaggcgagtgacctgtcttcttcttgcataatggccggagtgatggcgcaggttacgcttcggctgtggacaatctctagagaaatgacctggttctttgcagttgtaacaaatcaacgtcttctttgctgagctgtccatctggggatgatcattgtgacgtggagttggaattggcggttggaaatccttgctaacattggcatcagtggtaccatagttgctatcaccattggagtctttctcagagtcaaaattgctaaggttgtcattctgggttccaacattgatactatcgttgacatcttggtgaatgctactgacattgcacgctttattcgagtggtcactaatggggccagaaccatggttgttggtggtatcatcagcattagtattgctattgtggttgtctgcgttgcgttcatctccttggggcaggaactcttgatacacaacagaagatccggtgatctgaagtggctcagtgcgctgtctttggttgccacctggaaatactgggttgttaaccatccttctcttgcagttcgtcatccgactatgctcactttcgagttgcatggctttgtccacaagtttctcaaaatcttcataatcctctaaaagtagttgcactgcgagctcatcttttaacccctggaggaacttctcttgtttgtcttcatccgtttccacatcttctggtgcatagtgagccgaacgatagaactcatgcaggtactctgtgacggtcaaatctccttgcttcaggtagcgaaactctcgttttcttagtgtgatcattccggcgggaacatgtgatctccggaatacagatgaaaactcgttccaggtgatggtatgtccttctggccgtgatgcttcgtagctatcccaccactctgaagccggtccaaccagctgatgagttgcgaagccaacccgctcctggtcggtgcactgaatcaaccctagcttcttctcgactgtgcgcaaccaatcactggcttccataggatcgacggccatggcaaaggttggaggccccgttttgagaaattctgataacttgcactgttgctggactgtaggtacttgaacgtcggttgcccctgctgggttgttccgattctgtaatagttgaaaggctgttgccaacatgttggtttggttaaccacaacttggattagctctggtgaggtttcgttgatgcttttctcattcccattggcttgggttcttgagtcatcggatccatcattcccatagcctttgttaccagtactatccatctgtcacaaggtagaggttgagagggaaagcatacaagggaagaatagaccagaactagggacaagaccttaaaggaactaactcttcttattgatgtgttgtttgtttcacttattctgcaagttgattaagcaaacaacctagcatggttacatcacaacccaccgatgcaaaccacgcgctacacacacaagcaaggaacacacgactaacaacactaccctatagggtggcttaggttctgcgacgggttctccaagatcttccctccttcacagctggcttcactacttcctccatttcgctagcggatcctgcagtcttccggagcttcggcaaacaactgacgatgtcttcttcttcactgacctgaccatctagtactagttgaaaatccgaagaaggaagaacggagtaaaccttttgcaaatagcattaggggaaggagaaaaaggaactttcgcaaataatttttatttataaaatatgtccttaggttttatccacttggcttatcctacagtcgagatggctctgataccagcttgtcgcgaccgggaaaattgccttttcccgaacgctagtgtattaatccccgtcccaggaaaagccggggtacaccatacaaacatgatataaaaggcacatctttattatatcgataatatttacattattacaaaggcacttaaggcctgacaatcaaaaataaacagcagcggactagcggcctacggctccatcttcacaggcgctcaactggggtataagccaggacttcacctaagacatcttctccaaagcttctcttactgaagggggaaaagatagagcaagaatgagtacaaccacagtactcagcaagccacaccggcagatgcatgattaatgcaagggaggtacaagggaataataatatagggattaagttttgcggtaaacagcatttaaaagtcacttagttgcccaaagccattttgtaaagacgatcctagagctacacagtattattaaacaaggccgtgaaccctcacgaacctgccttaacccaaggcctacgatgattcggaccgaactggcaacccgacctgggtcccagctcgtcccaagccaacccaggccaaccattccatattttagttgttgagcaagttttaagaattaaaacactgacttgggtacattgctcggcttgcccatatccgagggctcggctattcgaatagatttactctgatcagaggtgtacatctttacccacaagacacatctttactccgcattccatggccttggaacccgtcgtaaagatgtgacatagtttccaacccatcctagccttagacaagagtaccgacccaatcctacctacggccgggatacccgggacaggcaggcagaactgagcccctagcattgggcaccaaccctccgccgtatgacatctcgactaccgggccgcagctcgtgtagccttcatttgtcctggagaatgtccatcgacccccgacttcatccatctccaatccgtgtacttttgtttatgactagactgagccacaaactaagccttacccattagacatgtggaagtacggtagtgctttgcaacagaggcccgagctttagtccttatagtggccggggtgctacttcccacaactggcatgcacccaaaccccaccgaaaacaggttttaggggttttgaaagaggaagagaggtgtgtgtccaattccaccataattcaacaattccatagtgtccaaatgatatgagaactcccaaagtctaaagttataaaaccacctaatgttgcctaattattcagcgaagcatctacctaaatttatactagtggaaccatgaatagagtacccactagttgaggttttgtttaatctagggtgaacaaggtaataataataacaatagcaataataatgtcataacaaaggtaaataggcttggctaaataaaacagtgataacgcgggaatttaaataaagcgataatgcattaatttaaatcaaaataattttataaactgggattcaatatgctcaaggatgatgtgacttgccttgctcagagagaacggccttccgaaccttcggcgacgaccacgaaccacgcttcgggaacctccggaacgacgaaagctacgcgaagcacacaagcaaagctacaagcctataaagaagcaataacaatacataaaaagaaagcacagggttctttaggttatagcaaacattaggagactttgaacgggtcgattcagagttcgtatgaccaagatatgatcatccgaagtttaatgctgttatatggagatttgcggattattataattaagctttgcaactataaaacaggtgtaagcgctagcctggaaaagacaggaaggctgcgccgttgacatgcggaccccacatgtcaacctaaaggaccacggtagaccgggtacacagagacggtccacgggtcgacggaagcggaccccgtgtgtcaaccgaggcgagtggccgacaaacggactccactagacaccacacgggttgcacacgtggaaaccacgcggctaccgagcgggcacactaacacggacactacacggtcaccacccgcacacgtgaacgactaccgacaccggtacacgggtaccggggtcgacgaccgcacaacgggtacggggcgacaccgaaaggacgagggcggggaagcgagaggacggatccttaccaccacgcgacgaggcgcgggaacgacaacgacgaacgggcgcggcggagacagacgggcacaacggagacgaacggcgaggggacggcttcggcggcgatccttggacgaaggcgagacgcggccggcacgaggcttgacgacgcggaggcgaggacgaagacgatgacgggggctgcagcgaccttgacgaagcgaggacgacgaacgggaacggcttgacggaggggcgaacgccacgacgaccgggaacgacgagaggacgacgacgacgacgacgaccgggaccggcgagggggcgacgagggcagccggcagtggctgcacagagacggggacgacgcggaacacgccgcagcgatgacgatgacggaggcggcgccgcgagacgacgagccgagcgaggatgaacgggacgtcgacgacgagaacgatcggagacgacgatgatggaccgcggaggggtttggatggaggggaaacgatgccgaggacgaccttgccgctgcgatgccgaagatggtggtggaggtggccgaccgatgcacggcgaggagggacgggcggccgaacaactccggtgaggcggacggagaggttcgcggcgacgttccggcgaaaccgagggcaggccggggtggagggcgatgcggcgacgccgagggaggagacggcgacgtcggccgacgctctggcgcggcgaccggggcagccggaggagatgccgccgaggaggaaggagaaaccggcgcgggcgacggtgttccggcgaagttcgggcgaggcggaggtgatgccggggatgagagcggcgtcgtggagccgaggaaggtggtggcgacgtcggccggcgctccggggacgtggcagaggcggccggaggcggagaagtggtggcgacgccactggacgccggcgagggcgcgtctccggtgatttccccgcgaaacggagggctgaccgagggagagggggcagctgcgaggccgagggagaagacggcgcggccgggcggcgttcgggcgaggagaggaaggcggctggaggtggccggcgcgagggaaaggggagggcgacggcgggaacgtagttccgggggtctcctcgcgaaacggagggcaggccggcgtggaggaggtggcggcgatgctgtaggaggcgacgacgcgaccggacggcgctcgggcgaggcgggagaggcggctggaggcggccggcggcacgggagagagaggaggacggcggggagaggtgctgcggccgtgggggagctcgggaaggggctaaaacgagagaacgcacggagggggttgcattttatatgatgggggagggagccggccacgggaggagcgggaacggcggcgggaaccacggccggcggcaatggttggtggccggacttggcgcgtccgttcccgaggattgaaagcaccattcaaggggaaaaacgggggaaatcgaagaggaatcaatggggattaattgcccccaatcaatttggtaagagccggcttgaatagagcggatttagaggaggaatggcgctagggctcgctcgggagggagagaggaggacggccggcgcgggaggaggaagacgacgctggcgcgtgggccccacgcggtcgggcggcggcgtcagcgcgcgcacgcgcgcgcacgtgcgcggcacggggcgggggcgcggctagggttgggccgggcgaccggcccaggaggagaggaggggaagcggcttgggccgagggaggccgggaggaaggaggggggggggaaaaaaaa

SEQ ID NO: 6257 - DNA, 6183 bp, Oryza sativa
ccaactcatactaaagatgtctccaaggttagattaaaaagatgtgtgcaataggtgggatggtaacacgtacatgtgagtgctgagatgagagatcgtgagttcaaatcccacattctgcataagtttgttaaaatagaccaggtttgaattatgtgaaacatcacctaaaaacaacggtcgggttgtgccgtgcctggtccgggacaaaaccccatgacatgggtcgggccattaggccacttgccttttggccatctataaatagaggcaatgccaaattccttgatatcaaaacaggactaaaacacaaatattcaataatatgtaagggtatgcatatcattttttttacaaacttaacaccattaatatgaattggcagaataggggtaaactgaaacttcacttcgaaaaagtatggacaaaataaaaaaccctaataagtgggaataaaatcataattacaacttaaaagtataagtagagataagaacacaaatacccctaaattaaacggcgattaggataaactgaccctacatactgttatatacgttactgttggcctgttgcagatgcatcaacgagttagggtgtgtttagttcacaccaaaattaaaagtttggattaaattggaacaatgtggtggaaaagttcaaaatttatgtgtgtaggaaagttctgatgtgatggaaaagttgaaagtttgaaaaaaaactttgaaactaaggctgtgtttagatccaaacatcagtcattttccatcacattaacctgtcatacacacacaacttttcagtcacatcatctccaatttcaaccaaaatccaaactttgccatcaactaaacacagcctaaaccaggccttaggcgaaagttgctgatccacacatcagtttggcaggcatcagaatttttgtccggtcattctcctacagtacacaagtgcatataattgctctcgcatggacccggaccagcagagattgaggtagcgtgcaggcggtgcagctcttcgtctctcaaaatctcccaattaccgtacagaggtacagagttatgtgattgttttggaagatacacgtgcttagtcctatataaagcagctatagctagttaaattaaagcaaccatatcacacagaagatgcaaagctagctagttttcacagatatcctatcttataatattagattaatagtacgtatacacaaagcttctagctacttaatttctcggtcgctgaaagggcactatgtctgcaagctccatccctctccctctcttgtgtaatggtcctcctgtgcatattagggttagccatccgccggctgggcttcttgctcgttcggatggtgtccgagcaaaaggttacttccggcaaagcaatgttctgcgacatgcaagtggacatgggattcgatccgggaatgagctagcgtctagctttgagccctctgcgtggggggatttctttatcaactacgagcccaagcccctccaggcatatatatacatattttatttttcgtgcggtatatgtttgattctaataactctgataattaaactatacacctttgatatcccagataattttgatacctaagtgttctcattatatattcatcaagattggtgcaattttcaaatgtaaaatctcataattaatgcttatgttttttatttgtctttttttaaagtgacatatatagttctcatgtcccaagtacggatcaattgtgtttcattaattttgttttttattctagttatctttgttctgctttttgcaaaacatttgtcatgccacgaattgcacaaattaattatattaattggaaatcatttaattgaccttattaactgttcatttcagtgtattttttctttcactcaatcataacaaatcaaattcatgctgccaaataagcagagatcagagggatggatgatggagatggccgaaaagctaaaaagagatgtccgcatactgtttgggacctgcaatgatatattggagaagatgaatttaatagatgcagtccatcgtcttggaatagatcaccttttccaagaagaaataggaagtgcaataagtgacatcaaaggaagtgaattcactagctctagccttcatgaggttgctttatggtttcgcttacttagggagcatggcatttgggtatctccaggtattgttctacatgctaaaacctaaatgatactagcgaagcatgtgttaactgatataaggaaatctgaatattattggtttccttaaaaaccaaaacattttttgagaactaaaaagaactataactaattattacaaataagtatggcttccaaaattctatgaaatcaacaaaaagttaattccagcacatagtgataggcgtttttggaagagttgattgccaaacttttgaatgttctctttggattagaattatttaatttccttatcattttgtaggcgattcagaattgcatttatttgcattaattctgtggaacaacttctctgtatctgtccgaactaaccacactacaacctctgtttcaaattgctcaaattgcttgtcaatctagctttttgttaagtcaaacatttctatctttggtcatcaattttagaaattttgggtaatttagaaacatatgtattatgtatttcggaagtatttttcatgatgggtgtacaaacataaatattaagacttaaactatacggtggcgctaatacgcgcgctccacgcggaatattactttgagcgccacacaacgctccctccttccgattttccttttttaccaccccacctttcttccgtctgcttttttcgttttttaccaccccaccttccgtgtttcttttttctcttttccacctcattcgttttcatcaaagagcccggtaaaatattaaccatccatatttttccctttttcgttcgttctctccagtttttctgttttcacattttagtaaaatatttactgtctagtttttctttctaagtttttttatttttctagagtctccccacgtttcaaaaagtaacgaatttactctatagagctttccatttactcccggcttcccatatctgcacattcaaaagaaacaaatttactcgcataaatgcccccttcaaaagtaacaaatttacttgcacgaatgcccctacatcgtacgacaccattcctagatggtcgtaaaagaattactaccagcttacaacgctagtagttcatttaccagtgttataaatattgttcagacttcatggtctgtgagtaaaacaaccaccaccttcctcttgatatagcccgtgatctcgtagcctgcaatttatttactgatgtgttcaatacatagtataagaataaaaactgatactaaaagtattgttaatttgtatcacgaaatggtcgtacgaatgaaaaaaattaatggctcaatcacacacgagtgataaaatcacttacaggtgaattaaactagaaaagaaaaaaatgacagtttctacctggttacaagctctgtaatatttatgggactgttgtacttgtatattttatacattttataactttcttttttgttttaatgtattaaaagtaatgggggatgcctcgttgtaattttactaaaaaataaatccattgtgaatctgggatccttgaggctttcctggatcttgctataaggatggagaggctgacctatgtcttgtgactggtagcggagagggtaaccaggtggcgtcactactacaaaattaatttttcatggcaccaccttttttttttctctagcagttatacgtgtaaaccgtcagcaaaaatattacaaggggtaggggggctacggaccgccagcgaaaacagatcttcgctacggctgggttaagagggccgccagcaaaagtataactattttcgttggcggcccacttaaggaaccaccaacgaaaattggatttttggtagtggtcctctttaccagctgcctgtgaaaatctctattttcgttggtggttggtaaagaggaccgccaggaacaattcgatgttcgccaacgaaaattcaatgttccctggcggctactaaagtgcactgctagcggaaatcataccgcacattacaaaggcagccccaccgccacccactcctcctctagatacactgcctcccactcctcctctctttgtcctcgtctctcctccgcacccttctcctccccctccaccggcgactccaccggtgttctccaccgcgcggcttgcatagtcggacgggccgctgggcctcatggaggacaccgtagggccgaaggaggatggatccaccaccaccaggacgcggggaggacagatccgccaccgccgagccgtggggaggatggatctgccgccgccagtccattgggagcacggatctgccgccgccgagccgcggaggcacggatccaccgccgccgggctcctccaaccgcctccccactcccaggtctggaggctgcggatcagggcatggacttcagcgggcgatgtcacgtgccgcggatccaggcgatggaggggcgtgggcggcgggcgacaatgaccaagaaccatgctccagcaagttccaggaggagacggcgttccggagctggccttcctctcgctgttccaccacaagcacctcatcggcttcctcggctactgtgaggagaacgacaagcagctgctcatctaggaagtgtgattgtggttggggatttgggacaacgatttgggattgtgattggggattgggacaatgatttggaatttctcaaaactattttggacctagattttctatggttgtgattactgtgattgtgattattgtggttgtgatgattgtgattgtgattgtggttattgtggatttgggggatttaggacagtgattgtgggtcggagaattatggattttggatagtaattggggatcttgatttttatttttttatcctaaaatcattttcattggcggctctcactagccaccattagtgaaaatcaccttttctctagcagctgtcctaactttgctgcctgtggaagtcaattttcgctagcagttggtggaccactagtgaaaatttattttttcactggccttaggtttctggcagtgttgccggccggcagcggaaaaagcctttttgtgctagtgcgtgcggtagtagatgatggaatgatggaaggatgtagctgcgtggtatagagacgatctcgatgttgcgcagtagcagttattcgtcatctagaaagcacgaaaaaaatgcaaaaaacattctcgttcatgtcatacaaatgacgagtaaaagaaaaataggaaacaacctccatcaccggcggacttcaccctatcctctgcggcaaaccacatggagcatgatgtccaaatgtaggacatgtgcagcccatcaatttagatcaggtaatattggagattgcatgttaatttgatttgcaaaatgaatttggggcttcacgcatgaaggtgaaggagagtatgcagatgcaaattggagtgtcatttcgttactttcttattctgccaatgtcgccgacatggagcagtcgccggttattgctcttggcctaggtgaacacctccttgctagttaaggtgctgctcggcttccagcagcgaaccccgaagcaacgtccattgtcgcgtcccaaatcgactctaaaatctatcctcgaaattgtgcaaaagaataattaaaattcaatgtgaaagcctccaacaattaaaatgtgcaaagataaaagtcaaatgaggcttggaggatttttgtatatttcctaaaagcctaaaatgcttaaataaattttagtggaattttcagagcacaaataataatagaaaagaaataaacaaagtggaaaaggttttataaaaagaaaaccctaaaaaaagttcgcttcccccccccttttccctcttgggccggctcggcccattccctccctctctctctcctctcccgcggcccatcggctccccgcgcgcgcgcgccgctgacaggcgggcccgcccgccgctctcgctgacgggtgggtcccacctggtatcttcctactcccgccaggtacgccgccgcgcccgtgccctatcgccgccg

SEQ ID NO: 6258 - DNA, 9079 bp, Oryza sativa
tccactaaaaatcctgttaatgaatttcgacatgtagaattcaagaaaaattccacatgtcaattccgattattatttgcattattttcttagggttttctcctgatttcacctgcattttcttggggtcatatgcaaattacaatttggcttgggaggaaaacttcggggtgtgacaaacctaccccccttaaacggaatctcggccccgagattcggaggagctggtgaagaggtgcggatgggcggctttcaactcatcttccctttcccaggttgcttcctcttccgaatgatgactccactgaactcggcaaaacctggtgaccttgtttctggttctcctttcgctggtgtcaagtatgcgaaccggcttctccacataggtcaggtcctcctggatatcgatgtgttccgaatcagcctgttcctcaggtacccttaagcacttctttagttgggaaacgtggaacacgtcatggatgccgatcatgttggatggaagttctagctgataagcaacttctccccttcgttccaaaattttgtatggtcccacgaagcgtggtgccagcttgcctttcgtctgaaaacggtgtactcctcggagcggagtgacacgaaggtacacataatcccctgcttcgaaagtaagctctcttcggcggttatcagcataactcttctgccgagactgggcaattcttagcctttctctgatggttctgactttctcctctgcttcagttaatacttccgtcccaaacaattggcgttctccagtttgatcccagaagagcggagtgcggcatttccgtccgtacaacgcttcaaacggtgccatttgcaaactggcttgataactgttgttgtaagagaattccgcataaggcagacttttatcccatgctccaccaaaatcgagcgcacacgctcgcagcatatcttccaagatctgattgaccctttcggtctgaccatcagtttgcggatgataagccgtgctgaaattcaaacgagtccccaattcttcttgcagtttctgccaaaattttgaagtgaactgactcccccgatcagatactatcttcttaggtaccccatgcagacacatgatccttgctaagtacagctctgccaaccttttccccgtataggtagtgtgtactggaatgaaatgagcaactttggtgagtcgatccacgaccacccagattgaatcgtgccccgacgatgtcctgggcaaacctgttatgaaatccattccgatttcttcccatttccattccgggatctgaaggggttgtagcagtcctgcgggcctctgatgttctgctttgactcgctgacaaacatcgcagagtgcgacgaattcggctatctctcttctcatgctgacccaccagaatttctctttgaggtcctggtacattttagtactgccgggatgaattgaatactgagtttgatgagcttctgttagtatgagatccttcagttctttgtcgtcaggcacacacaatctctctcccaaccagattgtgccatgctcatcctcatggaaatctcgagcttttccaaccctcatattctttttcagctcagctatttcaggatcatttacttgagctgctctgacttgatccacgagtgtaggccgtgcctctagggcagctacgaacccgtgttccacgatgcccaaatttaggtgctcaagatcttgctgcaatttgtcacacatgccttcggtacatactgcattgcaatagctctttctgctcagagcatctgctaccacatttgctttgcctggatgatagtgtatccccatgtcataatctttaatcaactccagccatcttcgttgccggagatttaagtcgggctgggtgaagatgtacttcaggctcttatgatcagtgtaaacttcacagcggttgccaataagatagtgccgccagattttcagagcatgaaccactgctgccaactcaaggtcatgagtgggataattggtctcatgtggacgcaactgtcgcgaagcatatgcgaccactctgccttcttgcatcaacacacatcccaatccttggcgagatgcatcacagtatacctggaagtcttttgtctgatctggcagaattagaactggtgcagagactaacttcttcttgagttcttcaaaactttggttgcactcagccgaccacttgaatttttcatctttctttagcaactgtgtcatgggcctggcaatcttggagaaattttcgatgaaccgacggtaatagcccgcaagtccaagaaaactccggatttgagaaactgtctttggtggggtccacttggtaactgattccacatttgatggatccactgccacgccttgagcagaaatgacgtgacccagaaatttgacctccgataaccagaagtcacacttgctaaacttggcatataactggtgctccttcaatttctcgagtaccagacgaagatgttgctcatgttgtttttcagacttggaatagataagtatgtcgtcaatgaacaccacgacaaacttgtcaagaaactccataaacactttgttcatcaagttcatgaagaaagccggtgcattggtgagtccaaaggacataaccgtgcactcaaacaacccataccgagtggtgaaggctgtcttgggaatatcctcttcccgaattctcaactggtgatagcctgatcgcaggtctatcttggagaacaccttagctccttttagctgatcaaacaggtcatcaattcttggcaacggatatttgttcttgattgtgacctcattaagggcccgataatcaacgcacatcctcttagtcttgtctttcttctccacaaagataaccggagcaccccaaggtgaagtactcggtcggatgtaccctttctgcagctgttcgtcaacctgcttcttgacctctgctagctcattagctgccattctgtacggcctcttgtaaattggagcagtcccgggtgccaaatcgatccggaactcgatttctctcttcggtggcattgtagtgaggtcttctgggaacacctcaggatactcttgtactataggaatatcctccaacttcctgggacttttctccactgtttctgtctgaccctcaatagcagcctgattcagactcgctacggacttctgcgacactggagaacggaaggtgatcttctcccctttgtcgttggttagggtgatggtgcggcttgcgcagtcaatcactcccttgtttctggtcaaccaatccattccgagaatgacatctaggtctttagattcgagaaggatgaggttggatagaaacggggatcttttgatctctatagtcaccgaggggcagtagtgtgctgtcctcatatcatttccaggggtatgaacctgcatcggtattttaagttccactaccgataatccatgcatcccagcaaatcttttggaaatgaaagaatgcgaggcacctgaatcaaagagaactgttgctggatatgagttcactggaaacgtgcccaacacgacctctggtgctgcctgtgcttcctctgcagacacatgattggcgcgggcctggatgaacctgggtctagtgcgattcagcttcggacacttaccagcaaagtggccgtgcttgccacagttgaagcagggtcctggctttcctacagcccccttcttgggttgttctgactgaactgacacagctggcggatctgactgagctggtgccattagtgggggtggagtcgagttgtggttgtgctgcttactgttgttgtgactgccaccgttgtagtcgttgttgaagttactcgggtgatagggacggtgctgacagacgatcagggtggaaggcccacctagctgtcccgtcatgaagcgaggcttctgattgttcccctgaggaaagctgatctgagctgcctttctttttcggtccattttgttgcgttgctcttcctggcggatagccttgtccacaagcttctcaaagtcctcatagactccggagattagctggttggtcaattcatcgtcgagcccaaacaaaaacttctcctgcttctcagcatcggtgcgcacgtcctcaggagcgtagcgcgcgaggcggttgaactcgtgcaggtactctgtaaccgttctggttccttgttgcaatgcacggaactctctcttctgttgtgccataatcccttcaggaatctgtgccttcctgaagctttgacaaaactctgcccaagtaacctccgttgcatctagacgggtcgccacgtagttatcccaccaggcagaagcgggaccttgcaactggtgtgtagcaaaagcaactttctctcggtcgttgcattgcaataggttcagcttcttctcaatagcacggagccagtcattggcctccattgggttggtggtgcttgagaaagtgggtggctggatacgaagaaagtctaacagtttggacacgtgtgatggtggaggaccaaactgctggttctgttgcgcctgctgcaacatctgatggtaatgttgctgcatctgttgcatcatcattgtcatcatttgagtgactgttgggttttcgggcggtggagatgatctgctgccagatgcaccactgacatgagctccatcggtctgctcttcgctgccactggcgtcgttggagtcacggggatcattccttgtcttcatcatctggacgaggataggtagaaataagagaaaggaagaaaacagatggcttggaagctaatctttcttataaaattaagtgccattatcttaatcttgattaaaacactgaaaaaagaggcacgcaactcctaataaaagcagccataccactgacacatgatatcgaccgccgactaacccacaagcaacaaacctaagcacagaaactagcaagcaaacaaaactaagaagacgataaagctatgggtggcgactctgaagcttggagcggcgcttgcgatcgaacaacaggtctgacatctaaggtaggcaagggataggaatcaacgcatgctcaaaaccaaattaaatgaagccacaaatgactcaaacaactagccaagcatgatgatttttatgcatagaacattttttttttatgaacccggataaagatacccatgcaacaaactaatcaatgaatcaatgcacaaaatagatgcatagctataatgatacgcataaaatctccccatcgtacctagacacgacttagcgcatatcacctaataaattcccgactcactatcaaataaattccggataaaatttttctaaaaccctagaccgagcaaattttaaggatccgacccgaatgaacgaccaagatttttcccacaaaccaaagaggcaaaaccccaaatttttcccgaaacaaatccaagtgcaaaaagcatatgcagatgaaaaggtttaagagagctcttaggttttccagttggcttgtcctacggtcaaggtcggctctgataccaacttgtcacgcccagaaattcacgaaccagaatttctaagctgaatgtgcattaaacccctgtccaggaccagccagggtacacaaacgacaattgttgacatacagatccacgtcttacaaaaatataaaagattacaaatgcagcggaaaaagataaaagcgagctaagcctgaagacttgactcctgcagcgggcgactccattccacaggcatccttgacggcagcgacgaaaccaacctcttcgagacatcttcaactgagaaggacttcaactctggtgtgggggaaaagagagcaagactgagtactacccactgtactcagcaagtcataccggaagaggaggtatgatgcaagatatatccaagggaggctaaaggttcttttgcataaagccggcatttcaagcagcagttgaaagcagtaaaacagttgtagtaattaagcaatattaaccaatctctgtccaacgttacaccacgttgcaacaggcccaaaccaccacctgaactcaccagttcattaagcttaactaggggtgaaactaatcacggtgaatctggtcgaccgcccataaccgcgggcacggctattcgaatagttttactctgatcagaggtgtacaactgtacccacaagacacagccccacgacacgttcccgtgcgccgacatgccaccacgacataccggaaagaggccgtgacaggacccttcgcataaccccctctaaccgatcgcaccacaccttagggttcgcccccgtccccagcaggcaacgggcagcccccctttcgtgccgcggtgaatccggaagccgatcaaccggacaccccggccgacccaactccatcacgcccaccctcgcctgggtacgtcggctagagaaaagctacactacaagcccagccgttgcccacgctggcttgtggtaagtacgataagttcttccagggcatcccgcgaaccggtccttaatcgccatgggcacgtctagcaaaaccatgcacccacagcccaccatgtaatgtactttaattaaccaacaccattacggtggcactaaatcaaagctattgccaataatcaaagtctatgctttaatgtgatccccttttgtgcactagttgaactaagcatggctaagcatctcctaaaccaacatctagtcattttaatacccaagttatcaatggcgtaagggaaacaacataaagctgagtaataggacccgtcccacatgatattgtaaaacaatgcaatatttaatagaaatgcgggacatttgtaaattgggtacaatatgatcaattgcaatgtatgacttgccttgctctcgcactgatgaggccacagcaacgtcttcgagaaactacggatcgacgaaacggccgaaatctacgcgacaaacaaagcacacaagcaaaacatgctataagactactgaaacagagaacaaaaccatttttaatggattctacacatttttatgaatttactgagacttgaatggacttaatcggagctcggatgaattagttatgatttttagaagattctctgtgtttttactattaaagaaaaagccttaatcgatttattgcgcaatattgccccagggctgacgtcagcaaggggtggggcggcgccgacatgcgggacccacgggtcagtgactcaaagagagagagaggcggctggcaagcggggcccaccgggcagtgacacaagggggagaaggatggggcggcggcgccacgtggcggccggatcgacggccccgatctacccaagggtagatcggacggcggcggcggcggcagcccccgggctcggatcggcatcaaagccgatcggccgacccgggctagcggcggcggcgcgtgcgcgtcacgtcgccggcgacggcatccggcggcggaggcgacgcgaaagcggcggcagcggacggcggcaacgacccaaagcgacggcgagcgcgggcggcggcgacgcacggggaagcggggaaggaggggagaggaggtgcctcaccgagggtggccggcgcggaggaagatgatggcgaacggcgacggcaagccacgggaggcgacggcgaccggcggacgagctccggcgtgccctaaggaaggagaagagaggggttagagagagggagatagaccacggcgaccggaatccatggccgaaggcggcggtagaggttaaacccaccggagcgcgaggagacgggtgttccggcggcgaacctcgacggggaaggggcggccgaggtagatcttgaccccgcgaacccgacggcgacgacggcgcggcgcggcggcgaccctagcggcggctagcggcggccgaagtagcaaaaacggcggcggcgggtggttgcacggcgcgggagcgatggggagcacgggagagtgcggcgaaatggggaaaaagcgagagaggacgacggcgatgcttaaaaagggggagagagagccggacgtggccgggaacggcgggattcgccggccgacgcgggggagtggggaggagagagaggcgggattcgaatttcgaatcccggccatctcgggcgcgggcgcaagtgggagagagaggggaaagggcgcgggagacacggcgcacgcacgggcgtggacgacgtgggccgaggaaggcggagacgtgggcgtggcgtcagttgcggtggcggctgctcgagcgggatctgcgggaggagggagactggaccgacacgtgggccccacctttctgcgacccctggatgagggaggcgggcggccggctgtctggctgggcctcgggcttgcgcccgcccatcaaggaggagggggaggaaacataggggaaatgggccgacggcccattttaaccaaaatgaggaaaaagagggaaaaagaaaaagaaaaaggaaaaaggattttccctggaataaaaattgcacttgctcaattttaattggttaaaattatttctagagctctgaaaattccactaaaaatcctgttaatgaatttcgacatgtagaattcaagaaaaattccacatgtcaattccgattattatttgcattattttcttagggttttctcctgatttcacctgcattttcttggggtcatatgcaaattacaatttggcttgggaggaaaacttcggggtgtgacaaggaccagccagggtacacaaacgataattgttgacatacagatccacgtcttacaaaaatataaaagattacaaatgcagcggaaaagataaaacgaactaaacttggattcttgacttctgcagcgggcgactccactccacaggcaatccttgacggcatcgacgaaaccaacttcaacagaacagctcccactaggaagatcttcagctctggtgtgggggaaaagaaagcaagactgagtactacccactgtactcagcaagtcataccggatgagaatgtatgatgcaggatataaccaaaggaggctatgggttcatttgcacaaagctagcatttaaaagcagcagttgaaagcagta

SEQ ID NO: 6259 - DNA, 14885 bp, Oryza sativa
gtaagaagggaggaatccacagagtgtggcctgctgggagtagagagttgttatttgagatacgacttcgtgacaagagtggtgtcggcattgggactactgacgtcacattggaatgcacgttgtggccagagtatcacgcttgcaaatgcaattgcaacaagccttacctgttacatcggccatgttcccatgttcttgctgcttccgcaaaagggggtgttgatggaaacatttttgtttctccctactttagaaaggaatcgtgggaggcaacttggcgtgccatgtgcgatttcactcgtcctcctccagggcaagccaattgggttcctgactcaaatttattagttgatactaagggtcgtcgccagtcgcgcaggatcaagaaccttatggatgaagctgaagtgaaagatcgttctcgtcgtaagaaagcttgcattctttgcggggagaaccattcccgtaaagattgcagcatgtacaatgtagggcaagatgccacaggcgctgatgttcgtcgcgtttcaaaggggaagtcgaagaagaaaaataatccttagttcgctattatccttggtggactccctactttgaagatcgttatcgttcaatttatgtttagtgcgtctgtaattttaatttgaactttcttgcacttttattacccgaatctatttgtaatagccttgtaattttcattttgaactgcactgcacttttaatatcgtcatgtatttgtattggaattgtaatttaaatttcgaactgcactgcacttgtaatatcataatatatgtgtcctgggcttgtaattttaaattgaaatgtactgaactgttcttatctgtatctatgtgtgctggtactgtaattttaaattgaaatggcatgcaaatttgttacttgaattatgttgcatacatttactgtactgttaccatacgtgcattgtactaatgtggttttcgatctgcaggtatggctgatcaatatgatgggcagctgatagacaaggagatcgataggaaccatcgatcgcgacgtcttagtacaggaactttctgcaatgtgctaaagatgcgaggaccggatcaatattggcgtattgatcctcgttgggttccaaggtatgtgaaaatatattgtttttactaatacaaggtgtttatattttcatgtattaataacttgcgctctgtcatgttgtaggctgagagcagctgggttgttgacgtttgcacggttggtcgagccttcacgtgcaaggtccgaacgaatccacattgacgcggcgcttctgagtgctcttgtggatagatggaggcctgagacccacactttccacctcacagttggagagatggtgcccactctgcaggatgtgtcttatttgttggggctgccgatagctgggccagtagttggcccaacaatggtgaatgctggatgggcggatgaccttctggccagttttggtggtgtgctgcctgttgcactggaggatctcacagatgggcatgggcctacgaaaagttggttgaatcagtttcgacaggatgtcttccctgatgaccaggaggagtggatcgtgcagcggcacttagtcgcttacctgttgtggttgtttggatgggtgatgttcacgggaactcacgctgactccgtggacaagcacttcatccactttgcggagcagattgcagagttacctatcgcggagattccacagtacagttgggggtcggcagtacttgcggcgacatatgccggactgtgtgatgcttgcgtgaggaacagcaagcaaagttcactccctggatgcccgttgctacttatgttgtgggcgcacgagcgcttcgacattgggaggcctcagcttgactcgtacgcaaactacggtttgcgagagatgtacaggtctggtgttgatgacatcaacgatcgtcccactatggaatccttgtggacacaccgtgaggtattttttgttaaattcgtttatgttatcattatgaatactagttcacaaactttccttatatgagtaatgaaaactactacttgttacagccgcagtgggttagcgggacgacacgtcgtgtctacactcagtttgtagctgactttgatcagcttacgcctgaccgtgttcggtggactccctacactcagcacgatgtcaatgatcgtgcaccgcacggtctcgcggatctttgcacgcgagatatgcaactctggatgacgacttgttacctcgtggtggacgtgcacgtcgagccacacaatgtccacagggttctcaaacagttgggcatgtatcaggacttccctccgagagatggtcgtcctttggctgatagtcttcataggttagttcacatcacagttgtctaatcctacattttttaaaataaatcactgcacaacattttttctgatgtgtgaatttgttgttgtgcaggtactccagaaaggggctcgggctttcctacgagctagttattgtgaccacggttcagccgacggtacaagagtgggagcacgcagctgataacttggcacttcagacacctccagacgatgggagttattatggagcttaccttcgttggtaccgcagtgttacacgatggaggtgttttcctccacaaggagatagcaccgtcccccaccaggcagcgattactgacacgtttgcccctcagcctagatcagcttacaactcaatggtacgtgtttatttgtggaatttgagcaactagttcaatatttttaaaaagttagcaagtagttcagtatgtctaataaatgtgcaattggttcaactagttccttttcttacataaatgtggaactagttcagcatttataaatgatgtgcaactggttcattatttctaacaaatgtgcatcttgttaaatactcttaataaatgtgcaactggttaaataattttaattaccttgattatttgtggaacaggcggaatttgttgagcacgttcacgtggagtccgacaccatgctgcaaagactagaggcgagacctccggtcgtcaggcctgacgacgtggcgagcatccttcgcaacttccgtgcacgtgctgccgcactactacgtcgtgtctcctgtcggagcgcagcagatgtggtgcagacgtcgggccgacggccatcaccaccactaccccgacgttccagcgtggatcggagtggtccatcctcttcacgtcgcgggtacgaagcggcccacacatctcacggtcgtccttcctttcagcacaccccagcaccggagtacattagggggtcagccggatcaggggtacccacgtcgagcacggcaccaccacgtccacaggtattccaaactccgccttatgttcacccctcgcagggagcatctgggtcggcacacttcccttacatgccaacgggggacaacgtgttgaacacaccagcatggggacttcatatcactccgcgtgcgccagagcagggccacacacagcacacatgtaagtcattttaaacaataacacgctttagtttctaattatatgtatcgttactaactacgccatattttttggtttctccctcttgtgcaaacagacgatgagtacggttcggcgtcgacgcatcacggaatgcctgcttactcccctcgcacagcattcattgaggacttcttttccactgatcctccccagggggaagtagggatggattactggcacgcagcacctcaggtcacacagccgacgcaggagacggaggtcggtcaggggccagacgtgacaccacagcaggcagctagagataggcaccccccctgataatttgacatatcccactgagcagattaggcgtaggaagaagggaggacctagcaagcgtgcgaagggcactaatcgtccttgacttatctatttgtattaaacttttagtcatttctattctgtccgtactatttgagaaacactttacgattaacttagtactatcagtactatttcataaacttcttcggataattactcagtagcatacccttcgaatgaatcatgacaaattatcattcaaatatacaaataatgaaactaaataattcaaatattttaaccaacaaataaatactacaatttctgaccaaacattatcaaaaccctaaatcatatacatataacattacaaaaatattttcctttcttacacactaaaataaattacatattattaaaaaaataacttattacaaataaatggagaacgcgaccctgtcgaacgcgccagttcgacggatatcctgtcgaacaggggcagttcgacagccccctgtcgaacaggggcagttcgacagccctgcctggggctgttcgacaggtcctatcgaacggcagccttccgatctcctcaccagtcgcgctctggccgttcgataggcgccctatcgaactgcacccgttcgacagggacctactttcgcgattttccccggttgaccactacttttgcgattttccataaaaataatattaattctcaaaaaaattcgctttcttttgttttcttctcttttatttgcggggcattagagatcgcggtcacgcttccgcttcgcggatcagctgcataatatcgagtggaccgatgctttaataacggatgaaaaaattaaccgaagtcttacttaatttttaccgatgctttaataacggatgaaaaaagtcttacttaatttttagttagatatagaaaaaaaagtgccatgcgttgcaacgaaaaataaagaaatatttattcacatctgtggcttagaaatcaacacattaattgaaacaaaaatatacaccgttgatcatagtggatctaaaaaaattttatgaatgtttagatataatgatgtagatttatcaaatataagctatatttttataattagatttaatccaaatcatgatcttataccggccagcaaaccgaactattttctttctgccatacagctgggccccggaaacatgaacgcaaaataaatgaaagatcatttcagcaattatttaattagaaaaatgaatcaaaatccgcgctttcaggtttgggccaaatatgaaaaaatccagattccctccttttgttttgtctcttctctgtttctggcatgtttcctttcttcggtaaatcttgcttgcgtcctcctcaattgggtctagtaaaataagtcctaacagaagtctaatttatgtccctattgctacagtagtttcttcaagttccagtcgagcccggcctacgggggctcctggttagaacagacgcgctagataattttgtagcgcgcacttccataacttcctcctgtttcatcgttttgtatatttttcctgttccgcaccgcgtccggggaggttaagcgcgtgggtccactacggccacgcgtcattagcgctaataacagcgctagccatatggattaatctagttatagtttttattatcaaaataatacataaatagttaagttgaaagtttcgaaaatatgatgaaaaatttcaaaatctgagttgaaagtttcaaaaaaaaatcttgagagtttcaatttcgagttgacagtttttaaatttgagttggaagctttcaaactcgagttggaagttttcaaacttaggttgaaagttttcaaatttgggttgaaagtttttaaatttgacttgaaacttttcaaattttgagtcgaaagtcttcaaattcgggtcgaaagttttcaaaactcgagatgaaagttttcaaaattgatttaaaagtttaaattttgagttgaaagtttttaaattttaaattgaaagtttaaattttgagttgtgacttttaatttttcatctatagaaagtttcaaatttcacgtatagatttttaaatctttagttaaaaaaataggacctcatgaaaaaaaggaaagattaattaaagaaacataattatcggaaactaattccgtcaactaatctaatcttgattattttctccgaatctggcgcacttgcgcacgcttcccagcgatccctcgcgcaaaaaaacagaaacaaaagtggaccggaagagaaatcacgtacgaggacatgggcctaaaacgcgcgctagatggctagttagcgcgtctgcgctaattaggaaattcgccggcctacacctgacgccaccctaatcccgcgtccgattcaaccaaacccgtggagttaatctcaaattagtcgagggcttttgatctatcttttctctcaggaaattgaagtcaatcccatgaaaattgcttccgtatcgagctcagactcgagtttatctctccagtgaaccctagtttttatctctccggcgaagtcaagtctgattcaaccaaattagcacgttgacggacaaaaatgcagaaaaaaaagtgacgaacggaaggttacagatttttcttttctaattagttaagataaaatatgatatagatagtccggcgacgactacctcctcttctgatattctcacatacacccgtcgccgccatgcacacacactctcgagctgcgtgtacatttatagttgtacgtataagtgtactgatacacgtataatatacgcagtgacgtgatggaggagttccacaaggagatccgacggtgccgacgagctgctggagttgttcctcagggcgggcactgggtctcaccggagtcgaggtggaagaagatgacggcgacgatgcactggtacccgaggtgcccggacctgcggcgagcgctgggactcagtgcacacagcgactccggcttctgctctagagcatcgtgccagggctgcagctgttccggcggggaccagaccggtgggtggcagtgccggcggtcgttcctggcgccttcgtcctcaacgtcggcgacctcatccatatgcatgctcaccaacggccgcttccacagcgtctaccaccgcgccgttgtcaaccgcaaccgcgataggatatcgctcggatacttcctcggcctaccagccgaacgtcaaggttgccggaggccgtgtgccgcccggctggagcgccgcctaccgcgccgtcacgtggccggagtacaaggccgtccgcaagaaggccttcaccacaggcggctccaccctcgagatggtctccacccccaccgccactgacgaacacaacgacgtaaccgacgtcgtccgggatgtcatataatatttacccctaatctgtcttactactttactattgtaccctcaagaataaatggttcagattagttctactggtagtataatactttcggtagaaagcacaatacttgcgtcttgctctgtgttttttcttccgtgcacggtgattatggcagaggcctccagctgttcataaacgcatgacgttttgacctcttcacagttcacgtgctgacaaaactaggataaaattaaagcagctctgatcacagctcgtctcaaagcagaaagaaatagaaaagagatgttgttattgttcaggtgaacaagataggttagagataatcctgctcacacatatgctcttccaaagatattccggtccctgctgacgaaaaaactaatcagcaaaaagtcatcaaaagtgttgcataatcttcataatactacttaggcttgatttaaaacatcattgaacggattgttgatgcgggttatctactttattatattgataaattaaatattatgagaaataaagttaacatgtatcttaagtaggtaagcagtacgggtagaggatttttacataaaatttattcttcaggcaagtatcctgtttgaacgatttggtaaataatttggaaaagtaaacctaaaaatacagtgggacgacgtcacactaaaatacagtactatatctgatgattggtgttcaaattttcatgggccatgtgttacaatttcaaatacaagttacacagctcaaattagttttgaaatgtaattaaactacagcttgtggtggtaatttatcaccatcgtcgttattcgagctatcacaaacgattctgtccttattgcttggccaatgtccttgttagttgttacggagctggccgccatcatgggcgtggctcccggctctttgccgatcgtgcactgtgggcttgtggctaggcgtggctcatagggccagaggccagtctggcagggcaggggccaggatgggaacagagttggatgggctcagcctgcaccgaactgttggcatgttaccaatggtaggaataagttcactttagatgcctcaatatgttaccgagtctaaaattcttccctgactacaataccacgtatagcttgtcccgaactcgcaaaaccgtttcaactttcgtcctaaggcagtatggctcccagtttcatccaacgtggcattttcactccggtcagctatgttgaatcagcatagtagctacacggggccctacatgttagcagccaactcctctccttctccccttctctctccatctgccctctcaacagtggcgctatgtcgcgaccgggaaaattgccttttcccgaacgctagtgtattaatccccgtcccaggaaaagccggggtacaccatacaaacatgatataaaaggcacatctttattatatcgataatatttacattattacaaaggcacttaaggcctgacaatcaaaaataaacagcagcggactagcggcctacggctccatcttcacaggcgctcaactggggtataagccaggacttcacctaagacatcttctccaaagcttctcttactgaagggggaaaagatagagcaagaatgagtacaaccacagtactcagcaagccacaccggcagatgcatgattaatgcaagggaggtacaagggaataataatatagggattaagttttgcggtaaacagcatttaaaagtcacttagttgcccaaagccattttgtaaagacgatcctagagctacacagtattattaaacaaggccgtgaaccctcacgaacctgccttaacccaaggcctacgatgattcggaccgaactggcaacccgacctgggtcccagctcgtcccaagccaacccaggccaaccattccatattttagttgttgagcaagttttaagaattaaaacactgacttgggtacattgctcggcttgcccatatccgagggctcggctattcgaatagatttactctgatcagaggtgtacatctttacccacaagacacatctttactccgcattccatggccttggaacccgtcgtaaagatgtgacatagtttccaacccatcctagccttagacaagagtaccgacccaatcctacctacggccgggatacccgggacaggcaggcagaactgagcccctagcattgggcaccaaccctccgccgtatgacatctcgactaccgggccgcagctcgtgtagccttcatttgtcctggagaatgtccatcgacccccgacttcatccatctccaatccgtgtacttttgtttatgactagactgagccacaaactaagccttacccattagacatgtggaagtacggtagtgctttgcaacagaggcccgagctttagtccttatagtggccggggtgctacttcccacaactggcatgcacccaaaccccaccgaaaacaggttttaggggttttgaaagaggaagagaggtgtgtgtccaattccaccataattcaacaattccatagtgtccaaatgatatgagaactcccaaagtctaaagttataaaaccacctaatgttgcctaattattcagcgaagcatctacctaaatttatactagtggaaccatgaatagagtacccactagttgaggttttgtttaatctagggtgaacaaggtaataataataacaatagcaataataatgtcataacaaaggtaaataggcttggctaaataaaacagtgataacgcgggaatttaaataaagcgataatgcattaatttaaatcaaaataattttataaactgggattcaatatgctcaaggatgatgtgacttgccttgctcagagagaacggccttccgaaccttcggcgacgaccacgaaccacgcttcgggaacctccggaacgacgaaagctacgcgaagcacacaagcaaagctacaagcctataaagaagcaataacaatacataaaaagaaagcacagggttctttaggttatagcaaacattaggagactttgaacgggtcgattcagagttcgtatgaccaagatatgatcatccgaagtttaatgctgttatatggagatttgcggattattataattaagctttgcaactataaaacaggtgtaagcgctagcctggaaaagacaggaaggctgcgccgttgacatgcggaccccacatgtcaacctaaaggaccacggtagaccgggtacacagagacggtccacgggtcgacggaagcggaccccgtgtgtcaaccgaggcgagtggccgacaaacggactccactagacaccacacgggttgcacacgtggaaaccacgcggctaccgagcgggcacactaacacggacactacacggtcaccacccgcacacgtgaacgactaccgacaccggtacacgggtaccggggtcgacgaccgcacaacgggtacggggcgacaccgaaaggacgagggcggggaagcgagaggacggatccttaccaccacgcgacgaggcgcgggaacgacaacgacgaacgggcgcggcggagacagacgggcacaacggagacgaacggcgaggggacggcttcggcggcgatccttggacgaaggcgagacgcggccggcacgaggcttgacgacgcggaggcgaggacgaagacgatgacgggggctgcagcgaccttgacgaagcgaggacgacgaacgggaacggcttgacggaggggcgaacgccacgacgaccgggaacgacgagaggacgacgacgacgacgacgaccgggaccggcgagggggcgacgagggcagccggcagtggctgcacagagacggggacgacgcggaacacgccgcagcgatgacgatgacggaggcggcgccgcgagacgacgagccgagcgaggatgaacgggacgtcgacgacgagaacgatcggagacgacgatgatggaccgcggaggggtttggatggaggggaaacgatgccgaggacgaccttgccgctgcgatgccgaagatggtggtggaggtggccgaccgatgcacggcgaggagggacgggcggccgaacaactccggtgaggcggacggagaggttcgcggcgacgttccggcgaaaccgagggcaggccggggtggagggcgatgcggcgacgccgagggaggagacggcgacgtcggccgacgctctggcgcggcgaccggggcagccggaggagatgccgccgaggaggaaggagaaaccggcgcgggcgacggtgttccggcgaagttcgggcgaggcggaggtgatgccggggatgagagcggcgtcgtggagccgaggaaggtggtggcgacgtcggccggcgctccggggacgtggcagaggcggccggaggcggagaagtggtggcgacgccactggacgccggcgagggcgcgtctccggtgatttccccgcgaaacggagggctgaccgagggagagggggcagctgcgaggccgagggagaagacggcgcggccgggcggcgttcgggcgaggagaggaaggcggctggaggtggccggcgcgagggaaaggggagggcgacggcgggaacgtagttccgggggtctcctcgcgaaacggagggcaggccggcgtggaggaggtggcggcgatgctgtaggaggcgacgacgcgaccggacggcgctcgggcgaggcgggagaggcggctggaggcggccggcggcacgggagagagaggaggacggcggggagaggtgctgcggccgtgggggagctcgggaaggggctaaaacgagagaacgcacggagggggttgcattttatatgatgggggagggagccggccacgggaggagcgggaacggcggcgggaaccacggccggcggcaatggttggtggccggacttggcgcgtccgttcccgaggattgaaagcaccattcaaggggaaaaacgggggaaatcgaagaggaatcaatggggattaattgcccccaatcaatttggtaagagccggcttgaatagagcggatttagaggaggaatggcgctagggctcgctcgggagggagagaggaggacggccggcgcgggaggaggaagacgacgctggcgcgtgggccccacgcggtcgggcggcggcgtcagcgcgcgcacgcgcgcgcacgtgcgcggcacggggcgggggcgcggctagggttgggccgggcgaccggcccatgaggagaggaggggaagcggcttgggccgagggaggccgggaggaaggagggggggggggaaaaaaagcccgggagagagagggggggaaatggagctgggccgagaggggaggaggcccaagaggagggagagaaggagagggagagaaagagagggaggagagggagacttatttttagattttcttttttaataaacttcgataattgttgttgtggcttaataaatatttccggtgctctgaaaattcaagtaaaatttgagggctcattttagaccaaggagaatttaacaaaaattctccgggccacattcgaatttttcttgtacgtattttagtgtttgccaatttcttttcgaattttaattaattctattattccttttagaagatgatttttattttcgggatgaatttatcaggacgtgacacgctagcagctagcccacgagccacgtgtgccaagccatcctcattcggtgggcaacgaggacaggatcatcgacgcagacgaggtgactggcgtagctgttggcggcaaggagatggcgcgcggtgaggaagagggagctgagtcggagtaggccggagccgaggaaggtgaggcaagagggtggtgggctatggaaaccttgagttaccctcagcattggccaccgcccaccgaatgccggcgacctgccgcttttgtccccgtcgccagccggatgcctcaagcgctcaagctcacctcatggaaggcttcttgtcacgccctgaagtttcccctttttcttgccttcaaaaaaaatggttaaataaattgcccgaagaaatagtttaattaacctagagttgaatccctaattaataaatgcaattaataatcggaaatagtgtggtggaatttttcttgagttccccatgccctaatgcattaacaggatttttagtggaattttcagagccctataaataattttaaccaattaaaattcattaaccgcaatatttaatcccaggaaatccttttcctttttcttctttctttcccttcctttttctcttgacgacctatctctctcccgcgccctccctcttgctgggccagcccaagccgccttctctcctctctgggatgctgataggtggggcccacctatcaggtcgtcccctacctccagccgcccatgccccggcgccaaccgccgctccccacgccgcccaccttccccgcctcccgcgtctctcccgtgccttgagcccacgtcgccgcccacctcctccacctctcccgctctcgcgcgcgcccgtttagaggccgggattcgaatttgaatccccctcctctctctctctctccacccccacgttgctggccaaatagggggccaccccagccgtttccgcccctcccgagcccataaaatcacttccccgagctctctctctcgtttcccccattcgccgtcctctcccgcgccccctaccacgcccgcgccgtcacaccgacctccgccgcccgctgccgaccttcggccgcacgccgtcgctgctaggctcgccgccgcgccgcgcaaccgccgccgcagctagagctacctcggccgccgctcgcttgccgccaaacgtcgccgaagcgccgtttccatcgcacgccggtgagctctccatttccgcccaactccggccggccgctctagtcgccgtggtcatcctcccctcctcctaacctggtcatcgcctttcccaggttgtgcccgaccccgtccgccgttgttggaagcgccgccgccgctcgtctcttcccgcgccggtcgtcgtcatcgcctcggtgaggaaacccctctcctccttcctttcctctctctcgcgagcgccgccgccctccgcgcgtgcgccgtcgtcttcggccgcagccgccgccttcgcgccggtcgccgctgtctccccgcgccgccggtcaccgccggtgactgcgcatgcgcgcgccgccgcccgcgccatccgatcggcctcccggccgatccggacagttggtcccgtggaccagcggtggaccacccgcgtggtcccggtccacagtggaccggtgcctctcccctccccttgagccactgcccgtgggtcccacatgtcggcgctgcaaccccccccttgggtgacgtccgccctggggatttattgcgcaataaatcgaataaggacttttctttattagtaaaaacacagtttatcttctaaaattcataagtaattcatccgagctccgtttaagtccattcaagtctcagtaaattcatacaaatccctagaatccattaaaaatggttttgtttcatgtttcagtagtcttatagcatgttttgcttgtgtgctttgtttgtcgcgtagatttcggtcgtttcgtcgacccgcggtttctcgaagac

SEQ ID NO: 6260 - DNA, 16585 bp, Oryza sativa
tgggacccagggtcgggttgccagttcggtctgaatcatcataggccttgggttaaggcaggttcgtgtgggttcacggccttgattaataatattgtatagttctagcttcgtgtttacagaatagccttgagcaactaaattcctttaaatgctgtttactgcaaccctaaccctttatattataattcctttgtactcccttgcatttattctgcatttgtgggtgtgtcttgttgagtacggtggttgtactcagtcttgcttaattttcccaagcccagatgaggagttccctgaagatgaaggctttggtgtctagctcgtgcctgccgtcaagcgcctgtggtcgtcgccctagtcttccgctgtctttcgttgtctttgagtgtgctgggccttcgttgcccgtgtaataattttatatacgcttccgcttgttaaactctgtattgtatcaacttttggtgtaccttgcctcctgggacaaggaataatacacgcacgtcaggaacgcccgttgggtgatttccggtcgtgacaagttggtatcagagcctcccttgaccctaggacgagccgtagatcccaagccttagcaatattttcaaaaataaaaatcctttattatttgtgaaaacccgctattctctctttgtcttgctgcttcatttatcgtcaaaatctgatcttttaaatgctgcttttctctttgtttttgtttgtagatggccggcagcgttacccgtcgtggtttgagcatgactggcttcgtcttggagctgcgaggcatgtgcgtggtcttggggtatccacatggagtggattaccaggccaggccgctcccggagcaggagggtgaggatgcagagcctcacgctggttgggaggtcactgcagtgattctctccggctctcccgagcggacttcgctggcagtcaccgcgggtggggattccttccccgccgcttgccagaacgccgctctcctcgccatcggcacccttcaccagcgctacccggacgagttgcagcactcgccctaccgctaccacccccgtcgcggaggagccagcgaccacgccaccttccgagacgctagctcggaggatgacgctaccgtcgtgcatctggcacgcatggtggaggcgtacgacgcggctcgtatcgacttccaccagatggtgcgtcgtggcatggtggagaacaacatgaagatcctggagctgcgtcaggagaacctgcagctcaagaaggacctcgacgcgttggaggcgcagccgcaccagctcaaggtcgcccagggagagatcagccgtcccaagcgtcgccgcgtctgccgcagccagaagatcaccgcccgcaagagcacctccaggcccgagcttgtccgtcagtccctggcgtggacttgcttcgtcgagacccctcgtgccgagcctgcgcccgtggttccccaggagggggaagcctccggcgttggtagctcggagggtgcgctgttgctcaccttccgtcctggcccgtcgcagcggtagacgagcagttagtaggctcgcgtgtgtttttcctcgtttgtctttttgagttgtgtggggcatggttacgccggtgtgtggtgtaactatgtcggagcctgtcttattttatttgcctaagcaacttgaaccttaatgaaccaatttaatagcagtgataaatttaagaataatagtagtcgtgggtggttagttttaatcgtcagctctctctctctgtttgctggttctgtgtggggttttcagatggtgtcgaccaggagaaatgttaacaccggtgaaggcaaccaacccgagggcagcaaccccaacccccaaggcaatccacctccaccaccaccaccagacaccaacgccattctcacccagatcctcgcccagcaagccaacatgatgaatgctttcctccaccacctccaaaatccaccacaacagaatgctccaccacctcctccccaacactccaaactcgccgaattcctccgcatccgcccacccaccttctctagctccaacaatcctgtagatgcgttggattggttgcatgccgtggggaagaagctagacacggtgcagtgcagcgacgaagagaaagtcatcttcgccgcccatcagctgcaaggacccgcatctctctggtgggaccatttccaggctgcgcagccagaagggcaaccgatcacttggactcgcttcaccgccgctttccggagaacccatgtgcccgctggagtcgtggctcttaagaaaaaggaattccgggagttgaagcaaggcaaccgctccgtgatggagtacttgcatgagttcaacaatctggcccgttacgcccctgaggatgtgcgggaagatgaggagaagcaagagaagttcctggcaggaatggaccccgagctgtccgttcgtctagtctctggggactacccggacttccaacgactggtggacaagagcatccgcttggaagccaagcacaaggagctggagtcgcacaagcgccgcttggcgaacatccgcaatcaacagggtgctaaccagagggtccgctacaccaatccctacccagggggatcctcctcgcagcagcagcagcagcagcagcagcaacctcgctccgcgcctcgacctcaattcgtggtgcgcgtcccacagcagcaaccgcagcagaatcagcaagggactcgtgcaccccgtcctcctacgccagctgggcagcccgttcaaggccgcagggacgcttcaggtccgcagcggctgtgcttcaactgcttcgagcccgggcactttgcggataaatgcccaaagccaaggcgtcagcaaggccaagcgcctccccgccccaacaacggtggcaaggatgtcatccgtggtcgcgtgaaccacgtgacggccgaggacgtgctgacaactccggacgtcatcgttggtacgttcctcgtccattccatccccgctacaattttgttcgactctggagcttcccactcgtttatatctgtgccattcgtggggaaaaatcagttgggggtagaaaggcttagaaaccctctgctcatcaccacccctggaggggttatgacagcaaagtattatagccccgccgttcctatagaaattcagggaattccttttccctcggatctgattctgttagacacaaagaacttggatgtgattcttgggatgaattggttggctcaattccaaggagtagtggattgcgcgagacgcactgtcactctgtaccgaggaccggaacagccggttgttttctttgcacctccaacctctgtccgaagttcagaactgcatcagataggtctgtcagaaatccccatcgtcagagagttcggagatatttccggaagaactacctggtatgccgcctaagcgagagattgagttccggatagatcttgctccaggaaccactcctctgtacaagcgaccctaccgtatggcagcaaatgaactggccgaagtaaagaaacagttggaagagttgaaagaaaaggggtacatacgtccgagtacttccccatggggtgctcctgtgatttttgtggagaagaaagacaaaacgaagaggatgtgcgttgactacagagctctcaatgaagttaccatcaaaaacaagtaccctcttcctcgaatcgatgatctgttcgaccagcttaaaggtgccactgtattctccaagattgatcttcgttccggatatcaccaattacgtattcgtgaagaagatattccgaagaccgcattcaccacgcgatatgggctgtatgaattcacggtgatgtcgttcggtttgaccaatgctcctgccttcttcatgaacttgatgaacaaagtgttcatggaatacttggataagttcgttgtggttttcatcgacgacattctgatatactcacaaacagaagaagaccatcagcaccatctccgtctggtattgggaaagctgcgggaacatcaattgtatgccaagcttagcaagtgtgagttctggttgtccgaagtcaaattcttggggcacgtgatatctgctaaaggagttgctgtggatcccgaaacagtgaccgccgtcaccgaatggaagcaacccaagacagtcactcaaattcgcagtttcttgggtttggcaggatactaccggagattcatcgagaacttctccaagatcgctcgacccatgacacagttgttgaagaaagaagagaaatttgtgtggagcccgcagtgcgagaaggcgttccaaactctcaaggaaaagctggtttcctcgccagtgttaatcttgccggatactcgcaaggatttcatggtgtattgtgatgcttcgcgccaaggattggggtgcgtgctcatgcaggacggtcatgtggtagcctatgcctcacgtcagctacgtcctcatgaaggcaactaccctacgcatgacttggagctagcagcggtggttcatgctctaaaaatttggcggcactatctcattgggaaccgctgtgaaatatatactgaccataagagtttgaaatacatcttcacccagtcggatctgaatcttcggcaaaggagatggttagaactcatcaaggattatgatgtgggaatacactatcatcctggtaaggccaacgtggttgccgacgctctaagtcgaaagagccactgcaacactctcaacgtccgaggcattccacccgagcttaatcaacagatggaagccctgaacctaagcatagttggtcgcggattcttggctgcgttggaagccaagcctaccttgctcgatcaaatccgcgaggctcagaagaatgatccggacatgcatggactcctcaagaatatgaaacagggtaaagccgcaggtttcacagaggatgaacacggaactctatggaacggaaagcgggtgtgcgttcccgataacagagaacttaaacagctgatacttcaggaagctcacgaaagtccttattccattcacccgggcagtaccaagatgtacttagacttgaaggagaaatactggtgggtcagcatgaagcgggaaattgcagagtttgtggctctatgtgatgtgtgccagcgtgtcaaggcagaacaccaacgaccggccggacttctccaacctctccaagtgccggaatggaaatgggatgaaattgggatggatttcatcaccggacttccaaaaacccaaggaggatatgattccatatgggtagttgtggatcgattaaccaaggtagctcgattcattcctgtgaagaccacctatggagggaacaaactagcggagctctacttcgctaggatcgtgagtctccatggtattcccaagaaaatcgtatctgataggggaagccaattcacctctcacttttggaagaagctccaagaagagctgggtactcgattgaatttcagcaccgcgtatcacccgcagacagatggacagaccgagcgtctgaatcagattctagaagatatgctccgcgcatgtgtcctagatttcgggaagacttgggataagagtctcccctatgccgagttctcctacaataacagctatcaagccagcatacaaatggcaccctatgaagcgttgtacgggcgcaaatgccggacaccgctattgtgggaccaagtcggagaaagccaagtgttcgggactgatatcctgagagaagctgaagctaaagtcagaatcattcgggataatctaaaggtggcacaatctcggcagaaaagttatgcagataaccgtcgtcgtgacttggaattcgcagtggatgattttgtgtaccttcgggtcacgccattgcgaggcgtgcacaggtttcagacgaaagggaagctcgcacctcggtatgtgggtcccttccgtatcatcgctcgacgcggagaagttgcttaccagctggagttgcccgcctccttgggcaacgtgcatgatgtgttccatgtgtcgcaactcaagaaatgtctccgagtgccatccgagcaggccaactcagagcaaattgaagtccgcgaagacctgacctatgtggagaggccagtgaaaatcctggacaccatggagcgcaggaccaggaaccgagtaatccgtttttgcaaggtccagtggagcaaccacgccgaagaagaagctacttgggagcgcgaagacgagctgaaggcagcccatcctgatctcttcgccagttcttccgaatctcggggtcgagattccgtttaaggggggtaggtttgtcgcgtcccaaatcgactctaaaatctatcctcgaaattgtgcaaaagaataattaaaattcaatgtgaaagcctccaacaattaaaatgtgcaaagatgaaagtcaaatgaggcttggaggatttttgtatatttcctaaaagcctaaaatgcttaaataaattttagtggaattttcagagcacaaataataatagaaaagaaataaacaaagtggaaaaggttttataaaaagaaaaccctaaaaaaagttcgcttcccccccccttttccctcttgggccggctcggcccattccctccctctctctctcctctcccgcggcccatcggctccccgcgcgcgcgcgccgctgacaggcgggcccgcccgccgctctcgctgacgggtgggtcccacctgtcatcttcctcctcccgccgcttccgccgccgcgcccgtgccctagcgccgccgccgccgcgaatcccgccgctcccgtccgccccgcgtgcaatcaagaggggggatttactccccgcgtttccctcccccgtttccccctctttcccctctctctctccctcggattcgttcgaatcaagcccgtaatcgtcgccggcgcaatcaatggcggccgagatccccgcgcccgtttcctctctctccggccgctctttccttcctccggcgctatttaaaccctccccgagctccgcccttccgtttccgccgctcaccgctcgctctcgccgtcggaatcgtgctcgcgccgcttttccttctctccgccgtcgccgacgagttccgttccgccgccgccgccgctccggttctcctcccggctcggcgacccctccttcggcatcgccgcatcgccgccgaccccgtccgccgctccgcttcgtccgccgaccgccggagcaccgtcgtcatcgtcttcccgagccgcgccgccgtcttcctccgctccgtccgccgtttccgccgccttcgctgtctcggggtgagccgtggaccgtccccttcgccttcccccttccctcctctctctcgggcgccgctccgccgcgccggtggtcgccggcggtgaccatcggggcgcgggcgcgccgctcccgtcggccgcgccggcgaggccgccctcgggcgcgccctcgcggctgccaagtgggcccggccgtcagccgcccgcgcccgcgggtgcggctgacgcgcgggacccacggcgccgaccgccgccagccgcgtgcgcccggtccaccgtggaccgagcggctgacgcgtgggccccacttcccgtggacccggtccgcgcgcccgcccctcggctgacgcaataaatggaatttttaattgaaaattaaatgaagaaattcgcaaatatccatttaaagagcatataaacttcaaatggccatatcttggccatttgaactcggaattggaccgttcaagtctctaatttctccttaagatgtaaagaacccatttttgtgctttgtttctgctgttatgtggagttatttagtgttaaagcctttttcttttccgttggtcgtgtagacgctgcagcttcggaagatccgctcttcgttgaagtcgaagccgtcgattgggaaaacgagcaaggcaagacacatcatcttgatcatattgaatcccagtttacaaaattatgttgatttaaattattgcattatcgctttatttaaattcccgcgttatcactgttttatttagccatgcctatttacctttgttatgaccatattattattgttattgttattattactaccttgttcaccctagacaaacaaaacctcaactagtggacactctactcatagtaccactagtataattctaggtagatgcttcgcaagttaattaggcaacattaggtggttttacaactctagacttgggaaattctcatatcacttggacactctggaattgttggattattgtggaattggcttcacaccgccccctctattcaaaattccctaaaatggttttaggctgggctcggggtgcatggtttggatggtagcaccttggccgtttaaggaccggtcttcgggcctctgttgcaaagcactaccgtacttccacatgtctagtgggtaaggcttagtttgtggctcagtctagtcataaacaaaagtacacggattggagatggatgaagtcgggggtcgatggacattctccagggcaaatgaaggctacacgagctgcggcccggtagtcgagatgtcaaaaagcacagggttggtgccctgctgcgaggggctcagttccgtctgcctgtcccgggggttccggccgtaggcggaattgggtcggtactcttgtctaaggctaggatgggttggaaactatgtcacgtcttccgtctgtataccgtggtggtatgtggcacgtggtaacacgtgaggaagccgtgtcttgtgggtaaagatgtacacctctgatcagagtataatctattcgaatagccgagccctcggatatgggcaagccgagcaatgtacccaagttagtgttttaattcttaaaacttgcttaacaactaaaatatggaatggttggcctgggttggcttaggacgagctgggacccagggtcgggttgccagttcggtctgaatcatcataggccttgggttaaggcaggttcgtgtgggttcacggccttgattaataatattgtatagttctagcttcgtgtttacaaaatagccttgagcaactaaattcctttaaatgctgtttactgcaaccctaaccctttatattataattcctttgtactcccttgcatttattctgcatttgtgggtgtgtcttgttgagtacggtggttgtactcagtcttgcttaattttcccaagcccagatgaggagttccctgaagatgaaggctttggtgtctagctcgtgcctgccgtcaagcgcctgtggtcgtcgccctagtcttccgctgtctttcgttgtctttgagtgtgctgggccttcgttgcccgtgtaataattttatatacgcttccgcttgttaaactctgtattgtatcaacttttggtgtaccttgcctcctgggacaaggaataatacacgcacgtcaggaacgcccgttgggtgatttccggtcgtgacatccatggtgcgtcatagatctatgggctgggatggtggatcgattcagatcaggaaaaaaaaaggaaaaaatgaagtgggggtgagagtggttggttgggtacaggaaaaatataatatataccagaagcaaagaagttgtttttatcgaagtaaatcatttactccattagtggtgggagcgggatgacaggacgtgtggtgggatcggaagcagggaagttgtttttatcgaagtaaatcatttactctgataatggtgggagcaggatgatgggacgtgaggtgaggtaggccttggctgatatatgtttggcgctcggaatactagaagctcctagtagtatctctataataagatgttttaaaaaatcaatggtcaacaatacaaatatttaatttaggacaaaattaaattgaaactgagggaatacatagaacgaaattaatgtgatttggagaagtggtttcctttatatgaagaggattatgtcttgcagatgcattcaggagattcaaaggagaggatggcaggttcatcaatactggaatagctgatgaaccgagggggttattaagtttatataatgcagcacatctcctcatccatgatgagccggaacttgaagaagcaatctctcttgcaagacaccatcttgaattaatgaggggtggaggtgggctcaaaccccctctagctgatcaaatcaaccgtgccctagatttaccattaccaagagcctacaagagaatagaaacattgcattatatgctggagtatgggcaggaagaagggcacaatgtggatcttctggatcttgcaaagctagaatttaacctgctgcagcatgtccacttgaaggagctcagaaatttttctcagtaagcatgtgtttatttgttgtacggggtatatatatatatatatatatatatatatcatctaagtaaatggatatgataaaagtaattaactctgcgctttcaaaaagtagctaatcatgataataatatcaaatgatatgcatgtctcaatgatgttctactttggtattaccagaaaaaccttgttttggcaattcatctaaacaatcagccgttataaagtctactggccctgcatagagctggtatacaaatattttttatggaatatttgtatacgatcgatggacagtttgttcaaatggtctctattggtagtagaatcgatatctagactgcccatcgatcgtttatgttccaacagtttgtatctatttatactgccatctcaactactaagtagttctataatatgttttatactggtattaaaactgacaaattaacggttgctatcactccactagtgataatactagtatagtagtagagaccaccgtaaaggtattctcagtgaaatggatcttcacattggtagtattttaggtctgcttgataggtatacacgtccacattattactatcataactaaacacaatgctactctatcttaaatacagtattaaacatgcacctgaatcacttaattttcaggtggtggaaaaatatctatggatatgtgcaactaagttacgccagggatcgtgcggtggaaagttacctttggtcctatgtcgtgttctacgagaaagatttagtgctttcacggatgatctttgcgaagatatttgcactgcttgtaactatggatgacacgtatgatgactatgccaccatcgaggaaagcaggaagctgaatgaagcgatacaaaggttggattaatatgaaaaaaaaacagggcaaatatccttgagatgaaaccacctgtgcggtagtattgcgaaaaccactccacaaccgcaaactatacttacaagtttccaaaagttcccaaacaaattctctcaaaaaacctgagttacgaatacttttttgtcaagttggtgagacaatattttttaaaaaatatgtaaatttcaagatcttgaccaatttggttcaaaaaattacaaaatttggaggtttgaaaagctttggaaaacaaaaataaatcaacatccaactgttttatacacctcttcattcttctatttgtcaatcgataaaactgaatcaattacaattcttgtattttacattattgtttgatatgcaaagtaaattttttgaaggttttatgtatattgtatctttcgtgatgtgccaaaaactgacagggaaataggaaaaacctttatgttcttgtcggtttttaccatctggctcatcacgatttgcatcatagcacttctaattctatacctgattttttctgaagtaccacatgcaaggatcaggaagaacaacctatgcatacacactagtatcatggctcatgaaatcgaaaaggcaaacattaagtaagagatgtgcaactatgtgatacaggcacccttgagggttagggtttgaaccatgaaatttgtccattgtttcgccactaaaaaataaaaagaggcaacattgatgccaccatcattatccttgttaccgtcttttctcaagtaatagatgaaccaacaatttgcaagatgttgacacaccgtttagagctataatttagaaatcatttgtccaagagtttatatttttatagtacaagccattataagggtgtatttggttcccagtaaagattagatatgatatggccattcatattttcaaagatatagttcatgattcaattttttatctagttggatggatgggatgatccactttctttcttagatggacgaggatggattgaatgaaaacaatgatctattattaacaataaaatatgttaattcattagtattaacataatttttactaattaagaaaaaaaagaataattatatataatcaactctaaccttgataagttaattatcactaatcagttagtaatttttatcaagattagcaagggacattatcctcaatccgtcaattttgcaggatgagatcattcaacatattcgtcgaatgttccgtctcacagcctccgtgttcactactgcccactcactataaacgtgcacaaaatttgccacccttccatttaaatataatttaatgtgttcccttttttgcttagtggccgttacaacctgatacctccctaccaaaccaatgtgcttatgcttgccaattgccaaagtaatttcatgcaaattgccaatttgcttattggacagctgggatgaaagtgctatatctttactaccagagtacatgacaaagttctacaatacattgctgaacaacttcaaggagtttgaggctcaagtagatgtcagtggtcagtacagggttctgcgcataaaaaaagaggtatacctattatatgtactttgttggtccacaattatttcaagtgttttgatttgtccaagaaattacacattgaccatgaatagttcataaaaaatatatttttgatagcttcaaaacaatcatcatatcaataatatttgtcgcatgaatcaattggtataatgttttcacatcagtttatatatatatatatatatatatatatatatatatatatatatatatataaaagtaaataatggccgaaatttgtgatgtttgatttttttaatgtagatgcacactgtacataagtgggtggttggatggagtactagttcattataattcttagcacacatttatataacagatagttaaagtactgaagtacctacgttttgacttgtagtttccatcaaactaattttttttttgattgtataagtattttgactatggcttgtccaaatcgacaattagcatgcctggatcatgtacctttgtgttgagtactttcgtagtgcagccgaacaacaatattgcaaaatttgtatgactaattaattttattcacatgcgtgtagttccaaaagttatctgcatattatctccaagaagctgaatggtctcatcaaaattacaagccaagctttaaggagcaggtggctttgtctactttatcatcatcaatgccactactttgtgcaattactacagttggccaggatgatgtagtaacgcgggaagcatttgagttggcaacacaacataatagtgcagtattagcttgtggaaagatattacgcttcatgaacgacatcgctgcattcaaggtacaaatgagtaactcaactgggcttaatttgagtacatgccttgtacttccctgatttctcttgcggctgaatttttccatatccatcatatacacactagcaaaatgcagcctacctagtaaaggatattgatatcatactacttaattatctcttcaccaatattaatttaatggtggatagtttaatttgtcacataatgctagctacctgcagaacattgaaacaaggaattccaagaaaacctagatatgtataatgtaactgaatcatatttctctttcacaaacatgcagtctggaagaaagaacaagggagatgccacaagcaccgtggagtgctacatgaatgagcacaaggtaacaggcgaggaagccatagccagaatcgattcaataatagaagatgaatggaaaaccctaaatgaagttcggtgtgagcatcctcagctactccctgcggtgcaacgagttatgaatttagctatttctgtgcccttcttttacaacaagaggagcgatgcatacacatcctctaaatatcttcataagattgttgaatgtctctttgttactcccattcccatatagaccatagtttatcagctaccagcaatgtggccatatgtctatgtacttttatgatgtcggtggctatgtaccacctgtaataattcttatgcgtgtatactgcacgtacattggtaaacaattaaaagtaaataaaaataccatgctcaaaagtgtataaccatttctgatgtggctaaagaattcgtgcaagatggtttacatgggtcattggagattcctcgggttaacataagtgttaggaaaagctttaatagtaagagtgagcgaggtacaactcattcgaatttgtcagaaattgaggtatataacattgttattggtatttgttacgatcacagataagttcacaagcgcccagttatcattgtagcaattcacctcagagtattccaaagatattgaatcttagggaacttgtgtgtataatctaagaagccggattcaaccaagaacaacaactaatggcaggcttaggttagagaggattcctatggattaattaactataccaaattaaggtaaaactctattgattgcttcgggcgccggatctcccttgatctgccgagttaaaccgacctgccgatcgaatttcgctcccatctaccgtagtaattggcgtttaaccaaagcagaagataacatcagagagtatcaaagctataaattagtcatttgcctaaatcatgccaccgccattgaatcgaataaccgatggcaacatcgcaacaaggacgctgcaccaaccggtaacctccaatgcgacaccgttaagaacatttcaacatttgggatgtcaccatcgataatttggatacccagaacagggatttaacttggaatgtccacccgtggaacaagtgaggaagtgggtgttgggacatcacatccagtaaggtgtgtggggcccatgtttatcaccattgtatgtccttgagaagcccacgatgatgatgctggagtggcccatgatgatgatggcgtctactgaccaagagcggcaacacagaagctcggctgccagaaaggttaatggaagatgggctagagggttattagccctcctgcggcattttaaccattgccacacatatttctcccgccgtcagttctcgttgcaaccacgttcatcacaatcattgtcacgccctacagaccaggcccaaccagatccagatttagacaatgtggccctcctatcctgccgcttcatcatccatagttgcagggtaccccatcgcagccatcattcaggagttgaggtgagccaatataccacaatgccgcagccggatctattctcggagacccagatatttggactccccacgcacctatccctacctacaagtgcccaccaccgctccgcagcatggcaccactcccacaaagccgctgccacctcaaatcacggccgtgcttgaatgccttgtgctaccatggagattgccttgctgccggcgggcctctgatggctcgtacaggcggcggcgaggcaaggagggagaggggaggttggttggtggctagggtttgaagtaggtgtatatatctctaacgtccaacacaacatcccgtatgttatagttaggtcgtcaacattttatccataaattgtagttctctcaactatttggaagatcgtttgatcctacagtatcgtcgatgaacaacgtgcctagacagctttaatttttaatccacatagctccacatggaacccaaccacaacctacatctactctttgatctggaaactggaattctagcgagtaccttctcttctccttgtctaactccaagttgatagtctgcgtcaccctccgcctgcggagagtgtcgggcatggctgatatttctggttcttccttgctagtggagccacagtctgtcacgtccctacatgtatatatgtggaaacgagctcatctagctacatcgttgtcaaaatcgagaaaattgcactattgggactgcaaacatgggggcttcgctattttgacactctaagtaaatgacaaatgggctcatctgtgtctatgaaatgtgggtccagtgtccttatagcaaaggttaatgtttgcaatgtcataattgcaaatccaccgtcaaaatgaagtgtacaaaatacagactagtctttttgtaggcctcaacacagggatgtcctcatctgaaggtcagtgtatgaatgtggtcaaaagtgtcaaaagtgttaatcaaaagtagtacttcctccgtttctggttataagactttctagcattgcccacattcttatagatgctaataaatctagacagatagcatctatatgtagatgatgtagtcgtcaagactaagcagaaggatgatttaatctcaactcaaattg

SEQ ID NO: 6261 - DNA, 34917 bp, Oryza sativa
gtattcttcataacccagttatacacttcagcaagatttgttgtcatcacaccatacctcgatccgtctgtatcgtacaacaacgaccatttctcccttggctcaaattctacccactccgtgaagcacttcgtggcccttccacgcttcctgcgccgagtaatacttggtgcttcattaggaatgggttcaagtccctccggctcctcctgtctggcaactataggttttttcctaacctcttccatgtgtgtagtggtcaaacgatccagttgatcccatatggcatcaaactttctttgttgattctgcttgcataacttcttgaacaggtccatcaatcttttactcctgaattgtctataaaaattagccccaaaatgtcgcatgcaccatctgctatgtaaatctggccatggcacggactgtgtgacatcttcttgaagcttctgtatcgctgatagcaaacacatttggtctgttttcaacaacacacattttaatgtgccgcaaaaaccatagccagcttgatgtgttctcgctttcaacaaatgcaaaagcaacaggaacgacatggctatccgcgtcgactccgatcgcggttagaattgttcctctgtacttgcctgtcatgaaagtgccatcaacacagagcaaaggaatgcaatttctaaaggcctctatcatgcacccaaatgaccagaaaacccgacgaagaacattctccccatattcattcacctcatcgagaatagccatgtgtgtgcccgggtttcttgcctgcatcacctccaatagtgggggaagattgtgataagaatcctcataagttccaaacctcatctccaatgctttctgttttgccctccaagccttgtcgtacgatatctcatatacgtactctttctcaacgtcatgcattatggtgaaaggggacaaagatgtttttctaaccacctttgaatataccatttgtgccacaaatgccgctgtcaggtttctgtgcaccagacgggtattctccaacaaacacgtatgttgctcaaccctcgaagctacccataaagtgtcatgttgtggcttgtaaccatgcactctccaaggacatccaccctgtatgcacttcacgtcatacgtcgtcctatttgaaaccttcaccctgaactcacgcttctggacaaatgcccacctcttcaccgcatcatgtaagtgacctttgtcatgaaacatctgtccaactttcacctgcttactatcataacaccaatgggcatctaaaccatcgtttaccttcatacgactcattgatatggtcgtccaatcatcgggtatgttagtttcgttgtcccacagtgttgtatcttctccttccactacaagcgcaaggtattcctcgttttccacttccatctgatccactaccgcctcattctcctccgctgcatcaacacgcataggcgaatccggttcttcatcgtccgagtcgttggcctcacgattagtaccacgaacaatgacctttccttgtgtattaccctctactacttcttcccctcgatcttgctcagtccgccaaacattttcagcttgtccaccttccaacggagtttcttccaccacgacatgacttgactcccccgatcgatcgacacatgttgtcttctgcaccactattgccaggctatagcctttctcccttactttactaacaaacttcctccaactcccagttgacgcaacctccactactctccactgccatccatgttgacccctcactggccacacggtatttatgacaaatttatcgtgcactggatctaccccaaacatattatacaaccaccctaacacgtcgttcaaacccatatgctccggtgcattcagactagtatcatggaaggcatatacagtcaaatctaccccgctatcacatatttgtataggagcatcgccataatacagacgaatgggcatatcacctgacatcctaataaaacatgacaaatagtctgacgtttaatcatttaatcattcgataattaccctattacaacttatactatattgccgtgtactaatttacaactattagtaacaaacaactagttttgataatccaaataaaatataacacctttgtacctattttaacacacaacatatcaataatatgtactaactaagaactaatttaaccgtacaattacttaaatacctctaccaacatttagcaataacaaatatgtgctaaccatacatactaacatcgaacaatgcgaaacaattaacaagtcttaaaccaattttttattaaactttcatatgcattgtacttagggattactaatgtataccttaacttcactgctggagggcgtcgccaaccctttcctcccggccggcgcctcctcggcctcctctccggcctgctatcccctcccctcgctccatccggcgctcacggcgatgatctggcgactctcggcggcagctggcgatgtggtcctcaaaacaaatcgaactcgcggcctgggtggacggggctttaaaccggcctgtcgaacgcccattgttcgacagggtcggtggagggccctgtcgaacgcccccggttcgacaggcctcgcggcgccgggtggtgggccctgtcgaactccctccgttcgacaggtgagcgtgtcgaacgccagccgttcgacagggctttgtcgactgcccgtcgttcgataggtgccctatcgaattgcacccgttcgatagggacctagtttcgcgattttccccggttggccactacttttgcgattttccataaaaataatattaattctcaaaaaatttcaaagaaagctagcaagcggcccaaacaaagcagcagcaggctggcccaacagccagcccatagagttgagaagcaacggcccagcacagtaccgcgtaacactgtatcggtactccctctatccaaaaaaactcaacctaataagggatgtatgtgacccttcctaggactataaatctgaactactcttttgtccaaattcgttatcgtaggaggagtcacgtcttctcttagattgagttaacctagtttttttggacggaggaagtaggaatgcctaagactgataacacgaaataaggtttgtgtttacccgaaacgcgaagcagggatagaaaagaagatgcaattttattatgtaaaaaaataaaaaagaatcgtatatttatagtcctaggactataaatctgaactactcttttgtccagattcgttgtcgtaggaggagtcacgtctcctcctagattgagttaacctagttttttttttacggaggaagtaggaatgcctaagactgataacacgaaataaggtttgtgcttacgcgaaacgcgaagcagggatagaaaagaatatgcaattttattatgtaaaaaaataaaaaacaatcacatgtctttcttttttttcataaaacaagtaatcacaaaaaaatgaattattcttgttgaaaaaaaatcacataccttttttaaaaaaaacatgtaatcagtaacaaaatgaattattttagaaaaaaataaaaaagaatcgcatacttttttttaaaaaaaacacgtaatcaccaacaaaatgaattgtgtttacatcaagaattttttcctcatcacatcacttttttctcattcatggtacgatttccttatgatttttcttagagtgaaagtattctttttttttttcattcattgcatgatttccttccgactgttttttagttaaagccattctgcgattggagtgtagtgagtgtgatcagatagctagccaaaatcatttcttctactgtgagtactctttacagtatgacaaactagtgtttatcaatatcaagtaaaaaaaatcatgcattgcaaccgactcataatttctttctaaggtttcgaagtttagtctgtaatacataatttcattttaaagtgggaataatagttttcttataatcatccgcgctagtggatttagagcaattaataattatgtcatgttagcgtttttgttgcaccggtggctttataataacttcaattaatctggtggcttcatgctctcacactcactactacttattttggcttcacccagtgcaacgcatgaacattttactagttgtttttataattttttgaaattgaaaactctggatacggaaatggtatcgaatttcatcgaatacggatatgaaacaaatacggtaacttaccagaatataaaaccctgagtaaattgcacgttaggtcatctgttttaaccaaatgttttaatttagactacatagggataagacaacaccttcacttagaataaatttcacgaaaacaatccgtaaccgattctttcctggagtctgcctgtctaaccgtcatgcaatcgaatactgtcgcgtacaaagacggagcaaatacaaaatggaatgaatatggtaacaaatatttatcggaatataaaaactcaaactgagatacctgaatcaacaaaaagatatgacttgttatttttctaaaataaaaggtcaatatttctaaattttatatcatcaatttccctaggcggttacatgactttttgtgaattgatttccatagtccatcccttgaaaaatctgcatgtgaaaatgagttttcacttcctggtgccttaatgggatccaagatatcttcctccactccacgtgtagcttactaattaataatctcatatatcaaggtctcgctgtgtagattgatgatgctattcattttattttacctctccgaagcatgtaatgttttatgcactcctaatatttttagataaaatggtcatagactagaaagtagtaaatcccatcgagctatacaactttggtatagagcatgtccccatcagagattgtttgaatcatagatttatgattttacaatgaatattttgtctcctaaatgatctcaaatgataaaggtgtcagcaataaagttgtagatctcatcaatctctacaattctgatataaagtttatcttcatccgactttatatgataaagttacgtacacatacgtgttttgtttttttgaaaagttgatcctccatctgaccgtttccgatatccatcatatactagtcccaccgttttcgtttccatttctgaaaataaaactatccatattcgtttaccatctaaaaattatctatccaagactattcgtttacgaaaatgcgtctgaaaatcgaaactatccgaacagatttcattcctagtctgggcaacacaatgatttgtgctgcaatcctgcgagatccaaaagcaacgaatgtatgaaaaccaaacaaaacctacatagcacaaaacctatatgttcctcttatttaataatatttaaaaattggaatgtcagttcttcaattcttctgatgcatgcaacttcaccaagttgctagtatatactgtacacctcttcttatttaattatttgaaaattaattggagtgccaattcttcattcttctcatccaacttcaccaagttgctagttctgtaacctcttgtggagagtctaagatgtccctctcgatggtcatcatctcatttcaggctattccttgcgctgagtcgtctacgatgtccctgtcctccctcttgctgataaaaaactggggtatgatagcatccgcgtccctacgtttctagtattatgtagctttctagtttctaaattcaagcaatatttatgtacaaatgagttcaccttgtcattgtcaaaaatcaagtgtagatttgaattagctgctagtctttctgtagagataaacatatatcaaggaacagtacgtcgaggaatctcaaatcaggtaatgcgaaaattaaataatatattggtccagcaaattaaataataatatctggactattatttaattttcctcgacgtatatgccttgatataatggactaatcaaattggtttgcccattatagactcaattatgtataggtccagcaaacaaatgaccaatgccatgtaccatgcatcgatcgaagcctcatgtgccccaacataattattcagtaaattccacttgtaaaaaaatacacttttgtaggtgcttgataacccatttaccactataaaaaataaatttcgcatatgaatcccatatcactgtgcaaacgggtcaaatttttagctacacatgatagcacaagtgacagcctaaagtcctgggtgggggtgcgatgggcgtcctcctacgaaccgcttaattaaggtccgtcccgctccgcctgtgtatacatatgtgttttttttaaaactaattgcctgcagaaatcaaggatttgcgcagggaaatagagcctcaaatcaaggattcatgaaaatgaatgtccagaacaaaagcgttttacgatcttcatgcaactgacaacctacagaaatcatggatttatgcacatggatttcacaaccgcacctgaaaattattttatttttctcaaaaatagatttcttcttttttattttttaggcacaaccaccaccctccccctctccccccaaaaataaaaattttagtagttatctatatagggtagcaggtagtgtaaagtcaaaaatcacacgattttacactcgtgtgtggtatatatataggattcaaacctagcacctcttactccacactccacgcgtaacggttttacaatctcactctagtttgtgagcatggtatgaatgcccactttacctctctagaatttgtactctctagcttgttttcaattgtaagacgtttagtgtctttatcccttatctatattcactagcatttccctcatctatattcactaacattcatataaatttagacacatatacgaacttattttacatgaatctattcaaaacatatcaagtaacatatagatcatgttgaggtctacaactttgatatacaacatatctctatctgaggttataattttcttcatggctcttaaaatcatgatttgaagatgcagttttcttaaaaaagatatccttgaaaatgaacctattttacataggtagttttcttaagacccaaatgtaaaaaatggatttttaacagacagtttatgacattgaagtggcatgaaccatcctctcagccggttttcttttgaggccatctataaaaacgaaagcctagagtctgcgcaaataattttttgtagtgttcaaatcaaccttttcccccttaaatttttcttgtttattgtggatattttcttttttattcttttcattttttgattttaacttttatttcctttgttattattatcatatgccagatatcaatgtacattactaggtaaatagaatttaggaaaccaaatgctaaattgaaagcaagatatacagggactaataaggctgcgttcattcggacgagaatgaagaaatctctcgttttccacgcacacgctatccaaacagttaaacaatgtattttttaaaatattatataggaaaatttctttgtaaaatcataataattcatttttattttttttaaaaaataatactcaattaatcatatgctaaagtctcaccttattattttaaaaatcttatcgttcttctcttttaccctcctatagaacggagcctaaaacagaaaattaattaaaaatcagttgaactggactgccaagttgaatatggagtgcaaataatagaataagacgtaagtagagatggaacacattgtggatagtcttgccacgtatgcagctttcctcggagagtctgttatccgccctatcgggaaaacaactaaggaaaatgagaggtcggtagaaaattcaggcagaggatgctgtcatgcatgactatggataaaaacaataaactcccttcacgtgggccattcggacacttggataaaatgtttgttttgaacatgtcatggtcagcttatactccctgaaatttgtttttgggtcaatcattttagcaagccaaatggaccaactaggcttgcaaatggtttcacacacccaaaccggtgaaagaaaaatcattgcagatagctagaatgttctatactttctgcaatttgtaaaaggaaaaagtctaaattactactttgaactatatagcgattgtacgaattacccctgaatcacgaaaccaaacattttaaaccccaaactctttataccgaataaattacactctatctcgaaccaaattagttatagtcttgattgagaattaggggtaccactactagaaaaagcatttttacatgaggacaaaactaattttccgaggcgggagggaggtccgcctgcaccacagcgactgcgaaaatcatcggggcaacgtggcccgtctgcgaaaatggaatgaacaaacaaaaaaaaaaatcaccggcccgctccgtcatcgccgccgccaccgctccacgctgttgtcgctgccgccggcctcccccctccctcctccggccagatctgtaagggaggggggaggggagccgccgccgccctcctccctcctacctccggccagatctgggagtgaggggggaggggagccgccgccgttgtcaccgccgctccacgctgtcgccgcccccgccggcctcccccctccctcctctggccagatctgggagtgagggggggggagccgccgccgccgtcctcaccgccgtggccggaagccgcgccaccttgcctcctcgccgatgtcgccctccgccgccaccgcctgccgccgccgctgcgctccccgcagccccctccggccagatctgggagggacgggctgggagccgccggccgccgcgctccccccgcccccctccggccagatctgggagggaggggccgggccgcgctgccctcctccgtcgccctcctcggctgcgccgcctcgcctcgccgctgcagccctccgccatcaccgcccgccgccaccgccgcctccggccggcggccgggtagagtagaggtgaggggaggggagaggccggtgaagagaggtaaggggaggggagaggaggagaggtgtggaggggaggagaggtgtgagacttagaaaaaaattagcatccgcaagtctatttatattcaagtctattttcgtaggtggaccacttaagcggcgcctgcaaaaatgagcccccccacgtcgggaaaaatgctttttctagtagtataattcatctagttttaagagtttaaggtttaaaatgtgtagttttgttgtttaagatatttgtgaactatcgctatagataggggagtaatttggatttttttttcttcgtaaaccatcatgttaccaatctatagcattgacatacgtatggtagcacgactcaactaccgcagcagagatcgatcgttgttccttccgcaatttggtcgacggcaggtttttccttcgcacggctgtcaaaacaacagtgcggttgcagctagcgacgatgacaactctaggttgacaatgagggccacttgaaactattaagactatatatatgtatatatatgattggagtataaaacaaaaaatgaagtacaagatgattatgagagggaagaaaatcgaaggatatgtatataaaaaagatgattaaaacgacacaatatttgtaattaagaaaacaaatttttacactttgttttatattttaagacaatttaattttttcaagtcaaacttatttaagtttgaccatatggtaacatgtacaacaccaaactagtttcattaaatatagcataaaatgtattttaataatgtttttgttttgggttgaaaatgctaatatgattcatataatgtattaaaaagtcataagcaaacatctacatactcctccgttaaataatatatctcacgctatagtaccgtgtttttttctttttttttttgcctgcgatgttgacacgttcgtccggtgcatatattctagtgctgtaccttttttttctaattatatttttgctgacagatctactaatgtttattttgacaaacgaaatcttattatattttatgcatgtacttactcccatttttttctattgtttgaagcgacatctatgatctatctctatatttattaacaagccaagcaactacccaacgtcgttgtttccacagtgcgtatgagcgagcgagcgagcgatgagagagatgcggcgttggtgcagcaggatgagcggtctcgtgtgggtggtgcttgtgtgctcatggacatggaggatcgcagctgctcaggctccgcaaccaccaaaaactgatccactcgagggtaagttgtactactacatcgatcttaccagattttttgatgtatcattttttttttgttttgtaataaagactctgtaagtttgtttggctcaatttctacatatataccaaaggctgagtcaatatggatctgatttgtccgaaagatcatctcataccatgtgcaaatcgtcgtcttgatcttggttttcctccatcgattgcaggcctctagcttgcctcagaaaaagaactagagggaacttgattcattttatagttctgcatggacatatatacatgaacactaattaaacagtaacgctgagtttaaccatgccagcggcggccctgaacacgatactgggaagatggggcaagaaggcgtcgtcggagtggaacataagcggcgagccctgcagcggtctcgcctctgacaaaagcgactgggataactaccccaacatcaatccattcatcaagtgcgactgcactttcagcaacaacaccctctgccacattaccagactgtaagtatacgcttccacgtcttctctctttggtcaggtgtgctgtgcactatgagttcaatgaagtgccctttgtaaagagttcgtttaaatatttgatctatatatttgatggttcaaatatatgtggtcaagtgtcagactgttagtgactgcttgttttttgatctagtgtcatctagttcagctaattaactctacatgtgttgcttgcaactgcttcctaccataaaatatggtccattccaaccactgcttttgatccaatttgtttatattgtactactgtgtttcctctatttcttttttctttaaacaaccccgcacaagatagcacgacgtttctattgatacagcagaaaaaaaaaatcacaagtccatagtcctgcgagacaatagttaggaaaaagaaaaagacaaccacaccacatatctacatctcctaatgctaaaatcgaaacaagcacacaacaaccctaaggaatgtgtcttctaaatgacgcctccaaggagaaaacgacgctaagagcgccgccaccgcccattctaaagaatcaggacttagttttcaccaaaataacccattgggagagaagaggaaacatagcaatgccccaagggaaaagcggggtccgtaggcgtcgccgttgccggcccgaaggctaggccttcgcccatagttcctactctcccgcactaaagagtgcatatcagattcagcagaaccaccaaccaatccccttcgacacatagcaactacgccggcacctcgctgctggccggtcatcaaagagagtctcaaactccggcgcacttcaactgcatccacgtggttgggttggaggagagaatgagagtgaagaatggatcatctcttccccgtactagcttgtccagcatggccatcttatggcagcaagccaccgcagcaaaagcacaaacgcctggaaagatgcttgccgcaggcttcaacgttcttctcatagcactaccattgtcaccacctccaccaagctaccattgttttcgcaatgggccgctaggtatcatcatcattgcttccatcctctcaccacggcagccacaccgccactgcacaccagccatgccatgctcgcaccatgacgccgtttgcaccgaccttccatagcccttggtggcctttcactgcctctgctctcgccacgttagactcccacagccccacctcatcgggtgcatctcctagcgccaccatgcctactaactgccaccaccggacgctcccagtagggttctcctatccccgccgccatctccgccttcctcccaccgacggtgttgcacgggtgagcccaccatcgatggtgcagcatcgcgcctttccgcctccaaatgtctgccccaccacctccgatgtccaccacctccacactgccgcgccccaccgcctccccgccgccactagctcgaggatcggctccctgcgcctgggaggctggatccgggctgaggggctggatctagtagcctccttgccgcctccacgtccacgctgccaccgacatctacactgctgcctccacgcagccgtgccttggcgcctcgccgccaccaccgccggatctagacaggaggatgccagatctggccagcggcatcgtgcctcgccgtcgtcacattgccctggatctggtcggggtcgtgggcttcgatgccgcgacctcggggggaagggatggccccgccgccgccatcctggcggccacgtagtttctggtagcctgctcgaggggcggtgaggtcgaggagggagataggcagggatggtggcgcaccggctgggggcgcctcccgtgtcgcccctgccctaggagtgacgtgggggcttgcctctatttcaaattacttgtgcttcaaatgcactaagaatcctctcttcacgactgtcgatacctaaacttgtcgtccgtgtcattttccgatctctcaaaatatattttcaggacttcaaacttgtcaaagtgtgccgttgcggtcccacattatcaatagacgctcatgtgaaatgccacatgggagttgactcattttctttatcttttttctcccctttttctttttcttctgttcttccttccttttggtgtggaaaaaaggagaagggaaacacaaagggaaggaaatagaagaagaaaaaattttgggaccggaatattaatgtgttatgtcacattagtgtccatgtgacatgccacataagcgccatgtaggatctcggagggtcgtggtaatttgagaccataatgacacattttaataagttcgaggacctaaaaatgaattttgacagtttagggacctagatgacatagacgaacaagtttaaggacgggcaatacactttactctaaaagttatatctgacattgattagtggacattatagtcggagtgaagtatgccgacagtccctaaattagtgcgggtgtatcatctaggtctataaactatcaaaatgcattctcggatccctgaacgtgtcgtgggtgtcatataggtccaagcgggctccaagtcgctccgtgcgttgacgtggaatgccacggtgacatatacgtgttagtgtgacccacatattagtcacatagaaaagtatattttctcctccctttctccttctggatcttacatgaaattagaggaagataggggggagagagaagaaaaatatgtttttttaattttaatatcttctatgtgaatgacatgtgggtcctgttgacatgtaggtgccaccttggcatgtcacatccacgcatgaagtggattggagcccatttagaccttgataacacccattagaagttcgagacccaaaaataaattttggatgttcagggacctagatggcgcacttacactagtttagagatcacctgtgtacttcactcaattttaaatcgcaaaaattgttttttttttgttggaccgagggagtagtactttctatgtatatacaacagtgaaatgatcatctctccatagtaatggccgcagtatcgttttttcgcatcactgtcctctctcatctaaaccctagccacttgctaccccccgcctccacctcgctgctgcctgagcaggccaccggagggcgagcgatagctaggatggctgcggtgaggtcttcctcgcctcttttggcggtctgagccagagatgagggacagtgagcaacaccagagttttttttttttgactgaaagtgagcaacaccagagttgagggacaatgagcatggcttgagcggcatgaagggtgatgagctgatgatgctgtcgtggccacacgcaggagtgctaaaggaacccatgtgttggatgtagtgcaacggtcggctcataatagggatagtgaatcccatgggctagatttggccgaatggcaatgatggatggcaaccacataatgcctatcagtggccaaggtggcacatgggcattgggagccgtgcagtggtgccgttggcaggtgcggcctaggtgggcattggtattctcgagcctacaagccacgcctaagtttcagttgtgccggtgtcgcgagtggtggtgtcagcggtggtttaaagcaaggacatattttttaagatttgaagcttagtattctagctttcttttcagtcctctagcatttttcttgttttttctatactagaaaaggtacctgtgcgttgcaacgggtagagccaatttaatttgtacatatgtgtcagatagagaggggaagacatataggtcccactattattttgaaaagttttttctgccgacttagcataaaccattgtctaaaccactaatggagctaatttgcaccggttttttaagttgagggaagcattatacccggttctgggttgagagatgccatttgatcataggcaaaacaggagataggtaaaatagacttattccttcccctcaagtttacagcccatatatgttagttcagccagctttctacaacccaattaaatttgagaggatccattatatgccactgactttgtcacatgtttacgatttgtctctgactttgtcatgttctataatatgccatcgatttttgcttaacttctacaatttaccatcaccgtctggttagcctctgttagcactgtacattttttttccaaatgaccaaaatacccctaggacaaaaacttccaaaatttggataaaattatcaaaatatcatattataaacataagattgtaaacatccaaattttggccaaaaacataaaatatgatatttcagaatttttatccaaattttgaaagttttgccacagggatattttggtcattttgacaaatttgtacagtactaatagagactaaccggacgacgatggtaaatcgtagaagttaagaaaaagtcgatggcatattgtagaacgtgataaagtcagtggcaaatcatagatgtgcgacaaaatcaatggcatataatggattctctcattaaatttgcactaataaagcatgaaaataatccttttctttacagctcgattcaatcttcattgtcagtccgagcgagtgaacttcggctgaattgtgccgaactgagctgatacgacaatggaaacaaatcggacaacgcacaaaattttcaggcaaaaacaccttaaacttttataattgtagagatagagatagagatagagattgtgaggcgtggggtttaaatactcccgattgtaactttggctgcatacatccaactatggacaagcccatccaaatttcacttcttttgttttcctctgaaaccacaccagtccgtcccaaatttggtatgccggatgaaaaccgggtattctatttttttttgggtgaatcggcctgattttgtacgttctttgggcaaaccaaatgatttgggagttagggtaaaaagtgaatagttctcaacaatccaagggaaaaaatagaattatttcatttacttatcaacattgattactttcttgtttttgtaggagggtaacaaatttgagcgttgttggcgaaatacctttggagctgcagaatttcacctatatgctggacctgtatggtatctatgccttatcatcttaatcctgataatcaatgttaattttgcaggaaatataaattcaactccttgttttgaatactcaactgtcgacatcctggtgaaaaccagcaaatagtagtcgggaatgcaagatttttgtgttagctaactgacatgatgtttcttggtgttgttgcaggaacctgggctataattacttgactggtgccgtgccatcattctttggaaagtttactttcatgaaatatttgtaggagctatacgtcaatttctcaaattcatgtagcatctatagattggtgttttgtgttaactatttttcatcatttaaagggcttttcctttcaatgcactgtctggaccgcttccaaaggaacttggaaacctcaccaatctcctctcgctgtaaggacttgtttttcatggcagatcaatcttcaaatataattttgcgactgcctgaactaaaataattatactagaaacgattaatcacattttttctcgacaataaatttactgtaaattcagaagtctatatgttagtcctgtcggcatatcttagcctgtaagtttcaagttgtacttcacatgttcaaggaaaattgacctgaggaaggcttgaaaatttattatgtaggtcagatggctcatcaggttaaactgagcccctttccagctattagaggaatatagctaatttattgtcatgaaatattcgttttgattcaggggcattagctttaacaattttagcggtcaacttcctaaagaactgggcaatatgaccaatcttcagcagatgtaagatgcaccatttctaatatccaattgctatttatgaataactaaattttgttatgggcagatatattgttgtacaggataacacttcaatctttcaataacaggtacatcgatagttgtggattcagtggtccgttcccttcaacattctcaaaacttcagaacctgaagatcttgtacggtcaataccatagccttagacattatatatgttcgtcatgttttcatgctaaatgtctaacatttggatgcggatgcaggaggtcatcagataacgattttacagggaaaatacctgattatttggggatcatgcctaagttggaagatatgtaagattaattatataaacttgttgacataccactcagtgtatcttattcagagacaaatggaattgttcaacataaagtttctgcatgtgtttttccatctgaactcaaacaatagaatttttcaccttccagtctgcatggaattagagtaatctgcatgccatgttgatacaaacaactttgacttaaaaatgctcatacatggagcttacttttctctattagaatgagcttcgcatgtctgtacttttctgaaagtgtgagcttgtagggctttccaaggaaattcttttgaaggaccgatcccaccaagtttagctaatctaaccaagttaaccaacttgtaagtacattgttttgggtatcattgattcgatgatggctgagagcctgacaaggtcaagctagataactgatttgtaaaatatacaaatgagcagacggattggtgatattgtaaatgggagctcttcattggcctttatcagtaacctcacatctttgagcaacctgtatgtgatgcttttacacatagagcttatagtattcacaaagtttcaagttactgaaatttgatctttttgtcacagaatattaaggaactgcaagatatctggcaatcttgcaccagtagatttttcgaagtttggagttttaaccctgctgtgagttttcactcttagcattgctacatgatttattgtgcttttaatcatttcttcagattgtgaagcatctcttgatgtaaaaaatctgtcatgaatcacagggacttgagttttaacaatatcacaggccaaattcctcaaaccattctgaatatgacaaatcttgaatttctgtaagaatgttttcattgccttaattaagtttacacaaataaaagctgagctcatcattatgttccatcatcttgtaccatatcaggtttcttgggaacaacagctttacaggaagtcttccagatgctataagcccatccttgaaagcgatgtatgtcaaaaagaccaaaatagcaccataggtcaaattattttcataatacaatgtactaatttcatatgtactgaccgtggactgtttgtagcgatttttcctacaaccaactcaccggaggcttgccttcttgggctacccagaacaacttccaattgtgagtatgaaattctgaagtttggattgaagaatagtagaattagatattctaatcttttattttgtactagaaatttggtggcaaacaactttgaacttggtaccataggccacaggtacttatgacatttagttataattctgcaagaggttaaccatcaaaagaatgttactcacaacttttatttttttaattaaaattgtccacagcactttaccttcaggactaaactgcctccagcaagacaccccttgtttccgtggatctgcagaatgtatatttctttctcttcatctacagtagtagttaccatgagcatggaaatttgaatgattgattttacaaatcttaattccagactattcctttgcggttgactgcggcaataatagaacgactagaggcttagatggaactatttacgaaccagatgctgcaaaccttggggctgcatcatattatgttactagtgacacaagatggggtgtaagcaatgtcgggaactactttctggctacagatggagtgaacataataaatagtccacagaaaattcagaatgtccttgattcaagattatttgaaactgcaaggatgtcggcgtcgtcggtgaggtattatggccttggactcgagaatggaaattacactgttctgcttcaatttgccgagtttgcttatccagactcgcagacgtggctaagcttaggaaggagagtttttgacatatatgtccaggtaaaaattgactggcttgtttactgaatttttttattctttatctgaaccagttgcaatttgcctagggtgatctaaaagaaaagaattttgatataaggaagatggcgggtggaaaatcttttactgcagtcaacagaagttatactgcaagagtgtccaaaaatttccttgagattcatctcttttgggctggtaagggaacttgttgtgtacctactcaaggttactatgggccgatgatctcagcattaagtgtcacaccaagtaagcgcaaccattatgttatcttcaacaaggattatatggaatctaataagatcatttttttatacagattttactccaacagttcgaaatggtgtaccaaaaaggagaagtaaagcaggtgcaattgctggaataacaattggtgcattagtgttaggagtagtatccttatttggaatatttttgttggtaaagaagagaagaacaatagcagaacagcaagaaggtattaattatttttatagtaattcagtctaaaactatttagatgatttactctttctcatctgaccatgaaaaacaagcagaactgtacaaccttgctggacaacccgatgtcttcagtaacactgaactcaagctagctaccgacaatttcagttatcaaaacatcattggggaaggcggatatgggccagtgtataaggttttctattatctgttactaataatgtgcaaaaagagacgagtatttatttcattttctattaagaccagaattttggtaatctttatgtgcatgttcaaaatatacatgtaataggtttcttcatttggcagggtaaactacctgatggaagagttatagcagtgaaacaactttctgaaacatctcatcaaggcaaaagccaatttgtgacagaggtagcaacaatctctgctgtgcaacaccggaatcttgttaaattgcatgggtgctgcattgatagtaaaacacccttgttagtttatgagtaccttgaaaatggaagcctggatcgagcaatatttggtgagttcaatgatgcaaatttccagcatatgacattatgcttggttgatttcactaatacaattttgcttcactaagacaagacaatttgtttttttttgtattttgccaacaactgagttatttctgcttgcacaggacatagtatcttaaaactagattgggcaatgcgatttgatatcattttaggcatagcaagaggcctaacatatcttcatgaggagtcaagtgtccgcattgtgcatagggacatcaaagccagcaatgtcctacttgacactgacctcaccccaaagatctctgactttggacttgccaaactatatgatgagaagaaaactcatgtgagcacaagaattgcgggcacaatgtaagaacatttaaccatttctcttcttaaaaccgcaatatcaatatgattgctactattaatttatcttatctttgtcaaggggctacctagctcctgagtatgcaatgagaggtcatttgtcagagaaggccgatgtttttgcatttggagtacttatgttggagactgttgctggtcgatcgaatacaaacaactcccttgaggaaagcaagatatatctcttggagtgggtaagctgatcaatgatctttccatcccagaaaacattagttcgttcgtgtttattgtcttctgctcactgaacctatgtttgtatataggcctggggtttgtatgaaatggggcaagctctgcgcgtagtcgatccatgtcttaaggaatttgatgagaaggaagctttcagagtcatctgtattgctctcctttgtacgcagggctcaccgcaccagcggccgccaatgtcaagggttgtggcaatgctcatcggagatgttgatgtggctgaggtggtcacgaagccgagctatatcaccgagtggcagctcagggatggtgggagcagtagctacaccactagtagctatgcaggatctagtaaccctgagtttagtaggcagagggagaccaaccctctcgcacggtcatcaccaacgatcaccaaagctagtctggtgggaaggtgagaattgaaagttgaattgctgcaggtgattgacccttggtttgcagtgacaatattatacgttggtgtgaattggagaaaataacataattacttactctggtttcttgtctgaaaataaaagctttcctcctataatttttgaaaggtgaattaatgtggcgtattattagtattctgagtgaataagtgtcagcaacagttgttgggtacagaattacatcatgcttgtcaaatgaatgtttgatgaggtgtacaatgaaaggccatatggacatcaatccaacaatgagaaaatggtttatggcagaaagaaatactacttcgatccaaaaatataagaagcttttgggttgaacacaggtattaaaaagtaactaaaattaattggaggaatattgtgattggttgataagagaaagtagatggagaaattaagaggtcgacgcatgcgattgcttgagaagagaataagttacatttgggacaaattttcaattctagaagttattttatttcgggatgaaggaggtaagagatttccagtattcagaaacttcgatacgaataagttcgattcttcatggcccagcaacaatggacaggatacacaactagaacctaattcatgtaaaagaacagactcgtcatagtaacacaaacactagatcaaaacaatgacaaacgtgcaactcaaactaaaatcaagaccggaacttgacacaacaattcaacttaaaattctgctcagtagactaatggaacgatgcaacaactcaagttggcttggtaatggatataatctttttatggctattttctggttaggtagataaattactactctctctgtttaaaaatagagggaaactattttatgccattgcgaacaggctctagctgagttggttaggtggctctagtaacactcgtcaggtcctaggtttgactctcagtgggagtgaattttaggctggggttaaaaaaaatcccctgtcccatgccaaagcacaggtctaaggcccagtacatgtcgttggtcattctcacacaagttacggtgtcactgtatgggtggggttggggttcggggattttttcgacttgcatgaaaaggtcttcttctatacaaaatgcttgtgggtgttggcaactatttgtgacaagttgacaatgacgatcgcagcaccttaagccttgcggtgatcctagagtcgccaaccataactaaaccggctagcggagccgatttctagataattacccgtctcgtgggtaaaacgttaggttttcaggacaaacctacaaagagatgtcgcactcttgcagcggcggcgaacggtttacggcacaaaccgacaaagatggacaaactaagagaaaactaaaagcaatatgaaaaacgattcgattgattgattgtagattggtttttttcaatgaaccagccatgtcccttatataggggttggtcttgccctctacaggccctcctccacgtccaactcggggtagaaactaaaggaaacccgaaacatgccttcccgagcaaggaaacctcgagacccgacgaaacacagtcgggctcggacctgccggtcagaccggccctcaactggcggtctgaccgcccaacacacggcggtcagaccagcccactcggaggaaaccggtagatttccaaattctggcaatttttcctattttaattcttggtgccaaattttggtgtaaacacatgcccccctgccttttcgatgaacaacgtgaatctaaaagcatagaacatgttttggtcttaggacgataatccaattactggccatagtatctcctaagcgtcttgccaaacgctcgggaagtaattcttcaagtatttcccgttgattgctcgctgaaaacgctccccttgaagtgtctccaaaaaatatgcgtttcctcgaacaatgccgcatactcgataaggaccctcccaactaagagaccacttaccgaactccttggatcgagtacccaaaggcaaaattgtctgtcaaaccaaatctccaacttgaaacaactttgctttcacccttatattgtacgccttggccacccttttcttctcattctctatctctttcaatgccttcaagcgcttgtcaatgacttcatcaaggttatctcccataaacgtcttgtaatcttcacttgacaaatcatcttgcttgatataatgaagagaaccaagatttacctccaccggtaaaatgacttctcgaccataaaccaactcaaaaggagtcactttagtggcaccatgtttagatatcctatgcgcccataatgcttcggaaagcacctcatgccacctctttgggtgttcctcaatcttctttttcactaacttcaacaatgtcttattactcgactcggcttgtccattagcctgagcgtagtaaggagaagaactcaacaatttaataccataagattcggtaaaactcttcacttccttagacataaaagaagcaccttggtccatagttaatgtttgcgaaataccgaatctatgaataatatgcttcaaaataaagtcaattacctccgtatgagtcatgttcttcaaaggcacagcttcggcccacttggtgaagtattccgtagcaactagcacggacctatgcccctttgatgacgaaggacaaatttgaccaatgaaatccaaagccctacatcggaacggccatggtttcattataggattcaacacggcggcgggcgccaattgaacattgccgaaccgttgacaagcttcgcatcccctataatatttgaagcaatcatcaatcatcctcggccaatagaaccccactctcctaagcaaccaattcatcttgtgggccgattgatgagttccacaaattccttcatgtacctctcccatagccactttagattgatcttcatctaagcactttaacaagacacaatctatatttcagcgatataactctccaccaaacaaagtgtatttgaacgtgtaacatcctcaaattttaaactaaaatttgactgcatcatgctggcttttgattaaatttgtttggttcaaaaatctatttgatgtttatttaaaaattggttcaagtattattagaacccttccaatttactctaacttattccctttattttaaaccctagtgaatttgagcaaaatctctcaaattcaaaccatagattatttctttagcctatcctattattagtggagttttgctatactctaaaccctagtgaaacccttccaaactcctagtttgaattcaaatcttttctagggaaatattcaaaaattctggaaattcactgttcattgcacccaaggtgctcgacagaatgcctagcccaattagagcaacccaacttcttccaatcttgcacaaagtttagatttggtcctaggggaccacaacccactcaaaaccgtggctttctttgcctcttcctccccttcgcgccgcccgggcatccgacttagccgcgcgccatgtcgccgcgcgtcggcctcggagccgcctgcgcatgcccgaccgccttggcgcgccatcacccgtccgatgccctcagctcaccgctgctgcaccaatcttgacgacgacaaagccgggatgaccgccgctgcacgaaatcgtcgctcgacgccgtgcgctcccatccaagccgccgccgagtgcgatttcgcttctacccggggtgaatcgcgccaattcttgccgcacggttggattggagatagacggtggtatcccctctcacaattcaaaccattcaccccaagtcggccgttttcaccctcgccgccgccgcgcgtcgtgctcggattggcgtcaacacgtcgccagccgattccaaccgcggtcaagtcaatccttcgccggtaagtattcgaacgtggcctcccgccactcaaatcgatcttgcccgccctctctcagcttctgccacctttgcctcatccaaaacccgagttcatccatggcgatgacggtgcccgagctcatccggtcctcctagccctataaataggaccccaatcccttccctgtccatcatcgatcatcaacaaccatagccccacaaccccaaagctctgcttcaccaatccatctaatcaaccaccctcgctcgtcggtcgaacaccttgtgcgcgatcgactcaacccctctccatccatcctccgccctaaataacccttagaacacctatatcctaccatgttctagcataataagccctaaccaaagctctacgtcgagttttacctcgccacaccaagccgagcattgccgcccccacgctgctctgttcttcgccgccgcgaagtttttccggccgcaatccgtcgtttcaaccaacctcggtgagttcttccgtttcaaccatctacatactacctagattccattttagcaatccttttgcacaaacatgccgccctctgagctgccgacgtgagcacggccgccgcctatggaggcgctcgtcggcaactatgtttcgcaccttgccaaaggttggcaagctgccccggaatccctctaaatacctcatagatgctctggaacccctcccctagccatgtctaactcttatcaccttgatcgccatctcggcctaaccgtgccaccgccgccctagccgctaagccgtccatgcatcaaattaactcctccgccgccgctcgccgtcgccggagatccctagctccctcccctcctcggccgcaaccactttctccctctattgccgccgcaatcctaaaccctagtgccgccagcctgacttggggaatggccgaaggtagaagaagagaagagagagagagagactaacaggtgggacccgcacacagtgccatttcacatttatttgattttcaaactttagaagcccatatcttttaaaatatagatccaatttcaatgaaacttggaccaatattcttctaaaatcattctctatcttttggaccctttttgctatttttacattttattttattttctctatttttcttatttttagattttatttaaaactcctttttgaatttggattttatttgtctaaccctaggtcttgaggattcctctgacactctagataatatcaatcaatctcaggacatcgagcaaggcaagtaaccatatacctgttgatcatttaagcctatattttacaaattatttatttatagccttctattcaatattctattttctatgcataaattaatcatagaaacccagataatttagtattgcttattttgcttacaatctggttaaaataccctatacttaggttggaacaatacgtaagatttggatgatttccgggtggctagtattgtctcaatcgatataagttttacaaggtacttatgtcgaacgaacgggtacgaccgcagtttctataatggggacagacctagttattaggttaattggcaatatggcacctctgtatagtggttcttatttttaagtcctcgcgcaggaggcaactatagccgcgaagggcaactttaaccattaccatgtacaggtaaatggtttgtgatactcgagtataaactatatggtatatttctaaaccctgatcgagatgacgtggtgtcatacggtcagttccccttaaatatctcgggaacgccacaactcctcttgctgctgttaacattacgttcagagcatatgaggatataagttcatggaacaggtgccataattgttaatgacttaatactgggccatgactaaagtcgatgattatcagcaagtcgtggactgcaggtaaagcgtacatctgctgcagtagaatatctttgaaactattcgaatagccgtactcatggagttgagtaccgggactcatatggtaccctggttagaaacctaaagtttatatgttttataaactcttgctatgatttttccagattgtccaatactgctttttgcaaagaaccctattatatgtcaatgcacaacatatttccgtgataacttactgagtattgtgaatactcatccttgctcttataacccctttttcagatctaggtcaagaggaggacccttatgactattactacgaagaccccgataacttagaaaatccctaaaggttatacctcactagtcagaatgtatagaaacttccgctgtgtattaattagataggtgagtacctattattgtaaaacccatagtattgtaagactttaacgtatgcaacgaagaaccagttatattgtatgtatcattttttactgatccagggattgatacattaatcttagtcggatccaagttgttagttttgggtcccgatagaacgcttgccgccaaattttccaatcaaccttaagtgtaggatctttcaaatatcaaatcaaaggaattctccaatcttctttctcttcctgggtacaaatgtccaaatttacaattaattcaacctctaaattgattgaaacgtgccccccagcgctctgcccagaaccggtcagaccggccacacagggccggtcagaccgctcggggatgccggtcagaccggcggcatgtagccggtcagaccgcccctggtcaccagtcaaaccggccacgcaatgccggttagaccacccctggtccccagttttgccaatttcgcacaaaggtttaaaatcaagctccgactcttccaatactagaaatattctcttcttcacattatagccagatgcttgttgtgccaagtcatttgctctagaattatcacgcctagcaatatgtctaatagcaaaattatcaaaattggcaataatatccaaacatgaatcgaggtacctatttagtgatccgtccaagcatttataaactccagcgacttgttgcaccaccaattccgaatcaccaaaagcctccacgtacttagctccaaccatctccataacttgttagccgaataataaagcattatattcggcatgattatttgtacaataatactccaaacgaaccaatgcttcataacacatgccattaggtaaaaacaaaactacccctataccttgaccttctttgcaagaagaaccatcaaaataaatcttccaaggtataacttcaactaagaaaacctctccctcataagcgatatctacatgatgatccaccataaaatcacatacaatttggcctttcatagatttcaatggttcataagccaaatcataatctatcaaaacatatgcccacttgccaattctcccacttagaattggcctttgcaacatgtgtttaataacatcggcttgacaagcaattatgcatgtactagataacaaataatgcctcaatttggtacaagcataatataagcatagacaaagtctctctataaaaacatacatcgtttcggcatctaaaagacggcggctcaaatatgtaatgatatattccttgccatcttcctcttgcgttaaaacggcaccaatgactttgtcttcggaggcaatatataaccgaagaggcttttcggctttaggcactcacacaacgggtggagtagacaaatatctcttcaactcttcaaacgccccttgttgttttgcccccccaagtaaaatcggcttattttttcaagcgaagtataggaacaaaagcatcgattttacccgctaggttagaaataaaccttctcaaataattcaccttacttagcaacttttggacctccttcttgcatgtcggcgctttgaaatcacgaatcttttctatcttattaggatcaatctcaactcctctctcatgcaccatgaatcctaagaactttcctgccgacacatcaaaagcacatttaagtgggttcatctttaaaccataccggcgcatcctctcaaaagctaacctcaaatcagctatgtgtccttccataccatccgatttgacaacaatatcatcaatgtagatctctaagataatacctagcaaatcatgaaagatcaaattcattgccctttgatatgttgcaccggcgttcttcaacccaaaagtcatgacaacccactcaaacaaaccaacaaatcccgggcacctaaaagccgttttgtacatatcctcttccgccataaagatttgattgtagccggcattaccatctagaaagctaatcaccttatgacccgaggcatcattaatcatcatgtcggctataggcataggatactcatcttttggggtggctttatttaaatctctaaaatctatgcaaactctaatcttaccactccccttcttctccaccgggactatgctagagacccactccgcataaccaccgggatcaatcttctctttgactcggtcatatagcaaaggattaaaatgacgaggtggttgcttataaggcctagaacccggtttaattggaagccgatgctcaatgagctcacggctaagacccggcatctcatgatattcccatgcaaagcaatcaacatattctttaagtagctcgattatcttaaccttataatcggctctcatatttttgtttacaaaagtcggccttggtttcattccatcacctatgtctacttcttccaaaggattggccgatgtaaaccatttccctagcttctctacttcatcaaaatcttcaacggtttcaccaatatcgttctttgtagaccgatattcttgcaccctcttttgtaaccactctaaattagcctcgttactcattatacaaatttatatggcttagccgtgctacactagccggctttacagagataggtacaaatttgccatcggagatactaataaaatcataactagaaagatccctccccgataagcattgaatattcccatgacgccactcaaaagtagcatcggccattgcaacctcggccgatgtatccgcttgaacaatttcaacatcatcaccgtcccattgaattaaacattgatgcaaggtagaaggcacacaacaattggcatggatccaacaacgacccaaaataacattgtagttaccttgcacatcgacgatgaagaaagcggttggtagcgtcttgtttcccacggtgagctccgccgaaaagataccctttgcctccgttggttcgccattgaagccattgagaatcatgttagtcttcttcaactcatcatcctcacgccccaacttcttgaataatgaatacggcatcaagttcattgtcacgaccggaaataacccaacgggcgttccttacgtgcgtgcattaatccttgtcccaggaggcaaggtacaccaaaagttgatacaattcagagtttaacaagcggaagcgtaaatagttaatttattacatgggcagcgaaggcccagcacacacagagacaaacgagaaacagcggaagactagggcgacgaccacaggcacttgacggcaggcacgagctagacaccgaagccttcatcctccaggaactcctcttctggggttggggaaaattgagcaagactgagtacaaccaccgtactcaacaagacacacccacaaatgcagaataaatgcaagggagtacaagggagttatactataaagggttagggttgcagtaaacagcatttaaagacatttagttgctcagggctattttgcaaacacgaatctaatactatacaatattatttatcaaggccgtgaacccacacgaacctgccttaacccaaggcctacgatgattcagaccgaactggcaacccgaccctgggtcccagctcgtcccaagccaacccaggccaaccattccacattttagttgtttagcaggttttaagaatttaaaacactaacttgggtacattgctcggcttgcccataaccgagggcgcggctattcgaataggttgtactctgatcagaggtgtacatctttacccacaagacacatcttcctcacgtgtaaccacgtgccacataccaccacgatatacagacggaagacgtgacatagtttccaacccatcctagccatagacaagagtaccgacccaatcccacctacggccggaacccccgggacaggcaggtaggactgagcccctagcagcaggacaccggccctgtgccatgacatctcgactaccgggccacagctcgtgtagccttcatttgccctggagaatgtccatcgacccccgacttcatccatctccatccgtgtacttttgtttataaccagactgagccacaaactaagccttacccactagacatgtggaagtacggtagtgctttgcaacagaggcccgaagaccggttcttatatggccgaggtgctactatcaaaaccatgcaccccgagcccagcctaaaaccatttttggggattttgaatagagggggcggtgtgaatccaattccacaataaccaaaccattccatggtgtccaggtgatatgaatattcccaaagtctagagttgtaaaaccacctaatgttacctaattaaaaagcgaagcatctacctataatcatactagtggtaccatgagtagagtgtccactagttggggttttgtttaatctagggtgaacaaggaaataataacaatagcaataataataaggtcataacaaaggtaaataggcatggctaaataaaacagtgataacgcgggaatttaaatagagcgataatgcaataatttaaatcaacataattttacaaactgggattcaatatgttcaaagatgatgtgacttgccttgctcgctttcccaaacgttggcttcaacttccacgaagagcggatcttccgaagctgcagcgtctacacgaccaacggaaaagaaacggcttttactctactaaactccatataacaagcagaaacaaagcacaacaatgggttcttgacttcttaaggagaaatcagagacttgaacggtccaattccgagttcaaatggtcaagttatggccatttgaaggttatatgctctttaaatgaatatttgcgaatttcttcatttaaattttaatttaaaatcggatttattgcgtcagccgaggggaggggcgcgcggaccgggtccacgggagtggggcccatgcggcagcctcacggtccacgatggaccgggtgcacgcggcttacgccggccggcgccgtgggtcccacgcgtcagccgcacacgagggcgcgggcggctgacggccgggccccacatggcagccgcggggcgcgcccgaaggcggcctcgccggcacagccgacgggaggcgacgcgcccgcgccccgatggtcgccggcggcgaccaccagcgcggcggagcggcgcccgagagaggggagggaagggggaagtgaaacggcggtccacggctcaccccgggtcgacggcgacgacggaaatggcgaccggagcggaggaaggcggcggcgcggctcgggtcgacgaggacggcggcgttccggtgatcggcgggcgaagccgaaggaggcgatgccgaagcgggaggaggtccggggcgacggcggcggcgaaccggagctcggcggcgacggcggagaaagagggcgacggcgcgagctcgattccgacggggagaaagagcggcgagtggcggaaacggaggagggaggcacggggaacgtttaaatagtgttgggagggggagagagcggccggatgagggggaatcggccgcggaagatccggccgccattgatgcgccggcgaagttcgcgggggagtttccaaacgaatccgagggagagagagagggaaaagtgggggggaagagggagggaatcaaggggagtgatttccccctctttattgcgcgcggggacggcgggatgcggcggaatccgcggcggcggcggcgctagggcacgggcgaggcggcgggtgcggcgcgaggtaggggatgacgggtgggccccacccgtcagcgagggtggcgggcgggcccgcccgtcagcggcgcgcgcgcgggggaaggccgatgggccgcgggggagaggagagagagggagggagctgggccgagccggcccaagagggggaagggggggggaaaaggacttttagggtttttctttttataaaaccattttaactttgtttatttcttcttaattattatttgtgctctgaaaattccactaaaatttatttacgcattttaggcttttaggaaatatacaaaaatcctccaagccttatttgacttttaaatttgcacattttaattgctggaggctttcacatggattttaattattctatgcataattttgaggatgtattttagagtcgatttgggaagcgacaaacctaccccccttaaacggaatctcgaccccgagattcggaaggactggcgaagagatcgggatgggctgccttcagctcgtcttcacgctcccaagtagcttcttcttcggcgtggttgctccattggaccttgcaaaaacggattacccggttcctggtcctgcgctccatggtgtccaggatttttactggcctttccacgtaggtcaagtcttcgcgaacttcaatttgctctgagtcggcctgctcggatggcactcggagacatttcttgagttgcgacacatggaacacatcatgcacgttgcccaaggaggcgggcagctccagctggtaagcgacttctccgtgccgagcaatgatacggaaaggacccacgaaccgaggtgcgagcttcccttttgtctgaaacctgtgtacacctcgcaatggcgtgacccgaagatacacaaaatcacccactgcgaattccaggtcacggcgacggttatctgcataacttttctgccgggactgtgccacctttagattatcccgaatggttctgaccttcgcttcagcttctctcaggatatcagtcccgaacacttggctttccccaacttggtcccacaatagcggtgtccggcacttgcgcccatacaacgcttcataaggtgccatttgtatgctggcttgatagctgttattgtaggagaactcggcataggggagactcttatcccaggtcttcccgaaatctaggacacatgcgcgaagcatatcttctaggatctgatttagacgctcggtctgcccatctgtctgcgggtgatatgcggtgctgaagtttaatcgggtacccagctcttcttggagcttcttccaaaagtgagaggtgaattggcttcccctatcagatacgattttcttgggaacgccatggagactcacgatcctagcgaagtagagctcggctagtttgttccctccataggtggtcttcacaggaataaatcgagctaccttggttaatcgatccacaactacccatatagaatcatatccaccttgggtttttggaagtccggtgatgaaatccatcccaatttcatcccatttccattctggtacttggagaggttggagaagtccggccggtcgttggtgctctgccttgacacgctggcacacatcacaaagggccacgaactctgcaatttcccgcttcatactaacccaccagtatttctccttcaagtctaagtacatcttcgtactgccagggtggatggaataaggactttcgtgagcttcctgaagtataagctgcttaagttctctgttatctggaacgcatacccgttttccgttccatagggttccgtgctcatcctctgtgaaaccagcggctttaccctgtttcatattcttgaggagtccatgca

SEQ ID NO: 6262 - DNA, 20962 bp, Oryza sativa
agtccatgcatgtccggatcattcttctgagcctcgcggatttgatcgagcaaggtaggcttggcttccaacgcagccaagaatccacgactaactatgcttaggttccgggctgccatctgttgattaagttcgggtggaatgccacagatgttaagagtgttgcaatggctctttcgacttagagcgtcagcgaccacgttggccttaccaggatgatagtgaattcccacatcataatccttgatgagttctaaccatctcctctgccgaagattcaggtccgactgagtgaagatgtatttcaaactcttatgatcagtatatatttcacagcgattcccaatgaggtagtgccgccagatttttagagcatgaaccaccgcggctaactccaagtcatgggtagggtagttgccttcatggggccgtagctggcgtgaggcataggccaccacatgaccgtcctgcatgagcacgcaccccaatccttggcgcgaagcgtcacaatacaccatgaaatccttgcgagtatccggcaagattaacactggcgaggcaaccagcttttctttgagagttttgaacgccttctcgcattgcgggctccacacaaatttctcttctttcttcaacaactgtgtcatgggtcgagcgattttggagaagttctcgatgaacctccggtagtatcctgccaaacctaagaaactgcgaacttgagtgactgttttggattgcttccaatcagtgacagcggtcactgtttcggggtccacagcaacacctttagcagatatcacgtgccctaagaatttgacttcggacaaccagaactcacacttgctaagtttggcatacaattgatgttcccgcaactttcccaacaccaggcggagatggtgctgatggtcttcctccgattgtgagtatatcagaatgtcatcaatgaaaaccacaacaaacttatccaagtattccatgaacactttgttcattaagttcatgaagaaggcaggtgcattggttaaaccgaatgacatcaccgtgaattcatacagtccgtatcgcgtggtgaatgcggtcttcggaatatcttcttcacgaatacgtaattggtgatatccggaacgaagatcgatcttagagaatacagtggcacctttaagctgatcgaacagatcatcgatccggggaagagggtacttgtttttgatggtgacttcattgagagctctgtagtcaacgcacatcctcttcgtcttgtctttcttctccacaaaaatcacaggagcaccccagggggaagtgctcggacgtatataccccttttctgtcaactcttccaactgtttcttaacttcggccagttcatttgctgccatacggtagggtcgcttgtacagaggaatggttcctggagcaagatctattcggaactcaatctctcgcttgggcggcataccaggtagttcttccggaaacacatctccgaactccctgacgatggggatttctgacagtcctatctgatgcagttctgaactcctgacagaggttgggggtgcaaagaaaacaaccggttgttccggacctcggtacagagtgacagtgcgtctcgcgcaatccactactccttggaattgagccaaccaattcatcccaaggatcacatccaagttcttggtgtctagcagaatcaaatccgagggaaaaggaatcccctgaatttctatagggacggcaggactataatactttgctgtcataacccctccaggggtggtgatgagcagagggttcctaagcctttctacccccaactgatttcttcccacgaatggcacagatataaacgagtgggaagctccagagtcgaacaaaatggtagcagggatggaatgaatgaggaacgtaccaacgatgacatctggagttgtcagcacgtcctcggccgtcacgtggttcacacgaccccgaatgacatccttaccaccgttgttggagcggggaggcacttggccttgctgacgccgcggttttgggcatttgtccgcaaagtgcccgggctcgaagcagttgaagcacagacgctgcggaccttgaacgtccctgcggccttgaccaggctgcacagttggcgtaggaggacggggcgcacgagtcccttgctgactctgctgttgctgcggctgtgggacgcgcaccatgaattgagggcggggcgcggagcgaggttgctgctgctgttgttgctgctgcgaggaggatccccctggatagggattggtgtagcggaccctttggttagcaccctgttgattacggaaattcgccaagcggcgcttgtgcgactccagttccttgtgcttggcttccaagcggatgctcttgtccaccagacattggaaatccggatagtccacggagactagacggacggacagctcagggtccattcctgccaagaacttctcttgcttctcctcatcttcccgcacatcctccggggcgtaacgggccaggttgttgaactcatgcaaatactccatcacggagcggttgccttgcttcaactctcggaattcccttttcttaagggccacgactccggcgggcacatgggttctccggaaagcggcggtgaagcgagcccaagtaataggctgtccctctggctgcgtagcctggaaatggtcccaccatagagatgcgggtccctgcagctggtgggcggcgaagatgactttctcctcatcgctgcactgcacagtgtctagctttttccccacggcatgcaaccaatccaacgcatccacggggttgttggagctagagaaggtaggtgggcggatgcggaggaactcggcgagtttagagtgttggggaggtgggggtggagcattatgttgtggcggattttggaggtggtggaggaaagcagtcatcatgttggcctgctgggcgaggatttgggtgagaatggcgttggtatctggtggtggtggtggtggtggaggcggaggaggaggtggaggtgggctgccatggttgttgtggttgctgccttcgggttggttgccatcactggtggcagcatttctcctggtcgtcaccatctgaaaaccccacacagaaccagcaaacagagagagctgacaattaaagctaaccacccacgactaccataattcttgaatttattactgctattaaatgggttcattaaagttcaagttgcttaagcaaataaaataaagacaggctccgacacagttacaccacacaccggcataaccgtgccccacacaacccaacaagaagacaaacgagaaagaacacacgcgcaagcctactaactgctcgtctaccgctgcgacgggccagggcggaaggtgagcaacagcgcatcctccgtgctaccaacgccggaggcttccccctcctggggaaccacgggcgcaggctcggcacgaggggtctccacgaagcaagtccacgccagggactgacgaacaagctcgggcctggaggtgctcttgcgggcggtgatcttctggctgcggcagacgcggcggcgcttggggcggcagacctctccctgggcgatcttgagctgatgcagctgcgcctccaccgcgtctaggtccttcttgagctgcaggttctcctgacgcagctcctggatcttcatgttgttctcgaccatcccacggcgcaccatctgatggaagtcgatacgagccgcgtcgtacgcctccaccatgcgcgccaggtgcatgatggtagcgtcatccttcgagctagcatcccggaaggtggcgtagtcgcgggctcctccgcggcgagggtggtagcggtagggcgagtgctgcaactcgtccgggtagcgctggtgaagagtgccgatggcgaggagagcggcgctctggcaagcggcggggaaggaatccccacccgcggtgactgccagcgaagtccgctcgggagagccagagaggatcactgcagtaacctcccaaccagcgtggggctctgcgtcatcaccctcctgctccggaagcggcctggcctggtagtccactccatgtggataccctaggaccacgcacatgccccgcagctccaagacgaaaccagtcatgtccaaaccacgacgggtgacgctgccggccttctacaaacaaaaacaaaaagaaaagcaacattttaaaggtcagattttggcgataaatgaagcagcaagacagagagagactagacagttttcacaaataacaaaaggatttttatttttgaaaatattgctaaggcttgggatctacggctcgtcctagggtcaagggggctctgataccaacttgtcacgaccggaaataacccaacgggcgttccttacgtgcgtgcattaatccttgtcccaggaggtaaggtacaccaaaagttgatacaattcagagtttaacaagcggaagcgtaaatagttaatttattacatgggcagcgaaggcccagcacacacagagacaaacgagaaacagcggaagactagggcgacgaccacaggcacttgacggcaggcatgagctagacaccgaagccttcatcctccaggaactcctcttctggggttggggaaaattgagcaagactgagtacaaccaccgtactcaacaagacacacccacaaatgcagaataaatgcaagggagtacaagggagttatactataaagggttagggttgcagtaaacagcatttaaagacatttagttgctcagggctattttgcaaacacgaatctaatactatacaatattatttatcaaggccgtgaacccacacgaacctgccttaacccaaggcctacgatgattcagaccgaactggcaacccgaccctgggtcctagctcgtcccaagccaacccaggccaaccattccacattttagttgtttagcaggttttaagaatttaaaacactaacttgggtacattgctcggcttgcccataaccgagggcgcggctattcgaataggttgtactctgatcagaggtgtacatctttacccacaagacacatcttcctcacgtgtaaccacgtgccacataccaccacgatatacagacggaagacgtgacatagtttccaacccatcctagccatagacaagagtaccgacccaatctgtcacatcctgattttcgtttcaggatttataaattatttaataaattattaatagaatttatattaaatgatctttaattttcaagtgaagtaaaatgtgggaaataaaattttctaaatctaaagcatggatggatttaatttttgttaaattctccatggttaagtcaactctctgaaattttctcggatttttcagagctcaattcttaaataatacaaagaacagttcagtaattatttgatcattaatgatctaagtataattgttaagagcttttcttgtttaaaaatccttaacttataaattgttgtttaaaaggaattattagaaatgattttaaaagcctaaaagagaagatctaattttaatttgctaaatctcaatataaaaaggggccatataaaatttcattaaatactttgcttaattctataattcctagatttttctgggatttatttgagctaaggaagtatttttaataaatggaattgcatttaagaaataatttaattgaaaaaggttttaaaaaagtcttcttttggctttgggccgaaagccggcccaaaacccttctctctctttccctcggcccagccggcccagtccgccgagccgccgctcttctctctctcggtgtcgctgacaggtgggtcccacctgtcaggttcgtcttcctcgagccgccgctgccgcccgaaaccctagcgcgccgccgtcgccgtttccttccaaatccggccgctcctttccttctccggccgaattgattgaggggaaacaatctccgggatctcctctaccttttctcctttggaaacatcggctaaatcgttttggaagttcgtggaatagagttcgattcggatcggcctctttccttcaagccgcgagctttccttctcgtcgccggccgccgtgggcctttgccgccgcctccttgcacctatataaggacccccgagctcccctctacccgtcgcctcctttgccttagcctgccgtcgcgtctagcgccgcctccgcgtagccctagtcgccgccgtcgttgccgtcggttcagccgcgccgcgccgccgttgcagtcgccgacgtcggtcgccgtcgccaccatcgggttcgccaagtcgtcgccgtccccgtccaccgcttcgccgccgccgaagaccgtcggagcgccgtcgccgtcgtcgacccgaagagcttcgccgcttcctcctcgtcgccgccgccgtccgttggtcttccgccgccgttttggtcaccggtgagttcgccgcgtcgtcctctacgtgctggtgccctccgtttgtgccgaagtgccgccgttcgccggcgagcgtgcgccgcccgagctgtccgctccgccgagccgccgccgctgtcggtgacgtcatcgctggcgtcatcgtcccttttcccgtgagccggtcgtggaccgatcgatctcagccgtccgttttggatagggttgatctcggccgtccgttcccgtgaaccgtcgcccgtgcgcccggtccaccgaaaccctagccgctgacgcaataatccttcttttccttttcaaaaataattcattattgcgtcataattcaattaaaatccatataaaggttttaatccgatttaatctttaaaaattcataactaattcatcttaactcagtttaatgtggttcaagttgcaaaagttgtataaaataaagatctacatattaaaattgtccataaattgaattaaatttatttaattctttttaaatgggctttaattagatttaatcttgtaaaattcttaataaattcatttgaagtcagaatgaggccgttcaagtctcataattcatctaaaaatatgatctacatgtttgtttactttttatgtattgtttatttggtttttattagtctttttcttcgttttgcgtgttagcttgtcgtttccgtcgttgcgaaggttcacgagtgcgccggaagtattcaagaagattaattgaagaccgattattgcaaggcaagtcacacagatcctaaacacaatcctttgagcatgttgatcctatatttaaattctctatttatttcaactgtgcatttattttcgaatgtcattgggtggaattaacctattctttgttatggcccttttgttctcgattactttattccttgataccttgggtgattataattggactagttgagctttatatatattggttcaactagatgttagatataattgcttagccatgcttagaaacattagcacactattgggataacttatgactcactattatttaatgatggcttaatgatagttcacgatggtcaatcgtgattgattaattaattacttgccaactaaaacttgataatggtgggttgtgagcacatggttttgagagtcgtgctcatggcaattaaggaccggttcgcgagctactattgtggaacattaaccgtgccaaccacaagccagcgtgggcaacggctttaccttttgtatagcatggttcattgcggggcaccagactgagaagtggcggagataagcccacgggggtcgctggggagtccatgccttgttttataagggggtgattatgatccaggaatggtgcactgtggtgagttgtgttatgcagagggtattgtcatagcctctattcgggtactttccagtatcgcgacgcatggtagacatgatgttgaggctgtgtcttgtgggtacagtggtacacctctggccagagtaaaactattcgaatagccgtgcccgcggttatgggcgagttgaacaatgtttttcgtgattagtctcacacctctcatcattgtaaaagatgcttaaactggtaataatttgattagctcctggtttggagttagatctgttcagccgggtatggttgttcaggatggttgggcctgtgcagcatgggtgtgctgttcagtgttgattaaaatttctgattaattactccactgttttacttctcttaaatgttttgctaaatgctgcttttgcaaatgagcctatattatgccatcctttggtatccttgtgcacttgcatatttgctgtgtggcttgttgagtatgtcatatgctcattcttgcaataatcaatcaacctcagttgaagaaaaaggatccagaaggagaagacgtttggcttataccccagttgagctgcctgtgggagtggagctgaagccatcgctagaccgttaattccgctgctgttttcttttcttttgcaagtgtgtaacgttattattatgatggatttgtatattaaattgtcagtttgtgtacctcggctgattcctggacgaggattttatgcacaaatgagttcggaaattactagtgaatttccgggcgtgacacaatcccacctacggccggaacccccgggacaggcaggtaggactgagcccctagcagcaggactccggccctgtgccatgacatctcgactaccgggccgcagctcgtgtagccttcatttgccctggagaatgtccatcgacccccgacttcatccatctccatccgtgtacttttgtttataaccagactgagccacaaactaagccttacccactagacatgtggaagtacggtagtgctttgcaacagaggcccgaagaccggtccttatatggccgaggtgctactatcaaaaccatgcaccccgagcccagcctaaaaccatttttggggattttgaatagagggggcggtgtgaatccaattccacaataaccaaaccattccatggtgtccaggtgatatgaatattcccaaagtctagagttgtaaaaccacctaatgttacctaattaaaaagcgaagcatctacctataatcatactagtggtaccatgagtagagtgtccactagttggggttttgtttaatctagggtgaacaaggaaataataacaatagcaataataataaggtcataacaaaggtaaataggcatggctaaataaaacagtgataacgcgggaatttaaatagagcgataatgcaataatttaaatcaacataattttacaaactgggattcaatatgttcaaagatgatgtgacttgccttgctcgctttcccaaacgttggcttcaacttccacgaagagcggatcttccgaagctgcagcgtctacacgaccaacggaaaagaaacggcttttactctactaaactccatataacaagcagaaacaaagcacaaaaatgggttcttgacttcttaaggagaaatcagagacttgaacggtccaattccgagttcaaatggtcaagttatggccatttgaaggttatatgctctttaaatgaatatttgcgaatttcttcatttaaattttaatttaaaatcggatttattgcgtcagccgaggggaggggcgcgcggaccgggtccacgggagtggggcccatgcggcagcctcacggtccacgatggaccgggtgcacgcggcttacgccggccggcgccgtgggtcccacgcgtcagccgcacacgagggcgcgggcggctgacggccgggccccacatggcagccgcggggcgcgcccgaaggcggcctcgccggcacagccgacgggaggcgacgcgcccgcgccccgatggtcgccggcggcgaccaccagcgcggcggagcggcgcccgagagaggggagggaagggggaagtgaaacggcggtccacggctcaccccgggtcgacggcgacgacggaaatggcgaccggagcggaggaaggcggcggcgcggctcgggtcgacgaggacggcggcgttccggtgatcggcgggcgaagccgaaggaggcgatgccgaagcgggaggaggtccggggcgacggcggcggcgaaccggagctcggcggcgacggcggagaaagagggcgacggcgcgagctcgattccgacggggagaaagagcggcgagtggcggaaacggaggagggaggcacggggaacgtttaaatagtgttgggagggggagagagcggccggatgagggggaatcggccgcggaagatccggccgccattgatgcgccggcgaagttcgcgggggagtttccaaacgaatccgagggagagagagagggaaaagtgggggggggaagagggagggaatcacggggagtgatttccccctctttattgcgcgcggggacggcgggatgcggcggaatccgcggcggcggcggcgctagggcacgggcgaggcggcgggtgcggcgcgaggtaggggatgacgggtgggccccacccgtcagcgagggtggcgggcgggcccgcccgtcagcggcgcgcgcgcgggggaaggccgatgggccgcgggggagaggagagagagggagggagctgggccgagccggcccaagagggggaagggggggggggaaaaggacttttagggtttttctttttataaaaccattttaactttgtttatttcttcttaattattatttgtgctctgaaaattccactaaaatttatttacgcattttaggcttttaggaaatatacaaaaatcctccaagccttatttgacttttaaatttgcacattttaattgctggaggctttcacatggattttaattattctatgcataattttgaggatgtattttagagtcgatttgggacgcgacattcatggcggcacctccatccactagcatcctagaaaccggcttcccatcaacatggccatgttgatatccacgtcttcttttggagacgattcacctttatcaaccgattgttcctccttctcctctacaacaaccggtttttccttttctatggatttatgcctccacaccggtggtggtcgcaactctatgaaccttttatctccttgctcttcagcctttttctctcttagttcttgagcccgaagacgttgcaaccttctcttctgagtagccgtcaaatccttaggcatccacttaggaatcagctctgttccaggaggtaaataatgtcctctattggtcttgttcgaagacgatgaagccctcacatcgccctttgcaaacctcatatcaaaccggcgctggagcccggtcagaccgatcagatgcgccggtcagaccgacatgtggtccgcggtcagaccggccggaagcgtcggtcgaaccgccgtcgggtcggcagtcagaccggccgcatggctgcggtcagaccggccagaaggcctggtctgaccggccgactacgatgagttggtaccgacttcggattttttgtttgaggactccccaacttcatctccagaaggtattggcacgccatgagaccccactttgatagtgattacttccgaagtccttgcctccaccttgatgtgctttccttcccttttttcttcgttagcctgattcttaccataaaaccggccgttgtttggtgaagacaaacgcgcatgaattggcctcctcggtcctccccacccttggttgagttgtattggaggcatatgactgaacattggataagaaccacatgacatgtcttgtggatgatgatatggaggtgaatgcgaccgtcttggtgaatgaccaaatcgctccctaggaggtgatcttggtcttttacctttgttgcgaattttctcaccaccttgcttctcatatttctccaaaagcatatcaaaagtcaccttggtcttcctaggggctttagaagtcaaagctctactcttattctccttccaaacgccaacctccggcttctttggcactatcatctttggccttggttcgccaataaccaccccttttctcttactagattcagcttgctccggccgaatcaacaccttcttataattgaaattaattgtattcaccggaaaaggatcatgatcaagtccttcatctatggccgattgaacctgtcgtcgaaacacattgcaatcattagtataatgagaatgagaatcatgccatttacaataagctcgacgtttcaattcttcttgagatggtatgacatggcctttaggtaatctaatttgtttctcttgtaaaagataatcaaaaatcttatcacacttggccacatcaaaactatatttaacctcactttgccgatctttgcgaggagtcggcattaggttagagctaacaaaaggcttatttttgttagtccatgaccattcagcaacatatatatcatgatcaccttcctcctcactatcactagcctcagggtaatcaatcacattaacattaggctttttgttatattcaagctataacatcggtttctaacatccctaaatctcttaatataatcaatgacaggctcattatatttttgcttaaccgatgttaaatcacataacctaagctcagtttctccagtatagaaataatcatgaaatttttcttctaattgagcccaagtatgaatagaatttgcccgtaaagaccatgtaaaagtagtaccggagaaagataaagaaaacaagcgcaatttaaaagtatcactattagcctcaccacattatactaaaaattgaccaacatgctcccatgtggtcctaccatctttagcactaaacttggtaaattcgggaactctataattacgaggaaacgtcacattatcataatagtcaggatatggctttttgtaaaccctagcacgattcctagtttcaatcccgaatttatccctaataatctcactaaatatatcctccatattatcaggcctatgctgatttggcggtggatttggtggccaaataggttgtgtttgtggcgcaatatgattatattggccttgtctagtatcgggaggataccccctagcaacatcattataagcattaggaacatgcgggggaacttggggactatttgcagcagtagatacaggaggatcaaatgttctaagatgatacaaataactagcattagtcgttggatctatcccctgtaccggtataatcgcgccggtctgaccggcccagggcccagtctgatcggcatgcagaggagcagtcggaccggcttgagtcccggtcggaccgacggtgaagtcgcggtctgaccggccatcaggtctggtcggaccggccgtgtgcgccgctccatcggttccgctacccgtttggtctataggaggttggttagcagtggtagaggctttatcttttgacatgtaatcggccataagagggccgaatttaaatcttaaaaactcatcaaatttaccctcaaaagttgcatctaacttatctttaaaaacagtcatagatgaatctattgtagatgctacttgttgttggatagattgtgttacctcttcaatgcttaccaaatcgggagcgagcttaggacgtggcccgggcttgatgatcacgccttgacgagtcctagtgcatgccctcatcagcgcctcctgtgtgatctccttgaggtactcctccatagacttgcggtcttccccttcaaaatcatccaatgtgataggtatcacattagatggctccacctccgtcttggatggcggcttcgtcttggcgaagtcgaagttgagttgacgctaaacggatctcctccccagcggagtcgccaaaaatcgtgttagcaactttttgtgacaagttgacaacgacgatcgcagcaccttaagccttgcagtgatccttgagtcgccaaccacctcgatctagcaaagagctaaacctagatgggttttgataactaaaccggctagcggagccgatttctagataactacccgtctcgtgggcaaaacggaaggttttcaggacaaacctacaaagagatgtcgcactctcgcagtggcggcggacggtttacggcgcaaaccgacaaagatggacaaactaagagaaaactaaaagcaatatgaaaaacgattcgattgattgattgtagattagttttttacaatgaacatgccatgtcccttatataggggttggtcttgccctctataggccctcctccacgtccaactcggggtagaaactaaaggaaacctgaaacatgccttcccgagcaaggaaacctcgagacccgacgaaacacagtcagactcggacctgccggtcagaccggccacacaccgccggtctgaccggccctcaatcagcggtctgaccacccaacacacggcggtcagaccgacccactcggaggaaaccggtagacttccaaattctggcaatttttcctattttaatcctaggtgccaaatttgggtgtaaacagtgggctgtcgagttttcttttatgccatcgagtttgtcctagttcaacaatttgccactaacattctctccatatataatatatcaatgacttcatcaattgttctacaatacccaaatggttgggcctttattttcaaaaatacacaaaatacccttatggacatacaacattaacaattgatttatcttattagaactttcaaaaaaatatgattttttatttggcctccttacactacacggaagtttgtatataagtttcaagatttgcatttctacttttaaaaaatataactaattcgttatatgttatgtaaaatacttttttatattgttgattttaatgtagatcatctttcgtatgctacataagattttctttttgtattattatcttttgtgtaagcaatttctctcctacagtacacggaagtatttgttttgacaaataaaaatactaaaaaacttgaaacttatatagtagtgtaaggaagtcacataaaaaaaatcatttttctttaaacttgtattgagataaacctattgttgaccttatatgtcactaaggtactttgagtattttttttaaaaagccctactgaaatgacatattatagaacaattgacaaaatcattggtatattatagaaaaagacaatgtcagtagcaaattgttgaacggagataaattcaatgcatagagtagattatctcttaaaaatatataaagtgtttcttttatacaaaagacctccttgtgattatgttttttatcagataaataatatattagtaaagcatttttagtcaaagcctggtcataacatacaaaatacaccttataataaaaaaaatggagggagcagcaaagtaaaggatacatgtatacttatcaggcatcctgtgctctaataccacttaatgtgaatcggtgctcaatattccgataaattttatttgcaggcatgaagacattaatgtttggaggtttctgatcagcctatcgtcaccttgtaactgctgcacctgcatgactcattataatcgttcatgttctcacacaattaatctaaagaacaaggaagtgtgatgcctgaattacatataaatgtttaacacattaagttagtttcgacgaactgatctagcacaaactacaaagtagaagaataatctagaaaaacctaaaccctaaagacgatgacatgtacctaattatgagtgaggtgtggtgtaaagtcatgcataacatagactagatggccaaacaaaactccatctcaacgcccaaggccctatatttggaccggaagaggtatgcgacttgatatcatgcagccatgagttggatcggtagacttcataaacattccaagaaggcccccaagcaatctcttggatcggtagctaggtttgtttgaagttgatcccgtcaggtgggccaaatctaaatccaaaacatgcagaactttattttcttcccttttaagacgacaaaagtgacatggggaaatggcaggaggcttagggaaaacctaaagctggtcccaatcatctgtgcatttcttacccatgcttcccatttcttcaaccatgcatgcctgcgttcacacggttgctatattgtgtgaacaggcttgtaactgctatgcacatactcatactcatgtatacccattaaatgataatggtatagaagaggggattaaaacccataattccaatccttaaaattagtataatccatcatactagtcatccatctcatgttgcctgctggtaaatttctccgttttcaacatacatgatgtcttcatctcggtcatgatgttggctcaaacagattgtagactaccctcaatatcgtcaagtccatcagtaagacgaccctcacgatcctcaattctgtcgggcagcggacaaccgtttatccatgcgctcaatggagttcctgatgtccattttcgcatgtatgtctttcagccttttaatcacttggtctattgcaccctacatctgagcatgactaacacactcgttgaaattcttcgggctgctatctccgctttacttttttaacgaaaactacgaacagaaaacaaaaactcaagagattattcctatcagctgctagaacaaggattgcagtggagactagctaatggaagtgtcttattaaactcttacaagtgtcttaccaacaattctaaggatagtacaaccggtggacgtgataccttgagggtgcgatctagcgactgtaacggccgaagctatgctaatcagaagtatgtatgtggagtttgggagaacaaatttgtttttggtagaatacaattcagtaacacatagtaatgttgagtaaatatctcaaagtatgtgtatgcaatcactagttgagacacgttcccaagcctaatcagtgagaataaaaaacaaaccacttaggacagttctctcacaaagtctctcaaagcagctcgaggaaaaacaatattacacctcctttatcacctttttattcacttcttttatttattttcattttcttctcaaccacaggcatgaaagtagaagcacaatatgaagaagcaactcaagctgacgaaagatgcaactgtagaattttgggagcgtcctttaaaatttgtgctagaacttcgaagctcgataactcaatcttccatgccaaatttagtaaaatttttttggcaaaccagatgaagtgcagataatcctatatactttttctatagatgtgcgtagattaattttttacccaattccatgtccatatgtaaaagttatatctgttttaagataggtgacacaagttagtgtttggaggcatacccttgtttctctggctagggtaaaattgcaaataatcctcaagaatgcatataacctactgtttaactacaatattgctgtgggtggcaaaaggtagtaggatccttgtagtcgatagagagacgatagtgaagtggagcccatatgtggtggcaaggagttgctcttgtgggggtcggtcgactacgaatcacatgtacaatttagtaacacctagtctgtccacgggtggccaagtgcgaagccgccaattgatctcgtcattccgtaaatctgatgcctgaaaaatctgagccgctttaagttgatgttttttattgggttatgttttttaaggtttgttttgtaacaatgaagaaatcaagttaacagaaccgagaaaacaataaaaaccaaacacccatccctattgtgattgattaggtcattaggataagagagtacgtggagaagtcctcatattttaaagaaaaaaaaagtatgttttacaccctcaaactatttcattatccacttaaacctctattgtaatatttttgactgattttaccaactaaagtcttgtttgttctctttacatgacccgtattttctgctagaattttgtagatccattggtaatatcattattaatgttcaactttttttgcaaaaattttcatgtgtatctttttttaaagaaaaacaataggggaggtcccccactattaaataaacatttattaatgaaagaaataaaggaaaaataaaaaaagaaattacaacaactgatccatctcatgactacattttgtctctctcatttaacctaaaaagcaaaaggagaagatcacccttaaagagctgtatccaagaagacaaagaaggagacttattatcaaaaataaaatcatttatttgctttcaaatattccatgccccaaacaagaatttttcaataaaacaatggccttgatatcgatgtctagcatccactatcttgttctccagatgcaaagaaatgtcccaagaaatacctatagcattccagcaactcctcatgaaggggcaatgaaaaaaagaagtgaaacaaattttcaaagattggattgtgcatagcacacaattcaggtcacagtttggacggccaccatgcttattatccaacatatactttgtgtttaatctgtccatcagccaatgaaacattttaacttttgaagttgctttactctttcataacaataagaaatgctgtggtagctgtggcccgggctaggtggatgcgggcgaggcctcagctcgccttgtccggcggtggtgacgggcgtgaccggcgaatcggacggcggcggcatcgggcgtgactggcgaatcggacggcggcggcatcggccacgtggcatcgggcgggaccggtggaggactaggctaggtggatctggcgggtggctgtggcatcctcgagtgtgacgggctgaaacctaggccccacagatttgggagtggcagcggcggcacatgcgagcactggcttggagaatccgacggcggcgggcttgaccggcgaaggtgcctcttttcttcctcatcgccagtcggactcagctcccgctcctgcctctgaagtgcttctaggtcctgctcgatgatgttgccgcttcacgtcaacctcctggcgcttgttcatgccatcatcagctcagccattcactggcaccacgttgatcggtacatacgctccagatgaagggagaggaaggagattaaggaacaagatgaggatattttggtccagaaaatcttgtaagttcaccaaagaggtaagtagtggcttatctcaaatatatgtaagattgtaatggcatcacttcaaatagttgaatagtaatggtatttttcaaaatagataaaattgtagtggtatgatccaattaacccaaatataaacccatgtatcttagcccggtgacaagttcacctcttctaacagttaaggttgtaaaatgagtaaaagaaatagtttaggggttaagttaaccaacagaatagttttggggagtagtattgattttttttctagtttaaaacggatgaaatatctatgttagcaggaagtgcattttggcacgttcagagcatgagagcagtgctttaactctgacaatgattggaatttcctagacgtttcagtgtttcgtcgaagaacaagttccggccggatgatgattaccgagctaggcgcatgtttcttgggtgttttgcgggtgttccttttttttttttttgtaagtttctttcgggtgttttggtcactacggagattctgctgtacagtagtgatgtctgcagtagtcgtcaacacaacagttagctggatggcgtatgtaacttggacctatttgctttgtgtaattgtgtggtatggtttatcgccacgagacacgccgcccaagtatcgacagctcagacatttcgtatggccatatagctcagacatccacccaaaggtaccatcgatgtcatcctgctagcactgcaataatcatgcgaccatgtatacataccagtcgttccgatttcacgattcttaacgttgaataacgttggacttaaataattaaaattttactaacctaataaccataaaaatatttaacttgaagacacttaaacacgacgtcaagattagtctaaaaaatattttaataaacatagatatttacttattttgtacacatattataataaaaaattgatagtcaagcatatttcttgaaactatgttattgtctaaaacgccgagagctacagaactaggtagagttgaaatatctgtttcctttatttttgtggcaaaataataaagaaactgaatattcatttttatggctgttcaagagagccgcctttgaaaaatcaattttattttcacacaggcgtgctattgcgcgaattaatcagcgatttccacccaacccttagttggatgtggttcaaacaaacaccggtgtagataagttgtccaccgtctaaagggtatatatatattagtgtagcaattgtgttttcaccctcactttcatatacaattgtgatttttccctcttttttagggtttgtcaatttgttgttgttattttgaaatgaaactaccgtttacccctagttcagatggctgttaggtgggcatgaaactattgagttaaattaaagaaaaaatatttatgaaacaaaaaaatgaccattctaaccccatgtgtatcacctacccatgtccaactcatttccaaattcttattgttagcttattgttagcttattgattggttgcttgcacccatgcatgcatccatccaccatgtgccattggcatgccgacgaagccgccaactccaatgtccaatcttgtgtcgttcttctcttgtagttgacttcctttgttcgcatgaagcaaatgtttatgcaagttgtgttaaatacaaccgatcttttatcgtggtactcaaaaaacaaatacctcggttagatttagaaccggtactaaatttatttttagtactggttaaaaaagtctaagtcccaaaaacatctttagttcctgtttaggttaccatctatagtatcagttgggaac

SEQ ID NO: 6263 - DNA, 15604 bp, Oryza sativa
  unsure (1)..(15604): unsure at all n locations
attcctgcagcccggtccatgtgaaccaaggccaaagaacacacaaacaagactaatcctgctaatttaagtgttgattaggatgttacattaacatgtaagtgaggagagagccgcatagacatacattgttcagaaaaatgtttaataaggcctaagagtgcacggagaaaaataaaaaaaaagaaattatgcaagaggtagaactgacaataataaagcgaaaatcaagtttacaaatatagcatgtctcatgcctgtatacatcgtgtcctaaccaacttctaacttggtaagcttggccattttgtgttttttcatcttggttcgcacacatcaaacatgtacatacactaaaataagtgttttacaagtttgagtactaaattatacctacttgatatatgtactgcttgttaaatatgtgatccgaattttgggcccataatatattcggattagttatctaataggacactactttataggattagtttcctattagggctcctagatttctgctatatatatcccttgtaaaccgcacggggagggtgcgacagtccaatgtatcccctgtgtttgtatccaattcctctatagtgatcattgccggtcggcgcccgtggttttttcccgcaaggattttccacgtaaaaattcgtatctccgttgtgcatctattttcataacaagtggtatcagagcattggagattcgatctatagtcgcttcgttgttgggttcgtggccatccatcagatcgatctatatgatgtcctggtcactggcgtgattccacgatcgaagaaatcgatctcatctgatcggcggcagcaggcgcgtgtcgtcgcgtcgtctcgccgatttaaagcggggtcatctgtcgactccgagcagccggcgtccacctaccaatctaccggcgtcatacacacgtcgggactcaggagatcaatctaccagcgcacgcccacgtcgggagaaaagaaagtcaggaagcggaagccaccgttcctgccctgttcatgtgaattaaatttcacgttggatttttcctgcgtgcacatatccatcgtaccagggatttaagccttgcattgttttggttctgttcaggggaacacaaattcacgttccaaattgctatgttcacaaagccaagtctaccaggaggttttttacggagatcaaatacttcgttttatgcacctagagtgtttcgcatttctgttagggtttgacaaattgtaccagcagattcaggattttattcccaaggcgagttagaagtttgatctaccactcctggattgagatgcaatctcgttatggcaagtgaagatgcaagttggcgcatgtttcaaggaggataagtcatgcacctgagattaaaaaaaagtacattcaagtcgtcgagagggagcctcgctcctgtcaagatcacaaggtgatcaaattgtccggcgaattctgctaccattgtacccaacataccaggaggttatcaggggatctaagtactttgtttttgtgcacaagaatttttcgcgtttctgtttggattccagaaattaatgccagcagatttaggattttattcccatggcgagtttgaagtttgtacatcagtttcgcgtctctgctgggttccacaatgtcataccagcaaatttaggatttgttcccaatggcgagtttgaagtatggtctacctcttctggattaagggtgttatggattatagtccaagtgactatttggcgcacattgattttatcatcacgaggttctttggagattgaagatttttatgctacaagggaaattcgtctcaaggaggagattgttaaatatgtgatccgaatttcgggcccacaatatattcggattagttatctaatatgactctactttataggattagtttcctattaggactcctagatttctgctatatatatcccttgtaagccgcacggggagggtgcgatagcccaatgtatcccctgcgtttgtatccaattcctctatagtgatcattgccggtcggcgcccatggttttttcccgcaagggttttccacgtaaaaattcgtgtctccgttgtgcatatattttcataacactgctaatgcaatttactcttacaacaatttacatttcacaatatagaagcctgtgggggccgatcgtgcgctcctaatctcttaaatactctctccgtcccattttaagtgcaaccataagtttccgtatccaactttgattatctgtcttatttgattttttttataattagtatttttattgtgagatgataaaacatgaatagtacttacacgtgacttttgttttttactttttttaaaaactttttaaataaaacggacgatcaaagttgtgcatggaaaattatggctgcagttaaaatgggacggaggggctatcaaccatatttctatgaatgcttctgaattatttttatcattgttacaattagtcatgttccaattcggagatgcatgggccgtgaatgctgttaacgtgggcctaagaaaatagcccagcaggccgcagtttcttttatatattttcccagtttttttaagggaatatattttgccaggtcaataggttaaccaccaggacttaataaagctccttagggtgaatagctaatatgggccctgaagtttcgcttcgggcttagtttagtcattgaggttttaaatcgtccagacaagtcctccaaattaattatttgggttaatataatccttggacccataaaaagtgacacgtgcgtatgccaagtcatcctcgcatgcagcggtctacccttatataccatatagaaaagaaagaaaaaaaaagaaggtaaatatttcgcacgtgtatgatcgttttagaattgtcacttacgattgctgcagccaaccacggattgtataaattccttttgtcgttcaccctctgcaacaatgttgggcctaggctggcttgttattttttctgtttgtgtctttttttttaattatgatatataagggtagaatgatatttcatttataccgctgcatgtgaggatgatttggcatgctcacgtggcgttttttgggtccaaaggctatattaacccaaataattattttagaggacttgtttggacaatttgaaacatcgatgactaaattgagcccgaagcgaaactttaggaccatattggctattcactcagctccttaaatgttgttttcgtgaaaaccgaacaaaaacctccgacttggatcaattttcgcaaactaaaattcgaattcgaatttgaattttctcgttctgcttgttggctatcgacagaaaaccgaattcgagtttgaattttctcgttctgcttgttggctatcgatagaaaaccgatcggaataaacgattttcctaacggaaataaacggcaagattagtccaaactgaacggagaaggcaagtttaacatcggctccagcgttggttaattcgttaggttaatcttgtagagattcatcgataagtggtatgtggttttaaccctgaagtcttatgttcaatccccaacacacccataatttcttcttataaggttcaagcgcgtggtcttatactcgatcttattgcagttcaaaacataaatggggtcctgcagagctattaccaatacataaatgggcttacatattgcaatttgcagttcagtagtggccttacggcacagcccatcagaacatgttctttattttctcacgctttccattctgtcccggtaaacaagtcatttagattcatattttcttaatttgtttaggaatttatatgagttcttcgaaaaaataaaattcaaatttgaatttggatgaaatggaccgatttagtcctcagcaacatagcttttgtcccgcgtcggttagtcagttttttttgtcctgttttcgttcaaccctgtatactcagtagagtttaaattctgatatctataattacgcacacaattaaaaaaacatatacatatatataattacgcacacgtggatgtgctcttaatggggattttgtgaggtttatagatttacggttggcctgtcttgagcgtgtaaagggcacgccacaccatacatcgtgagtgtgtgcacatgtcttccctttacatgtcgttaccatgcttaattctagctagtttagaaatgaatcatcggggtcgttgctaacatttgtgcctatctagctaggctcctctaataaatgaaaccagaaaagaagtggttgtgtagatagtaggtttaatgaatggcacgttgggttcagtcaagtcatcgattgtcaagagaaactttattttaatactaataccatttttaatatattacagtagcttatagttatcatgttcctcttattcttgagaagtctcccttagattggatgggtggctatgtctactctatctatcaaacatatttttaagagctttatttatcatctgtaaaagattggatacataactatttaagtatagatgttaggatttaaacttaagtggatgtaaattcatgtacatgtaactcgagagattggatacataactatttaagtatagacgttaggatttaaacttcagtggatgtaaattcatgtacatgtaactcgaacatcaagatcaaaggtgatatttgccataattttactacggtcaactcatatatatgatctattatctcaaactaaacggattttcacaaaatcttaggaagctttctaacaaccatggaacaaggacaaaggacaacctctactagctaacacctaaccattcacaaaaacttagtcaaggggctttttctagtttttatcaagttctaaatctccggctaagcctcttagcggttgagctctccaacagctaagacattagctgttgtcgaaaatattaggaaaaagttcaaaaatttgacagaatttaggctaaaagttagcatatcgatcactcacttgatttgcacatcaagttcatcaccaattcataattcatacttcatacgtggagttcatagttcctaattcatacttaatttagaggctaagtacaactattagcggccgataaatcttagcatcaaaattgaagtatcctagttgttcccctctccatctttgccgctatagccagaggtttagaacattggtttttatgaaaccattgacaagcggtgaaattaatctgaccgaatttcgtaaaagaaaaaaaattaaaatccacttcaaacttaataaaaaaacccaacgctttatgcttttagccgtcctagaaaatatatttttcgcagaaaccggccagttttccttggtatgtaaagttgtaaacccagtcatggtcgaccatggtgcacgccgaagtcgagagctgttggctcttatggtggaaaatattgacccccgtacacatgatgaagcactaggagtgaaacaacgagtgttggcacatgtccatatgcatcttgcatgattgatcgcgccagtgaaaccactgttagggcatacggtgaaaatctagtaaagatgattctaatctacttcctccgtttcataatgcaaatcattctagcattgtctatattcatataaatgttaatgaatatatacatatgcatatgtctaaatttattaacatctatttgaatgtggacaatgctagaatgacttatattatgaaacgaagggagtagctagctataggctgtggttgcatgcgcgcatggatatgctatccagcttcccttttgtcttacacaatatgcatgcttgcgtgcgttaatatataataactagggatgatgatcgatgcggtcttcagctcacataagggaacacacaatattcttttttttgggtgaaatttaatttgcacttattcatttcaccattctcccgttagtgtgcatttttgggtgtgttccgtagccaggctgtggcagccacagctgtagccggctgcttgcttggcttgtgtgaaacagcgctgcagcagcgctgcagccaagtagcccaacagacccttttgttttgccatccctattaaggctgacatcgaatccactggttcataacttccccccatgacaacgagcacgaggtagttcattagtgcatcattaattaagtattagttaaaaacattgaaaattagattaataagatctttttactcaactttgctataagaaaatttttataacacacgtactacctcagtcctaaaattttatagaaaagttgctttaaaaattatattaatccatttctcaagtttattttggttaatacttaataaatcatgcactaaccgccgctctatgtgttgggagtgagggttccaacccactcccgaactcaatctaagccaatgattcttcatctgtttcatactccctctgtccaacgtaagttattttgagtttttgtttgcaacgtttgaccactcgtcttattcaaatttttttttgcaaatataaaaaatgaaaagttgtgcttaaattactgtagataataaagtaagtcacaaataaaataaataataatttcaaaaaattttaaataagacaagtggtcaaacgttgcaagcaaaaactcaaaatctcttatattatgggacggagggagtatgaaacagagggagtagttgacatttaacttctttttcttagtaacacattactaacacaagcaaccataacgcgcgcacactcacccctataaacgtacatacgcatgccttattctgatgagcacagttaactttatcttaatagaccattatgcccttgtgcatattccaacattaaacattcctttgaaaatttttaacgagtacaaaaaaaaaggataattaaattttgtctacctaaagtatattgattttaaaaacattaaattggtgaacatgttatttttcttatttttttcaaaaacaatgcaccatggaatcattcggttctcaaatgtttcattaaataatttatagtagggaattaactgcattgcatgtttaatatatatattttttacaatattagcaactacttaatatttatatgtgaaaactattttccatattttattttaaagtttcacataaaaacctttaaaactaactgaaaattttcttacaatatatacattttcatacaacctttaaaactaacaacattaaaactatatctccttattttttgtttgaaatttgttatgacttttagtttcataagggaataataggcctttgggggcaaatctaatggtcaactaacattgatcaatgataatggtaaaagagaagtgagtgctaacagaatagtggtaaaagagagagaaatacaaaacttttaaggcggaaaagagaacacggtttggacggctagcaaaaagaaaaaataaatacattcctttcaatgtgtatttttcagagctatgacaataaaaatagtgtaaaaacttattagtggtagccattacttttccaaagttttgaggtcaaatagctagataatgatatatagttatatatataatgtagtaccatcttctgtacgtagttttctttccatatggtctagatccatagaaagagagaaccattggtagccattatataggcatatggttcatttgcttctaaacatggagctatattttctcaactctatatgtgcatctgtgcatgtttgcaacaacctaacatgacatcagtgacttttatacatgccctaattatgtgtgtgtgttcatagatcagtgcatatgttgcgtgcaacatcgatcgctttgtgtcaattattcatcagtccaatcatgtgggcgtccatggacgacaagcaacacgcgccgtaattaagacagaaattaagcatgaccggacagctactagtcttcaattgcactatattaacattgagatcagaagtagggagtacaatatatagctttctctgtctttaacagaatttcactatattataattggaattgaagttttgaaaaaactaatcttttcattgttagcttgatcatgtacttacatctagaacgatatattttttttttgacttgaaagagttatgaaggattgtctcgagagcagtctacacgaactccatgttaactagctagagatgggaaccggatcctctgatgttaggaaaccaacgtcagaaggcagtagtttcttcatccttcatccaccgtccctggagcatccaacgcctctcttgcttttgcttcattgtagggtgccacaatctctgttctctggcgcgtgaaggggattgattcatcgaggcggcgagcgaggaagcgccaagcaaacgaatcctgagacaaatcaacctgtattgactcaaacctcacaaatcaacctggaactttattcgatcgacccaagaaactcaagatcaacgaatacataagctatctgcgctactccaaccttgacaacaataaatcataaatggcattaagctagtgcagagcagaaaaaaaatcataataatgtgtgagctcgacggcattaattaattagttcctcgccggcgagtggtacgggctcggcgttccgtacgacggcgtcagcatcggcgttgggtgcggcggctggccagggtgcggcttgggcgccggcttggtcgacgacgcggctggcagatgggcttgcagatggtcgccgacgcgcacaccggcgacgtgcagtgggtcttgccggcgacggcaacgaaggttctctccgacagctgcatgatcctcgacggctcctgaccggggcatgccgcgttatgtttcgccgcgctgtggagctgagccacgctgtcggcgccgcggaggtcggcggcgagcggcacgctgaatgcgccggcgccgtcgagcttcccggccgcttcatctcgtactcgccgtcagcgctgttcttgcacttgatcgccacacggagacctgcacacaaatatatacttcctccgtcccataataagggattttgagtttttgtttgtaaattttgaccactcgttttatttaaattttttttgtaaatataaaaatcaaaaagttgtgcttaaaatactatagataataaagtaagtcacaaataaaataaataataattttaaaaaattttgaataagacgagtggtcaaacgttgcaagtaaaaacttaaaatcccttatattataggacggagggagtacacttgacttaacaatggcaaatcgtacaagatcgggctgttgtcgtcctcgtaggctgcgttaatccggtttggatgtgaaggacgaaaatttgactcggcgacagtgaccgcttccttgatagccgtctcaatgaatcgatcaccttcgcgcgcgagagaacagaggttgcggcaccccacaatgaagcaaaagcaagagaggcgttggatgctttagggatggtggatgaagaaactactgccctctgacgttggtttccttacatcagaggatccggttccctagagatgatacaagagaaaaaaaaaagtttcccttagcccatgcattattgcatattcctatacttgcctctgaaaaataacatacttttatgacttgaaagagttacaaaggattgtctctcaagcagtctacacgactccgtattaactagagatgatatagcgggggaaaaaagtttcccttacccatgcattatgtattcctacatagactctttcgtctttaatttgtttttgagccggttacactggtccttttcatatccaaggagacgatcataatgtacgtaacaaaaaatattacgagagaaataattgatataagagataaggtataccgttcatttggcttttctttctcatgcataatgtacatcctatatatagcactagcagaataaacacggatggtcatagacatcgtcgaacgctctaccacacaatctcaaacatatatatttttagagaaactatacataatactaacttccactgatcgcaaaaaaaaaaaaaaaagagtggtggtggtgtctcctgtttgcctccactggcttaaatccataaaaaaaaaggagctttagttttgcctcattctgttctccccaatattcacaggcagatagcccaaatcttcaaaccccgggaccccacagaaatggatggttccatcttgctagcaatgatgcatgcacacggctagcttgttcgtatatattgtcttcatgtgccattcacatatactacttgcctcttgtatactccatccatatcccaaaataaattagcttctatagatgaatctggatataggttatgtacttcagattcatatccaagaattgatttttttatgggacatatgggagtatatgtattcatgttcttatctcaaaatttaagagctagctgagggggcctaaattaagggggaaatagaaaaacaagtggacttgtaataggactttttgttggagaaggtggatactgcatgcttacattaggatttgttgcatcttagaatatattattgtgtatattgtatctttaaaacatactccttccgtttcaggttataagatgttttgactttagtgaaagtcaaaccatttcaagtttgactaagtttaccaaattagttttattaaattaataattaaatatatttttataataaatttatctttggtcaaaatattactatttttttctataaacttggtcaaataaacatcttataacagaaaacagagggagtatgagtgttgcactttctgaggattgctacataaaagaaatttcataggattttagaagagatatatgatgcatgtttgtttctctctcgcagtagagcccaacaaattgaaagcaaatccaatggctctaatttgtaggggagtttgtggttaggcaaatgtctagctcagtaccctccaaattatttggatcaatgattgttaacaccagtggatctacacatctaatccctctagctaccatagtaccatgataattaacaatgttttctaaagcaccccctgttaactaattaattaatctgtactccacaacatagggtagggtatatttttcaacaaattcgatccacggctgggaccacgcatcggaatccgtgcccggaagatgcacggcatggatcatatgtgctgctctatctcaacctctcttctccagtacaaaaaggcacaggaccccactgactaatcaacaagattagcagttaaataaaccttgggttgcatgtaaaataagctattaatttgcatgggttagtatgcatatacgtgtgcacatgatagaaaagaatggtgctattgctataggcagatcagaagaaccagagacaagtaaattaagacgttggttttattgcaagttgggagatttggcaaatcctccttgggattcttcgtgagtcgtcaaacttttcggtttcgttttcttcgaactatgtatatatagcttttgagatttcgttttatgtggcccggccctccaaaatccaaattggcactgaaaaatctcggcttttcgttgtgccgtctgctagagtttatagttaggtaaagctccaacatctcccagactatgattagcacttgtgttattgggttaatggtacccacattttcactttcttatcaagccaagtaccattgagatttaattagacctcgttcggaacacgatgacaggaacgattaattgttataacttgtgtagaatatacgtataaattcagtacagatttaaacagatataagttcagctgaacctcgctaagaaatatatatcatgaatctctctttgtcgtcaccaagtttgggtcttatccagtgattttccgtggttggataccgaacactggtttttacaacattaatcctagtagggaattttcatgcattacaaatgtggccttaccctagacttgcatattattgtacctagcatggactctattattgtgttcacctttctatcatacttgtttgttaataacatagtcttgattttctctttacaataaggttttgtggaatactccacacttgagatatttatttgctcgctattcatactcttagctaaaatgttaaacaaaatatggtaagcgaacatatctctactactttaaaagtgtaatcgtctgccttccgttcccttctcaccatgcaccagaggttgtgcgtccctttatgtgtacgtaatcaatatagaattcaatacttttccctcaatccacccacctagcctatccctaattatataggttagtctatgttttattctcaatccatccacccagccaatccctaattatatgagatgacccattggaaagcacagaatcttactagtttgaattaaatgtcatggttacccaaagaatctcaagtgatctatgaatgaaaagattgtagcaaattccaaagaaaaacctaggtcaaaaaaatccttcgaatggaaattgttgcttttacgcatcgcaaaactgaattttgaatatattataacagtcagtctcattactggagttgcatgcctgcaatcaatcgaggattttgttccttgcacacatattgatatactgactcttcagagagtgataacacaaaatggatctgcaggctagctgctgagccattgatcaaccaattttgtcttttcctggatcaatgcaaaaaaaatattcagtgacaggcatacaacctgaagaaccaattaagtgagagttgatctgattaattaactgatcagacgggtcgacgggacggccgtttacatccctagaggctctaacacaccttcatcatgcatgcatatgtgctattttgtatagttatgtgtgctataagtatataatattaatctatgtagcaacatctctagatcaggtcctagctatgatatgatcttccaggtatatattggaattggagtgagagagcccaaacatgcactgttgtacagaaccaaaatacaattgcaagtagctacatcatctataattcattcatccatatatctgaaactgcaaggaggctgctggctagcttcctcctctatttatacacacacccctctcacaggcctccacttgcatctctctctctctctctcccaattatatttgtagagagagggaagaaaagaagagaggggaggagcaatggcagggtctgaggagaagaaggagatgcaagaccccaggacacaggccatagcatccaccattagagttgtgcccaacttccctaagccaggttctctctcctctcttgcttgttgttttttagcttaattattcttgcatcctctcttgctttactgtgatttcgagcttagttcttgcatgtctcgctagttaattcatgtggttttctagctctgtcttcttgttttgaaaccgaacgatgttatttcttttgagtataaatatttttcagaagtattatgtatcaactggttggcttcttctttctgatcctttttttcagcatatatgtgctcataatctcatatatacatgtgcaataggggctgcaattctgtaaagaatattgaccttgggggttgcctttaatttcaagtgccaaaatctgtgtttccttgcaaaggtccccactggtactattgatccttgcctcgttggttctttccttcctttttttgtttattggttctgaacccaaaaactttcatgaatatagcttgtttcttgtgtgactttatcatgagctttttgcagcttgtaacctataaccaaatttctcacattactacaatttataggcatgcacatgcatggtttgagcatgcacatttaccacaaaatattgttgctgcgaactgatcttcctttatttttaaaattatttttcctgctatattatgtcatgaagacatatttaatcttcctattgaggtgaaactctcactctattcaaaaggctaattatgtggatatttcgataagcgcatccatcgtgatgatgaaggtggtgtgagcaaaatgttgtgtattcgagacattatgattttccctttagaagtcttttcccactctatatatatatatatatatatatatatatatatatatatatatatatatatatatatatatatatatatatatatatatatatatatggaggggtatcaanagagatcgcgcgcgcgtgcgcgcgcgctctctctctgcatttttctcaacacacatctcatcttcccttgcccgcccaaatttaatttatagaattcccacaaatactttggaagagttttgtggcaattatttttttctagaaaaaaaatcgattgactagatctgcgaattaaatcaatgacacatccctgcagaagaaaaggtctatgcaatacctttttttttcaggttctttcataatatttgtttttcttgatgaaatgtgcaggaataatgttccaagatatcacgaccctacttctaaatccccctgtgttcaaggacaccatcgacttgttcgttgaacggtacactggcaaaggcatctccgttgttgctggtaacatataattgttttgttttttatctcaaaaaattgaaaaaatcaagatttatttgaacttgtgcgctttgtttattcaagtactccatccgtcccttaattaatataagggattttgatattttgcttgcactgttttgatcactcgtcttattaaaaaaaattgtgcaaatataaaaacgaaaagttatgtttaaagtactttgagtaataaagtaagtcacaaataaaataaataatagttttaatttttttaataagacgaatgttcaaacagtacaagtaaaatgtcaaaatctcttatattaagggacggagggagtagtaactaatctgatctttatctcaaaaaaatatcagatcttatcaaatccattgaaatatataatttatttttttaatactaagtcagagttattatttatgaagatccaaatatagttaattaaaagcgtgactttgacaggcacacgatgggtcgattgaaaatctagccaagttgtacagtacaatatcttttacttgtcgttttttatactgacccggcctccaataatacatactcctaaccgttaattacctacttattactgtagaaaatcggtaaagttcagtagtatcgaagtaatttcatggaaaaatctaatgacatgattttcatttgtcgattccaaaaaaaatgctaagtcaatttaatttataagattaacgaaaataattctaaaatgacaaataaattagagagagagagagagtgtgtgtaagatcagagcgagagagattattcgtatgaggagtgtcacagtcaaatgtacagagaaatgaagaataatgcagcagtagtaattgactacaaaacaggaggtttggcctctctgtctgacccttttgtaaagttcgaaggcttccagatgatatgacaaaaatatttgcctttccctccacttgtttgtgcctgttggacaaatattttgag

SEQ ID NO: 6264 - DNA, 4911 bp, Oryza sativa
tcgatcgttctcgttcacgttgtcgcggcaacgtacgttgacgtgttcgttctcgctctcgttcgttcgatcgttctcgttctcgttcgttaacggcggtgtggcggcatcggggcggcggttggcacggcggcgtggcgacggcggcggcggcgtggcgttgtggggccgtggcggcggcggcgtggcgtggcggcggtggcgtggcgtggcgtggcggcggcggtgtggcgtggcggcggcggcattgcgcgcgcggcggcgaaggcggcggcggcgtggcgcgtcgtcgtcgtggcgcggcgtctcgtggcgggcggcgcgacggagagagatcgagatcggagagatcgagatgcatgaagggagatctggcggcggcggctctcaccccagagatgcggcggcagcggaggaggcggaggcggcggcgaggacgacgagctcgagacgacggcgagatacggcgtcgtcggcgcggggatttgccctaggcagtggcggcgaaggagagaggccgagagagatcgatcggccgaaaacgtttaagtgttggtgaagaagacgagggcgcaccgggaatatatataccccttgatctttactcccggttgttctcaacaaccgggagtaaatatcttatcccgctatttcgaaattctttttaaacccggttagggttaagaaccgggactaaagattatagcactgcatatgattttcgcttacatatgtgtttataaaatagaagttaatgcattaacattatttaaagtacaaagattaatgacaattacttcgaaaaattatttttggctgtaataaattaagtggataaatcgtaataagcaaatataattaataaaaattccaataatcatatatacttagcatatatatgaatgatattattatattggtaaaaactctaattaagatatgtatgtacatactgcatgatttaaaattaataaaaattttaatcatcatatgtacttagcgtaggaattatattaaattaaatgctaaaaactctaattaacatatgtaaatgccacatgcatgattttaaccttttaaaaattcgaatagtcatatataagtagcatatgaaagatagtaaattaaattgtgaaaaactctaatatatgaatgatagttttaaagatatattaaatttaatacttttaaaaattctccagtcaattataattagcatatgaatgatagtaaattaaatgttaaaaactctaattaacatatgaaattgccacttgcgtgatttaaaacttttaaaaatcctctagtcaattataattagcatatgaatgctagtaaattaaatgttaaaaactctaattaacatacatatgaaattgccacctgtgtgatttaaaacttttaaaaattgtaagtatcacatataactagcatatacatgatttaaacttgttgaaacctctaataatcgtgcgtaattaacatatgccatacatcaattgatttatatggataatcaatacatccaaaatagtttacatcgtgtacacaataattacggcacgtactttctcctcactattgttccctccttgtgatcgctgcgtgagtaaggggtgtcttcatttgataggaggatgctagggtcaatcgtcaccgtgaaagggggttgcccatccaactgatcgtaatcctcgtcagtcttgtcctcaactccgacgatttttcttttgcctgggagaaccacttgacgcttaggctcatcaggccctctgcccttctttcctttgctagacatgtccttcacgaaaaagacttgcgttacatcattggcaaggacaaaaggttcgtccgagtatccaaccttgttaaggtcaacagttgtcatcccactgtcatcaatcattacgcctccaccagtcaacctaacccattggcaccggaacagaggaaccttgagaggaccatagtcaagttcccatatgtcctcgatggcaccgtaatacgtggcagttgttccatcgtgtcccatggcatcgacacgaacagcgctgttttggttcgtgctcttcatgtcttgggctctcgtgtagaatgtgtacccattgatctcatatccctggaatgtcgcgatcgacccagacggtcccctcgccaggaaggcaagttgttggttgatcgactcgttacccatgagatgttgtcgtagccacgcggggaaagtatcaatgtgatgccgtgtaatccatgcatcggacttaccgatgttcctggcgcgaactagagccaagtgctcctcgatgtaaggagctaccaatgaagagtgttgcagaacagtgaaatgggctttacggaataaattgttgtctaccgtcgttattgctttccttccgagagttccctttccccgtagtctcccttcatggcgtgattcaggtaccccgattgggcgaaggtcttcgataaattctatgcaaaatttgatgacctcctctgttccataacccttggcgatgcttgcctctggacgagcacggttacgaacatacttcttcagaacgcccatgtacctctcaaaatgaaacatgttgtgtaggtacataggcccgagaatacggatctctttcacaaggtgacaaagcagatgcatcattatattgaaaaaggaaggtggaaatatcaactcaaaactgacgagacattgcaccacttcattctgaagggtttctaatctatccggatcgatgaccttctgcgaaattgcgttcatgaatgcacatatctttgttattgttgcccggacattgtctggaaggataccccttattacaactggtagcagttgtgtcatcaacacgtgacagtcatgagactttaggtttgtgaacttcttctccttcgtgcttattattcgcttgatattcgtggagtatccagacggtacctttatgctctccaagcattcaaacatactttccttctctgccttgctaagagtgtagctggctggactcaagtaatggcttcctttctcctttggttccgggtgaaggtcgccgcgttgttccatatgcttcagatcattacgtgcttccagtgtatctttcgactttccttatacacctaggaagccaagaaggtttacgcaaaggttcttagtgaggtgcatcacgtcgattgcgtggcgtacgtccaagaattcccaatatggtaactcccaaaatatagagttctttttccacatcgccgcgtgaccatcttcgctctctatatgctggcttccaggcccctttccgaacactactttaagatctttaaccatagcaaacactgttttcccgctgcgatgtttaggcttcgtacggtggtcggccttatgttcgaagtgcttgcctttcttccgtaccgggtggtttgctgcaaggaatcgacgatgacccatgtatacaaccttcctacagtgcttaagatacgtactttctgtttcatccatacagtgagtgcaagccttgtaccccttgttggactgtccggataggttgctaagtgcaggccaatcgttgatggttacgaacagcagcgctcgtaggttaaactcctcctgtttgtcctcgtcccacacggggacaccttccttcttccacaactgtttaagatcttcgaccagtggtcttaggtacacgtcgatgtcgttaccaggttgcttggggccttgaataataatcggcatcattatgtacttcctcttcatgcatagccaggggggaggttgtagatacacatcgtaacgggccaagtgctatggccgctgctcatctctccaaaaggattcatgccatccgtactcaaaccaaaccgtatgtttcgtgcgtcctttccaaattctttaaattttctgtcgatgtttcgccactgcgaaccatcggcggggtgtctcagcatcccgtcctgttgacgctcttcagcgtgccatcgcaacattctagcattccccttgttcctgaacaaatgccttagccgtggtattatagggaaataccacatcaccttagcaggaattctcttctttgttagctgcccgtcaacttctcctggatcgtcccgtctaatcttgtatcgtagtgctttgcaaacagggcatgcttctaggttctcatactcctcaccgcgatataggatacaatcgttcggacatgcgtgaatcttatgaacttccagtcctaacgggcagactatcttcttagcctcgtacgttgtctcgggcaatttgtttccccccggaagaatgttcttgacgagtttcaataaatcgccaaatgccttgtcactaaccccattttttgccttccattgcaacaactccagagtggtatccaactttttgtgcccctgctcgcaacctaggtacaacgaagttctgtggtcctccaacatcttgtccaatttatgggcctccttttcactttcgcagtcctccctggcgtcctgcaacatttgaccaagatcatccgcaacgtcgttaccatcagcagctatttcctcctcgcccgtttgatttccttcaaatccaacatactgagcaaagtccggaatattgtcgtcttccacttcatcttcttccatttcaacaccttgctctccgtgggatgtccaacaattatagcttggcatgaaccccgactcaaacaagtggaaatgaatagtcctggatgcagaatactccttctgattcttacacttattgcatggacaacaaataaaacccctttgcctgttagcttcggccactctcaaaaaatagtgcacgccgtcaataaactctttggaccgccggtcagcgtacatccattgccgatccatctacatgagtcaaaaaaaccccacacaaataattattcttacaataatgac

SEQ ID NO: 6265 - DNA, 39023 bp, Oryza sativa
tgacgccgttgacttttttaaacatgtttgactgttcgtcttattcaaaaactcttgtgaaatacgtaaactatatataaacataaaagtatatttaacaataaatcaaacgataggaaaagaattaataattacttaaactttttgaataaggtgaacggtcaaacatggttaaaaaagtcaacggcgtcaaacatttagggacggaggaagtagttaccacgaggaggagggagaggatgatctggaggctgatctgcggcgtgccggggctgagcccgcccgcggcggtggcggcctggaacgcccccgtgagcgccgcgccggcgagcgacgtggcggagcagagcgtgaacggcgccgggaagtgcaccatggtggccgcctgcagcacggtggtgccggacaccaccagcaccgcgcccaggaggcacgcgcacccgacggcccagtcccccccgccggcgttcgccgccgccgccgtcgtcgtcctgtggctgctgctacgcgtggcggcggcggcggcggggctctgcaggacgctcatggtgacggcgccggcgaggcacagcaccgtcccggcgatcttggccctcgtgtaccggcagctgaggtcgaccctctcgaagccgaggcacgcggcgacgacgaagatgaagaccggggcgaggttgggcatggtggaggcgatggccggcgacgtcttcttcatgccgtgcagcatcagcgcctggaacaccgtcaccctgcagccaacgacaaggatcgatataaatctgtcatcagacatgttttgcacaaaatgtgataataatcgtttgacgggaaaactattttaatctctcaaggggatatccctttatttttttcacgtcacttaaatggttgtgataaaaaaaggtgtattaatacgcgatataatactccacaaacatacaagttcaaattcaatttatacatctcgtaatgaaaaaaaacaaattaaaccacaactagttaacgtatatttagagtcaaatttgtttttttcgttgcgagacgtagaagtttaaatttttttcttgtatatttatgaagcgatatatcacatgttaatacattttcttagtttttgtcataatatttaagtgacatgtaaacgatgtaaacaatgagaggatatattaaaatccacttcccgattgacatgttatacatgcataccctccgagggcgagcaagaagaggcggagaagaaggtggttggcgttgaggtgcgacggccatctcttcctctcgaggttgatggcgaaagggagggtgaagaggcccgtggcgaggctgccgaaggtgacgaggaagagcgggtcgaggccgagcgccagcaccggcgcgagcaccaccatgtacgccgcgcccgcgagctgcaccgccaccagccccgcggagatcgccacgtcctcccactcccagctgcaccaccccgccgccggcggcagcacgggcagcagcagcggcaccgccgcgtcgtcctcgccgccgccaccgccggtggccgctggcgccattggacgacgcgcgcggcaggcaagggcgaagagggcgcgcgcgcggcgcacggcaccaccacacgcccacgccacgcgccccggccgtggaacggaaacccagcggtttcctctttggcgcgcgcgcgcgcgtgcttgtgtaggtgcgcgctttcgtccgctcgctcagcccaccacgttgctccgcaccgcacgtcccgcgcgcatgcgcagtatcgctcgccgctatttttgggcatcctccccgtctagccctcttttttcttcatcatgtatatatgggatacagttgataaacagttataaagagcctgtttggcacagctctacagctcagtcaaaaaatttcagctctacctagagtagagctgaatgtacggccccgtttggtagggctccaaactccaactcccagctctaaacttctactctagttggagctagctcctattggagttgcagacccatcaaaagtgtttggcaaatttttagctccagatctgaaaaaaattgaaaaaaaagaaaaaaaaaggaatcctcgccgccagccggccagcccccgcgccgctgccaagcccgcacgccgccgccagcccccgctccgccgctgagaacgtgcgtcgccgaccagcccgcgcgccactgccgaccccgtgcgccgccgccagcccacgctccgccgccagcccgcgcgccgccgaccagcccgcgcgccgctgagcccgaccgccgctggttgccgccggcgccggcgccgccagcccgcccgccgccggattttgccggagaagatgggaggagagagaatgggaggaggagtttagggtagttcaatggcatttttgtgtaaatacataaaaaattaaagggtagtgggtcttttggggtgaagtggagctgtggagcagaaaaacctagctccatccccgtagtacaaaattgtggagctgctctgcaaactccactccagaaaacagagaatttgtaccgtttggcacaactctagctctaggtaagttggagttgggagctggagctgtgccaaatggggtcgtactctctcataaattaactagagagttggagttctttggcacccgagctctatggtcgctgatgcgttggccaacaaccattgaatccgcgatctccatggctccttgggagtccaggcaatcctgcaatacttgcagatttggtcgtcgttgtgaacaacaactctctaagagggtcatcctgattctttcatctagaggtgggagagttcggggtcgtactccacccggtcggcttaccttgacctcttctcgggcaggatctcgtttcggcacctgccaatctagcgatcttttgccccgccccgatgtcgctacttcatgtggctggtcgctcaccgacgctgctggacggctgaccgactagagaagcatggactgccgcacccaacctattgtgccttctgcgaccaactggaagagacaatcgaccacattctgattgtgtgcccggagtccctccagctatggtggactatcctttcgagcctcggtctcccttagtgtttcccctctggcactaattccttccatgagtggcactgctcttgccggctcaaagttccgagggagcgtcgtagtgggttcgatacaattgtgactcttggcgcttggtccatttgaaaggaaaggaacaatcgtgtgttcaacaaccgttcccggtcctggcctgaggttgtcacagccatggcgcaagaggccgccctgtggcatcttgcccatcccatgttgctagtgctccctagttagcgtgtttggtcgttcggtcgtcacattgtaatagcgagagtaggcttaagtgcttgttttcctttttctcttttttctcactctctcccttctttgtttgccgtttgtataaattttattcctcttaatacaaaaagtacgcaatccttttgcgtattcccgaaaaaactagagagttggagttgggtttaggctgctccataactcctccactccagacctaactcttggaactaaaattaggagttggagctctaccaaacaggaccaaaagataagcaattataatagcgaatttgttatctgtattatgaatgacttagaatgagggatactgaaaattagaaaaaaaatccaaaacaatttaaaatgaagtttcaaaattctaaaatcaattctaattttggttgcttttggtaagccaacaaaccaaattaatttcagaaaatcatatatgataaaagttgcacaaaatcgaatatagggcttgttcagttcttatccactttctacaataccaatttactttctacaataccaaaattggcacattttcgtatcgccaaatttcagtagcgttggttgtgtttagtttaatgtcttagactttttaatagtgggaacttctagaattattaaagtttggtagtatagcatcaataataatgtgtttagtttgttgttttactaaaatttggtattgttgaacaacaaagtgaacatgcccataatacgacttgtggcataggttaaaaccaccacgacataataatgacttgtggcaacatcaaatattgcggtgtcaaaggtttaaaaaaaaccccgggtattatcatctggtcaaacttttgtaagacctgaattttcagatcaacgactagcacatgcagaagcagacttccctatgaaaactgcgcctgaaatgaagtactgtcatatagcctaacctagtcatacaattcataacaatataggattagaggttgcctaaaaactaatcaacagcagcctagctaatgtcacagaatgacagcacggaaaaacagggccacatgttccaagcaaaaaacaacatcgcagtcgatagcacaacaggttacaggtgagcccaacggatgcttcgtttcagtggatgcacagctttcttgccgagtggagcagacagacatgctctgataccttctctcttgtgcctacttgggtttatctgtaaggctgacgagggatttcacgatgccggggctgattctgtctgcaagggcacctttctctgatatcacaaacgatttctccttcacaaagctctgtagcttcttggtgtcatagtctagtcgttcttgatctgcatcattatgaaaatgaagacaatgagttaatttgacaaaagaacaagttatgctcctagatgacacaaccgcaagtgaataatttttttttaatccttgctgcactttaaaatggacaatagaggccttcctcaacagtattgaaaatagatcaagagtgtacctttgtctagaacagtgtgggccacatgaaatggaacacgagcaaagatatctgatcctggaaacattaaccatgtatcttccttggggtcatgatctccacatgttgggcatatctcctttaccagctgcttgccagaggttccttccaaccctttcattatgatttcaaagggggtcggaacactagttttggttgtcttggctcttttccggagggctgtcagtgcttccctattaccattccttatcctatcgttttccactaactggttatcacagaaaaacataaagttatcagtatcaatacctatctaacatattaacaagaaaaaggcaagtcggcaactcataaatacctgatgccttgccagaagaagctgctctgcatcagtttcaatgtcaaccagtgcttcttgaagttgcttcattttaggatccattatataactacaaaacaatgccatttaatttgaaactgtaagtgaatcatgtaacaagaattcatgaatcttcctaccataaagaaatgtacagtgatggcaggggcaggcccaggtttttcaacttgggtattcgaaattattagagatagaaaaaattttccaacccaaaatctaatagttgtataatatgtaacggtataaacatgatttcataaagtcatagatggatagaattgaccataaattgaatgcgttaagcatattagagtatagtactaaactattaaatgacaaaacatatcaaatttatagagcatacaaaatggcaaaatgataagaaatcttataatttaaagaactttccgtttcttaatattttgaaaatgattgacttggaccagttggttcttgagttctcttttttacagcagctttttctaaaaaaaatttagattaaccatgggaccatttttttctcttcatgtttcaaacatacaaacaacaatatcaaagagcaattgagcaaagcagcactggtttctaaatcctaatctatatagttattcacaagctaaaataaccaatatacttcagtctgaaattctgaatcagagaagggaacttgtaaaaaccaatgatgcactagaatctctatggcttatcatcaaagaacaagcataagacaatcaaattcctgaaattactttcaactagattactagaaatctagaatatctgtggctcatcatttagctcatcaagaacaagcataagacaatcaaattcctgaaattactttcaactagattactagaaatctagaatatatgtggcttatcatttagctcatcaagaacaagctacaagcaatatcctcagttagtcaattcgacagttcctcttcctcaccgctgctgcagttctgcgctggccggtgaccggggaccgccggtcgccggaccggggaggcgccgaggcggcgacgcggcgtcacgacagcgtcagcgggcgcgacgcgcgagtgcgcgcggcggccggggggccgtgccgccacgggcgacggggcgcagggcgagtgggcgaccggcgaggcgggcaggcggctgggctggcacggcgacggcgcctcggcctaggcgcccggcggctggcggctgggggaggtgagaactcaactgagaagagatagggttagaaatgcatttgggctttgttctgctattgggccaataggcctgaaatggtgggtggtgggagggttagtaatcctttcagtttgggcttcttttgagttttgaatgtgtatatgcattttttttcttttttcctatatatacatatttttttagataatggaatataatatcccggcctttgctcaaaaataactatagccaattattacaaagatccacttcagaagagagtgtagttcaagacaagttgaacacaccaaacaagagaagagaggacccaaacagagaaaagcaaaacaaaatgtggagctagaaggcctcgtccaggcctaagactgaagttcgaagccaatgcatagaccaatgacaatatccttgtacgaagaggtttctccaaagcggtgccccaaggaggatgcgacgtggatcgccgccaccgctcgttcggaaccgaagcaaggttttcacccggagaatatggtagggaaaggaaatgggtatgctaaaacaacgcctccaaggaggggaacgacgccaaacagcgtcgtcgttgtcagccggccaaatggctcagcaaggctttcgcccacgattccctgtccaaacccacaccaccaatccgcacaagaaagatcgttgtcggtcaacaacattgtcccttcagcgattcggcaaaggccacagcccacaattgttcccaccatcgatggcgcgcccgcacccggactcctccttccccgccgccagaccccttccccgcctccacataccgccgccgacgacgatgcaccgtcagccggatgatggcctttaaccatcgccgccataggtaccatcgtcgacagccgccaccgccactgccacagccaccaccgtcgccagccgccaccgtcagccaccatcgccaccgccacggacacccctgtccagccgccaccgtcagccgccaccgtcgctagccagcgccgccagacgccagccgtccagatccgaccggggtggtgcggatcggaggtgcagcgcgaagcgcgggtcgccggcatcatggaggaaggcatcacgggcacggtgttcacagccggagcattgacgagggcgccgcgccttcctcgtggtggcgaggttcttgacgagggccggcgtcgcggcacacgccgcagtccgccgccgttgtcggcaacttcgtcgttgccacatccgccaccatcgccgccgctagccaccctcctgccaggttcgcggagcggtgccggcgtcgaccgagcccatcgccggtcaccccggccaagcggggagaccagatctggcgacgcagtcgcccgtcgctggagccgcggagagccaacaccgagcgccccaccgccgcgcccaacgccgcgccgtccccgtcaccacgacctcgccgtcccgccgccatcgtcgccacgcccgcgccggggcgaggtggagccgaggaggatggccccgccgccgccatcccagcgcgtcgcccggctttgccggcgacgagctccggcggcggcgaagcacagaggagggaggaggaggggcggcggcggaggctagggttctaccccctaggggcggcggaggctctttcttattggatctctttcatacccttaccattaggtttccttcaggtggctggttggtttgcttcaaaatatccattactagcaaatatgcccgtgcgttgcaacgggtgaatatcaaataaatatggattgtcaatattgcttgcatacttatttaaatgcaataaaagcagatgcatcacgtccaataggaaattgctctgttttttttttaaatctgggtgcatatatgagtaacgtcgagcgagactcttagtatccatactaaatattgggtgcatatacgagtcttgcttgtgttttctgtttttctaatataggttaagaagatgtttgtatcctacttccatgtaattcttattcttggactttgtaattcctgtgttgtaattcctaagctatgtaattgtatctaactcggtttacgcttcaatcaatccttcaacgtgcgcacccaaataactgatcgggaacggtggtggaaaaaaccgggctcaccaaaaaaaaaccgtgaaaagaaatcgccacccacgaaaaaaacggtcggataaaaaaccagtccataaaaaaaaacacttccaagagaaaaccgcgtgcggaaaaaaaaccatcgggtctcgcacatacggacgaaacggagtgtacaaaatctcaaattggtccatacgtagcaaatcttcaaattttataccgctttacatattaggaaacggatgtcattataaaaaagcaaattattgcacaacaatttcatatatattaaaatgatggttcaaagtgattaaaaattagttatgtaaacattaaatgatttttagcgaaaaaaataaaggcaaaatgaataaggcccgaaagctagcgacggtccaaaactgcgtgcgtcggcccgataatgcacgaggctcggccagtgcggcccgttaggcaaggaggcccttcatcgcgtgcggcccgtatcgtgtgcgagcagccgagtagaccccaggcaagcgcgagcggccgaaatgtcggttagcagctaagcaggccgcgtgcgagtacgtgcagcccagatacactcgcaggcccattatccagtgtcgttgttgcttgcggtggtgtgaggagttttttttatttttaattttttttattaaaagttttacaaaaataatttttcattttgaaaattgacagaagtggtcgcctaccgccctctgggagggcgatttttaaaaatcgccatcccagagggcggcgaaagtgacgtggcagacggccgtcgcctccgttcgctctcgggcgacggccgtcaacgaaatttgcaggcggcccccttgccgccctccgctagggcgattttgtactgtgcggggggccgcctgcaaatgggcagcggggggcctggaattttgcaggcggcccccttgccgccctaggggagggcgattttatactgtgctttatatttttttataaatatcaatagttatcaaatctttttatgttgaaaactatacaagattaaaatctccaagactggtaaaatacaattttattattttttagggcctatttggaatgttacggtacaaatattttgttagtgccaaaatataagcaagttttggcactaacaaatatttggtaaggtaaaattgcatttgatcatatttggtttgctgccaaaatgtaaaattgtagtgaagaatgttctacataatctcaaatctagattacgtattaccaatgaataggcttcaatcgaaatcaaacacaagtactattcaaattaccaaaatattggtagggcatgtttttggtagcaatccaaataggcccttagtcttacgcatacaaaaaatcaccaccataattaaacattgtaatgataagatagataagaagtgccatcgatacacggtacaaatttgtcgatcccgacgaatcaagcatgcggtaacctatcggccccttctaggtcggtcagaatgcattgcattctcgtggtccttcaatcgttgatactctacttgtgtttctgactctgttatcttctggccatgatatgatggagtgacattgtcgatccatcgagtaaatccacccatccttggattgccctgtaaaaatagtaatgttattcagtttgggtagtaattttgtgcaaatcatagcgaattttgtaaatggttagacatacaacgaaatcgttgtctacattggggcagacaaaatatctccttcgaaatgtttgttcagcaaaggatgtagccacctgccagcgatctctgcacccacactttggacgctcggaccatttaggtaaccctaatggattgttcctccagtttaagcttgcaatttccacccgacgttcgtactccatccaagcatgaatgaactgtatggtcggttcaggttgcgttatcggcccgccacttgaagtaactctgactgtgtcaatccattgtacgaattgacatttccttacatcctcctatgtacatccattttgggatagttaagttaatgatagtactgaggagtgatgaaaagaatagttgtaattaccacgaaatcatcgtcgacaatgtttggacacacgaaacacctttgtcctcgagttcggtgccttacggaccttatgacctgacaacggtcaccacaacgacactccggtcgctcacgccacgtgggggagtcctaggggatttacgtgccattctaaagcctcagcagcaattcgacgttcatgctcatccttccgccttaggtagtccgatcttgtttcactacgtgggtaagcacgggttccgtcgttttgtgggttctccatgtctacccactcgatgaagttgcacattggacgatatgtctgcgtaagatgttacaattgtgtacgaagaagttagtttttttatccatttgaacttcgaatagatgaagcatacctgatcaaagttcgcgcattggaagaatctcctgccccgagtttttatcatgagggaagacttgagtatgcatccatccccacaatagcacaaaggacggtcacaccatggtggaaaccaaccagcaaaaggatcgcttcgccagttgagacgatcaaggaatggcgcttccattttcgtgtgttgtgtgctagtgggaaagaagatatgaagaggttgccttcagattgtcaattatatagcgtcgttttcactgcaatatatgtgaactcaatgagatacattattcattagatgtgacaagacgatcacgcgtgggcgtgattcactatatgtcaacaggcagcgccgaaagttgatagtgacaactcgagctgcctcttttcatgtatgctgttgtggactgtgcgcgctactggatctgacactaccgtgaagcgccgaaagtgtgttgtcgtgagcataagttgttctagcaccatatgaatgaaaagaactatgtagacgagacaaacacaagtagtactgcagtagtaatagcaaaagtagtactgctttacaagtttgtaagccaaaagaaacggtcacataaggactgaagaggtagaacactactgacgaggcctcttacccctgtccctcctaccctgcgccctaatgtgcccctgggagtacgtgagtcggtccgggggtacggcacggccaacccgtcctgcctgtacaggtgtgacctctggctgctcctgagtgtgcgcctctggagctcctccaagctgagaggagcctagtacgtcgtggtggtgtgcaccgtgcaagtcgtcgtcgtagaactggctagtaggaccagtcctaccggcgtgagacgaagaggccccagtaccgaagatcccggctgcaaatcctgctggacaaggaccatcagtttcatacaggtatgtaatagtattaataaaaagtaaagtaccgtgtgggcgagggatcgacgctccgtgagaggaagagctggcgaacgcgcccgaagaggtggcgaacgcccctgcggagctcgcggaagcgccggtcgtgcctgcgaacgcgctcgaaggcagacgaggtcctgcgatgaggaaacgtgcagttaaaacatggtgacatattcgtgcaaaagctgaaacaaaaatgaactaatctctgggctaaactgtaccgtgcgaaaccggtgctgtaggtcgcactgctccgaagctaggggcgctcgaaggcaaacgaggtcctgcgaggatggaacatcaagttacgacggggtgatgttttcgcacaaaaacagaaacaaaacttaagaaacctctgggctgagcagtaccgtgcgaaacaggtgccgtaggtcgaggtcctgctccgacggtaggcgcgcgaggccgtggttgtaccggaccagctggaggtacgacgtccacggcgctgcgacaggagaagacgcgcatgaccgcacacatcttctcctgcatccggtcgaaggtcaccctctgctcaacgtcagtcaagtgcaaacctctgttcaacctcacttggactgcggtgatatcggcactgatatcccgtgcggcatcagcctatgcaagatggaaataaaaaattcagtagttgtcctatattatgcaagataaatgaaataattgtaagaactaatacaaattcgacgtacccccacgaagtagtctcggtcacggtgcgtgggatacgcgtccgtgacagcggcaacgtgcggctctggggtgtctggagtgaaggtcacacgcgcacgagtgcgaagaaggtaccagcgaaggtagtcacggtagttctcctccgtgtgtgggaagagctcgttgatcacctcctctgtagctaatacccagtcgtcaacgtactgctgtacacgtggagcccaaagtgcgcctgctagctgtccccgtcgagtcaacctgtgaagagaggtaaattatatggctcgatgaagtaattatcataaaaatttagaaatgaacaatccgaactcacgagtggtcggcagggaggacggtcggctgcacgttgcccggaaacacctgcctaagtccgaactgtctcatcacacgctgcgggcagtgaggctcaacgaaaatgtcgaacaccatcggcaggatggtgagccagtaagcctggtcgcgtgtgcacaaggacgaaagtcctagcggtgctctcgcagcgacggcctcttctatgtacggctcccagatgacgtcgctcggctgtagatggtcaaactcgaacacgaagtccgggtaacctcgtctcacctggacgtgagcgtaacgacgctgcaataaacatgatcagaattagacatgttatgtgaagaaaaaaaagaagacgactgataaacttataacgcagcgaagttgcactaaccccacgtcgacaccagtaagtccccatcgtgggaccgtcctctggccactgcgcgctgtgaccaaccccgtagggtgcgctgtccaccactggtcgacctatggcaaacctctcggctgcccaaagctgaagcaacatagggcagccagcgatgatcgctcccgcgtcagtcttcgtgcacgcctcacagagggcacggtacgtggctgctagcacggcagaaccccagctccactgcggcacgtcctgtggctgagcatccgcgatggaccgtgcgtagtggaccagccggaagtccacagcgtggccgtgggtgctagtgaacatcacccacccgaacaaccacaacaggtacgcctcaagggagcgtcggaccgagtaatcatcagcgtcagggtgcagaaggtccgcctacaattaagaatgaaatgttagtacaaaacactctgttgatcgcaaataagcatgtatgataataacaacttatttacttacagtgaactggagcaaccaagccttgctaggcccgactgtagagtacggaggaagggtgttggccggtcctaggtgtggaaggcgcatcacctgctcgaagcgcgcagtgatatcctccttccacccaaaaacaccgtccacgggaccaactggtgctcccgccagcggtagcccgagcaggtacgacacgtcctgcagtgtcggagccatctccccacagggaaggtggaacgtgtgcgtctcaggtctccagcggtctaccagagcggcaaggagtgaccggtctgcatcccaccgcttcgctgggtcacggtcgtccgccgccccctcaacaagcctacaaagtggtagaaggcctgccgcacgcaaccagtatagagcaaacttcaaacataagtacaacacaaagcaaagttgagttgaaatgtgaacatacgcgtaccaaggaacgtgacgggggtcgacacgcaaccactcgcgcgacgtgcgtggatggaaggtgccgagctgtgcaccctcgactgctgacaggaacgagcggtggttcctgtcaatcccacggttcaacagcgccggtgtgtcgtacgccatacctgcatcaaatagattgatcagaaacatataaataattagttcaacataagtaataaatgttcataagtgaattactaacacatattaaacaagagtacaaacaaacaaaagtgtcaccatacggaatatttctaattacaacaataactgcagttacacgatatgagtacttagtccgaacactcatcacgataacattatgatacaacaccgaatagttcgcaataccactagtataacaatagtcggaggtactcattacaacaacattcaattgaaattacacgatagaagtatttagtccgaacactcatcacatcacaacagcattttatttcctaaatcgatagcattgttacaccatggaatcgcctgctgcgcgacgacgccttggccttgcgcgcctgcttgttgttccttcaccaggtggtcgcctaccatcacttgcctgtccagatggactagcatctgcgccgcttggaacttctgcattcttcgggcatttcttgtaagtatggccgcgcagatcacacttgctgcagcgtaaagtcctcccacctgcttctgactcatccatatcatttctgatgcgtctagtttggcgtcgaccctttttcacccttaacttagatggatctggaacataaaaaacttgggcactcagcgttgtgtaagatcctgagatcccgaacccatatatctcctcactccatgtatgaaagattgcttctttcctgaaataatttgagacgtacacattgggagatatgccacaatcaccggcagcagcaagaacgtgtgagcaaggaaggtgatgaagcttcggcttcatacaactgcaggtacatccaccatccgccttcaagacacattcctgcacggcttgcttgcgatagataccacgcctgctcctatcaacacacattatttcataccgatgcacttgtgtgccttgagcaacaactctatgtctccgtgcctttttgattttatcttccatgtactttgtcactacgttgctaaacactatgttgttatcggccatggacggaccaattttcttgtatcgatccctaaagtacgcttgcgtgccgtgaaggatgaattcaataatagcaaccaatggaagtacccgaactcctcgcattacccagttgtacacctctgccaaattggttgtcattatgccataccgagatccatcggtgtcgaacaatagagaccacttctccttaggctcattctcaatccactgagtgaaatttctgatggacgaccctgacctccttctcattgttggtgggtcatcatgtaatgcaccaagaggtatgggaggctcgtcaccttcaacttgtggtctgcgagattgctcatctgtttgcttcgttgtcaactcatccaacttgtcccacaactcattaaatttcttctcttggttctgtgcacagagcctcttaaagagctccataagatgcttattcttgaattgcttgtagaaatttgcacccatgtgacgcatgcaccaccgactccgaacatcaggccacttagctggaagtcccttctcatcccaaccgttctgcaagtagtcaatagcccgcaacatacccgcatgacgatcatgtataaggcaaacgttgggcctcatacgcaccactgcaatgtgcactctctctaggaaccagtaccagctttcagtgttctcactctctacaaatgcaaaagccataggtagaacctggttgttcccatcacacccaattgctgtcaatatctgacctcggtatttacctgtcataaaagttccatctatgcatagaacaggtcgacaatgcacaaaagcattgatgcaagcacccaatgagaaaaaggctctttgcagcacactctttgttcgatcatcaaccgatgtaaatgtatgtaggtcatagtaagtattattattcctctgggcaatggtggctaacaaacgaggcaaattatcataagaagcttcaaatgtgccatacctcatctcaataatcttttgtttggctctccaggcctttgcatagcttatggtgtacttgaatttgttctcgatgtgcctaataattgattttggttcaaagccaatgttaccaacaacactgctgtacatctcacttgccacaaaagctgaagtgatgtttcggtgatacttctccaccccttgtaagtagcacttgtgctcggtcacaatgctaactttccaataatcattccatttacccttatatgcatggacacgccacggacaatcttccttcatgcacctcacttcatacacataatttgttgacttgaccaccctaaactctctctgcaaggaaactgcccaatgcttcaccgcctccttcatctcatccttatgagcataccttgcaccctcaattacctcgttctccttatactcccaaggtacatgatcaccctctgatataacaagttcagagaagtcctcatttgcccaatcagtggccattacatcaccttcctcatcggatgatgcgtcgtcgtccgcttcctcattatccgaatcttccctctccatttcatcaacaattataccgactctctccccctcatccgccatgcccatggcctgctcctcccttggttgattttcctcattttgcatcgatggtccaacaatatcccctgcattgataggaccctctacatcttcggtttgcattgaaacatttatatctttctcttgtaccgacacaaatataacgaggggccatgaccgttcaaaagccatttccacatatcgtctccaagcagcagtgctgtccatcggcattagttcccaaaaataaccttctgttgcacgactcactacaactgatactgacattgtgtagacttcttggtctattctaaatcctctcaacaaccaactataaattgactgaaatgttctctccgcaggcctatcgatgcccttagatgtcattacaaaatctgacagatcaacaccatctggaccaaatctaatatttccttcaccgtgaactatctgaaatgtgaccttatttgacattgtgcctgataaaaacaataactgcgttaacctcgcatttctgtactacgccctaagttacattctctacaatattgttctccaaaattctaaaagtaggttacattctccagatcaaactaaactacatcttacaattaacactactgtctatgtctcaattcatactattatattctatgctctggatctacacatatgtgctgtgtgctacagatatgctaaaatatatggaactaaaactaaaacgcaacatatatactcaaacataacatattagtacaaatgcaaaagatgtatgggagcaaacctgtgatgaagtgagcgaaccagcagggcttcgccgctccccttctgctgccctcccctctctctctttcgtttttttggatttttagtgaatataatgaaatttcagagaggggggactgggctttatagggggaggcaaaaatcgccctcccccagggcagcaagggggccgcctgcaaaatttcatgccccctggccgcccatttgcaggcgaccccccgcacagtacaaaatcgtcctagcggagggcggcaagggggccgcctgcaaatttcgttgacggccgtcgcccgagagcgaacggccgtctgccacgtcattttcgccgccctctgggatggcgatttttaaaaatcgccctcccagagggcggtaggcgactacttccgtcaattttcaaaatggaaaattatttttgtaaaacttttaataaaaaaattaaaaataaaaaaaagtcgtggtgtgagtcggcacgattgacggcgtcggtaggatattgatcggacaactgagatttcatgagcttaggacaaaacaccccattcctgaaaaacctaaccataagccatttctaccctttcccccgatttctccagcgtgaggagggaggtgatggtggcggcgatttggtagagcggcggcgactgtgtgctcttgcgcagcgggcttaggccacgcatggctccgacggaggtcaagctggcggtgtgccacgaattgatatcatgtctacctagtcgggtgcccatgtgcactaaggctgtgtttgaggagaagtagattgggaagatacgtaaaacgaggtgagcaattagtgcgtgattaattaagtattaactattttaaatttaaaaaatagattaatatgattttttaaagcaactttcatatataaaatttttgtaaaaaatacaccgtttagtagtttggaaagtgtgcgcgcagaatacgatgtgcaatctcacccaatcacctaagaacgaatactaagtgccagcgacgccaaggtgatggtggcggcggtgatggcacagggtgggctgaggtcagctatccgctcccccacctaggttcacctccgcaactgaggcgagcctcagtctcgcacgaccaactcaggcaggcacgggactggtctgggttgcatagtaaggtaggtacacggtagagctgaaaaaataaataattacacagatcgcgataaattttcaagacgaattttttaagtctaattgctctatggtttgacaatgtggtcctatagtaaacatttgctaatgatggattaattaagcttaataaatccgtctcgcgttttactaatagattctgtaattagttttttttattaggcctccaatatttcatacgacaccctgcataatatctgatgtgacgaaccaaactttacacctctcaatctaaacaacaccccctaagttagaagtattttaatgtccatagtgcaaacactgtgagcatcgactgtaataatttgttagagataaaaaatggacgctagatgaaaattcaatttagctaattaaaaaaactgattattcatctattttgcgttaagaacggtatatacggctgatattttggaaaattttacggaaaggctaaaaaactgtcgacacatttttctctagaaatatgtcgatttctgatccattagatcaactgtaggattcgtgctattttagttgacgaaaataaaattgtactgcaaagaatcgaacctaggatctccagtggcttgtccagcggccctgaccaactgatcgagcaaagattttggcttgaattgaaattacacactaattatacttaaattgcatatcatttacatatataatttagagacttacattgtaaatacactaaaattacatatgtaatttagagacttacatatgtaattgtagcacttacattgtaaatatactaaaattacatatgtaatttatgaacttacaatgtaaatacataccgactattttttttatgaaaaatatgacgccataaatataactacacccaaattttatgtgggtctcacggccacgtgtgatgcgaaccagcgaaccaaaattgtcttcgcttttctgccgaacgtgtcaagccgagagagccgcgccttgattcctccgccccgcccttatcctttccctctcctcctccgccactcgtttctctcatcctttctctcctccgcgcgctcctctcagctggcgaggagctccgatgagcaatggcgccggtgatttattcattttcttggatgattttgattcattgttgttagatttgtgactttgtgattcaatggatttgtgattttgtgatttatttggatcggatttgatctcgttcaagggggcatgggcatacgggacgggatgagcgacgcacaggtgaaaaggacacgcggtgacggaaaaaaagtgtgacggacgaaaaaacacatggtgtaaagatgtgacgaccggaaaaatgctaatatttatattagttagttatagatatagatatagatatatctatttttttaaaaaaaatcttgggtattcatttgaatacccatgaattacagtgggtccgcccctgagtgatggtccacaaatctttatatgtggtgctatatcctatccaccttttaggacgaggcaacaataggataccacaacatatttacaaaaagctgtgcagaaacttacttgcaaaaaaaaagggccgtagaaataaagaacactgaaccatacaaatacaagcaataacatagctgcaataaagaaacaggagggaatggggatttggtggtgtagaaggcgcaatccagatgcactcagagatggatctaaaaatctaacggtcccaggatgaagatcctgatctcctagaccaattttcaatatttgtgatatattttctaaaagaggatcaattgtattttgtcttagcaaggaaaatataataagataatttacttaaggagtaccatgtgtaaatcataatagaatagagcaagaagcatctagatcagagaaaaaattgaactagttcatgcatagcttggacatcagcatttactgtgcagaaaattcctgaatggatacagtagttcggcaatggccaatggggtacatccatggttctgtcttatggtgtcttcgtttattcaaaagcatatcatggtatgtgatgtcttatcatctactccctccgtcctacaaaatcatgaatcctggagggggaggtttgtaaaaaaaaaaaaaaacgatctgtgcacagaaaaaaagattgtgggccatagtagatgggaaaggagcctgccacctctctctctcctatcgttttgaccgcagaaaccttatctcctcggcttttctcgtctcgttctctcctccctaaatcgcatcgctctctcttcccccaaatcacgcccagatgcgacctcctgcctccacgccttcctccccgcaaatccctcccttctccatgccgctccccctcactccctccctgccttcctccccgcacatccctcctgctcaacgtggcggcggctggcgggggaggcgacgagcggacgccggtgttcttgcgtacatgcggcctcgggggtagcggtgacgagcggacaaggcatcggcggcgacaagcggacgcggcctcgtcggcggcggcgatcggcgaacacggcggcggcggcgacgagcggacacggcctcgtcggggttcttgctagttcattcgtcggggttcttgctagttcttgtagtatctggttcttgctagttcttgtagtatctctttttctctgttcctggctctgttcttaattgacagatgcgaggctccaccagtccacctccccgcgcctccctccgttgtgttggaggctttgctacgcggcggcggcggtggagccttgcatgcgtgtggtatactggtatgtggccgatgcttgctttgcatgctgatggacgtggcttgttcgaatgcagctgttatggtggaaggggattgacgatgggaaggacaaccacaaggaaatttatgcttgtctttttttttaccgttaattaatggttgtactttgtaatttggtgagggcatactagtcttttaccactgctgctaaagtcacctcgggtttataggaatcgtgattttatgggacggagggagtataagactacatcatcctagcaaatagcatactgctagctgataagatttgtatgttaagccaaaaaatgctgctacaagcatgacgtcactacggaacacatctctccccaccaaaaatttgtggaaaaccctaagcacagctgtttgcagttctcactataagcttgaatcagctctatctaaatatatcaaagttcacaccgatgcaaaccgatcaacaaatgaaacgatttccacaatgaattaaactacagtgcacttttttttttttacaggaatgaccaaaggaggccatccaaatgacattaagattgaggggaaaaagttacaagacagcaaattatgcatactaagtgcccagctaatagaataaacaataacaaaatagaacgattaaacctctacaaaaacaaacaacgagatttaccaactctaatagcacaaatgaactgattggttccagtaagggctaagagtagtttcagtcaatctaaatgtaaacaatcacataatcacaaagtcacaacatacgtagaaacaggataaaatcagatgcagagttgcgcttggcaacttatcatatctctaatttttttttgggagggggggggggggggaatcacaactctcgtctaacaatccagccctctctctcagcaaccacagcaacttaggccccctttgattaaaggaaattcataggaattttagaggattttatttttataggaatttttcctatatagctctttgaatcaaaggaatggatcttatggaatcctatgaaattcctatgaatgcctaatgccatgcaagttttggaggaatatcatgaggtagaacctcatagaaactttccttcgagtctttatctctcctctaattcatgtatttttcctgtggtctaatcaaacggtcattcctgtgttttgtaatcctctgttttatacttatattcctatcaaaatcctacgattttcctattcgtacgttttctcaatcctgcgattaaaggggcccttattgaggattgcttttgaatttctgttcagaagggagcaaacttagcgaagggagggccgccggtaaggggcgggtgactggggatgcgcccgccgccggcgagagaggagggtttcctcggcggccgctttgctggggctggacgccggagcttggaggcggcggctgttggtaaggcaacgcaaggcaaaggcaagcagagagagagagagagaggatgggccagatattattgggcttccaaaagaggcctgaggtgggcccacgtgacagtctcacagcccactcccctcaactccgctcttcccaaatgggcccaggcccaagcctgggtataaaagcagagctctcgccatcttctggcgcaagcctcactctcctcctccccgcttcggattccaccgtcgcggagctcggcgcgggcggagatggagggcgacgccgccggagccggtggcggcgaccggtcgagcatcgtgatcggcctcatcgagaaccgagccaaggaggtgacgcctctcactgactaaccccccccccccccgccctcccatccctccccctacacccccgcacgcatttttgcttgtcggattgctcgcctagctagcttcctcctcttctcctccaaggcccccgagggtttccgtttcgcgttctactcggtcttcgctgcgccgcggatcggcttcgatcgtgtcgtcggcctgcgtgcgtgttgtgttcgcgctcccgcgggggtggtggtcgatcggatgctgctcgggtggattacttgctctagctggtcagattggtggtggtggtgggggggggggttcgtgttatatggcgttctgagcggcttgatttgagggtttggtggttttaggatttgaggctccagctccatttccggggcgattagagcataccctgtcctcgatagtgctgctctagcggttcgaatcgagttggtgtgatgtgtacagtaaattgttggagaggtgggcacaattactgcagtgacctgctgttgcaattttttcctccactgatttggccggcactttcttacaagttgggaatccggataaccaacggtcaaaggataaagccatttccataacagcaccatgcgccatgcgggaaagcatttttatctacgatatattagttgttctccaggcttgttttgaaggagttgcaagtttcattgtaaacaggaaaattcattggatcatggtgcattggcgcagaagagagaaatttgatcaaagtgttgtagtagatcaactcataaacttattatggatgaattttttttagataatgtattatggatgaacagattgtgaaaatgatttctccattgtacacacttgttttgtggtttactaatgaacaagatcttctgagacgctgacctctctgtacatctttatttttcttgttctaagtcaagtgtatctttagttttggaagcatctcaacatttttgccaacgtaagaattctttgtagtgtcagttttggaaaaaaaaaatcgtgatatgaacacgtgtagattgtctgtgcacgtcagttgataacttgatatgcacaccatccaattcaactcaaattgaaaacatacaaacaaaaatcatggagttaattatttctcaatttctttattatgaaccaaaagatcacgaagatttatcaaactagtatttttgcaggttggtgttgctgcttttgatttgagatcagcctcactgcatctttctcagtatattgagaccagttgctcatatcacaatacgaagacacttctgcatttctatgatcctatggttgcaatagtgcccccaaacaaaacagcagcagacggtatggttggagtttcagagctggttggtaaacatttgccaacaaataaaaaggtgatggctgacatatgcaaatttgttctatgttttctcataatatgaacccactttcgtttattctaaacagagttcaccttttagataacaatggcacgtggctgctttgatgacacaaaggtataatgatttgtattcctttctgaccatttatttgcttaattgttgggtgattaactgctgcttaacatcatgcatgttcttgttttcttttaagggtgctgttatggtaaaaaatctttcagctagagacccatctgcactcggtttagatacttattgcaagcaatactatctttgtcttgctgctgcctctgcaacaattaagtggtacgcgtgctatctttgtctcgatacattgctgggctacattttccctgtttaggattaagttaataacttctgttatgtatctcccatgaacatagttgtgtattgcttcaatatggacataacgacttgacaaagctgtgtcataatttctattttttcaaagtgtaattggagcatatgaacttactatgtactacaacagtgcaactctcaaagcaagtacttactaaattattttacaatttgtctgttacttctcatgtcatttcataggagttatgcctaagcacctcatttgatgatactacttactatttatacaatgccccagaatatttgttgttacttagtacattgaaatggaaactgagataggattttcaagttggatacttggattctataaagcttatcttggatcatcaaaacatatttctcatattgttttttttggtcatagataactatttttttcctcgtattggacggaaatgaggataaaaccgaaatatagcagatgattagatctcatgttgatagtgttgataagtatcacaatgacaatttactttgtttcttcttgcaggattgaatcagaaagaggtgtaattatcactaatcactcattatcagtaagttttttagagttttgtttcatataaatcatcgttgtttagcctttttttcacctgtaaggccattcttacgatattatgtatcaaaagtctccattttgtgactactcttctatgggctatgctgatctgaaaaaaatctatacattatggggtcccatacattatctctaaaaacgttttctctaaaaatgttagctgatgtttccgtatttttctcttatatatgtatgtataacttttcaggttacattcaatgggtcatttgaccacatgaacattgactcaactaggtactcttttggttaaattgagcagtattatctgtcacttgataaatcatcttcaccaaaggagcagaaacaatataagttaaaattttctgctacacgatctgaattgccttcattgttccatatatgcacctagcagtgtacaaacattggaaattattgaccctcttcatactgaactgtggggaactagcaacaaaaagaaaagtctctttcagatgttgaagactacaaagactacaggagggtatggctttcccattctccaaactaatcttttttacatatatttacactgcaacattcaatatctcctcatttttgcaatttgaacaatcttttctgagataaaaagtttcatgtcaacttctattgatggtacaaaatagtttaactttatgtagtctatgtattgaaatatcaagcacactgcaacaattctcttcaaacttgcttgttcaggactagactactgagagccaacttgttgcaaccgttaaaagacattcaaacaatcaatactcgtctggattgcttggtaaggagattaatcttttttgttattctcaattcttaaattggaatgtctgtttgatcaaattggtcatacggtaatcctgacatttgaaacttccaaagttgcacatattaagttctggatcttctagtaggctaggttctggatcttctgtgggaatgaactaacttcatggagtatgaaccctgctttatgcatgtggaaatcttagtgcatatagtcttaaatcgttactcgaagggtttaccacaatcatgtttgtaccatttatagttcatttcctgttggagcactttgcaatataatggagaattttactgcaaccatgattgtacaccacaggccatatgtgaaagtatttccatgagaaggggaagcaatagttcttgtaatattgatatgcaacgctcctttgcaagaatgaaagtcaactggaatctgggatataacaagtattcagttactaatattatcatcgaaaatgatcagtaatatatccaataaatgcatgtttattaattttatatcttaaattttaggatgagctaatgagtaatgaggaattattctttggcttgacacaaggtcttcgtaagtttccaaaagaatcaggtgaacttatgtcctttttctctgtagaaaattctatatcctcttctggctgtgcaacactacagataataggtaaaatggttgctggtgttacaacttccataattttattatgcctcagataaagttctttgccacttctgcttcaaacccaaaaaggatactgatgaagtgctaaagcctgccaatggtagaaagagccaagggctgatttctgacattattgttctaaaaacagctctggatgccataccattcctctccaaggtagtgttatagatgtgtttgtcctagtattcaatttagcaatttattcattctgatttttcattttgttttgtttttgaagatgcatgttattttgttcatttaagggtaaatgtcttttattctagaaacatacccatctaccttttcacgcatgtgatgtgtagctcatcacaggttctaaggggtgcaaaaagtttccttcttcgcaacatttatcagactatatgtgaaaacccaaagtatgcaagcatgagaaagaggtactgttttctgacctttttcctcccatttcaaaggagaagttgaatgaagactgaaaacagcatgctaacttcaggcttagtcttcccatcctgcttttgtttgtacatttgtttttagtttttagtaatattgccagtatattagcattatgtgactgtaaatatgttcgtccacatttattaaataacaagtatatccatctacattctaaaagtaaccattcacctttgatttggttgcatgttttcttttatgatcctagaattggggatgtcattgatgaagatgttgttcattcaagggctccttttgtaacctgcactcaacaatgttttgctattaaggctggaattgatggactgcttgatgttgctcgtagatctttctgtgataccagcgaaggtgtctatcgttttcatgtttgttttctaattttacctaacacagctgattgacataatgcatttttcagccatacataaccttgccaacaagtacagggaggattttaagcttccaaatttgaagataccatataacaacagactaggattttattttattgtaccccagaaggacattactgaaaggctccctaataaatttatccaggtatgtggatatatcccttttaagaaccagccctcttagctaaaccataagatgctaaccaaatatttgtgaatgtgtaatcaattaggtagttagacatgggaagaatgtccactgctcaagcttggagcttgcttcggtaagtttgcatccagtgaattatcatccttgggcatttttagtaattcaacacttactgccacactgcaaatttaaccatgtaattattttctctgggatgctattttcaagtggaataagtgttagtcaatagttattcatttatgttcttttgttttccctcaaagaaagtttatcatcttgtttaagcatcacggagcaaactattcttttgccaaaagcattgggacagtgttatatttttcttctttataagtgtatggtataatttcatcatagctacacgtgaaataagcttttattttatcgattaggatatgacattgaaaaaatataatatgctattggagagtttatttcttcatacggtcacttattaccatgtgctttctacccaaatttgcagctaaatgccaggaataagtctgctgctgctgagtgcttcttgcgcacggaactttgtttggaaggttgccatggccactaaacattgagtattcaacatttttccattggagttttgttactttatttgttgatattgatataggttaagctctggtccagttatcagatacctgttattataattttctagtgataaactagagagttaacatgcaatacatgcatgcataatgtatctgttgcattgggatatcaaattctatatttgttgggcatcctccatataggtagcagctattgtagaacagaacatcatcattcttcttaacttagaatagggatctcctcattttgctttgtttatgaactttttagccatccatttctttgctttcctggcttattttggctgaattggtgggactttgagggtatcatacacttgactaattcaactcacgaacttaaagggaattgaagcttgtggatagtgtaacttgtttctgtgcagcattttacatttcaactagtattattcaagtgtctaaagaaatatttaacttgcataaatctgttctgttgtttcagggcttattaatgagatcagagaagacattggtatattaacgttgcttgccgaagtattatgcctgttggacatgcttgtaaattcttttgcgtttacaatatctactaagcccgttgatcgttacacgagacctgaattcactggtgggcaattcaattcaacactagtaactgatcttgttaaggattttttttagtgatgttgtggagtcctgatctgacagttgcttccaattaagcagatgatggtccgatggcaattaatgctggaaggcatcctattcttgagagcttgcataatgattttgttgtaagttcttcatttgttatttattcctcagtatttacttcatttgtatgtctttttcatcataaatttgttgattgaaatagcaatgatcataatactgtttatatcatgcagcctaacaatctctttctgtctgaagcatctaatatggttcttgtcatggggccaaacatgtgcgttccataaacattgtatccaaatgtctatagcaggctaattatatatggaaattcatctgctctctgcattatctgctgttgcaggagtgggaagagcacatatcttcaacagatttgtctaatagtcattcttgcacaaattggctgttatgttccagctcaatttgcatcactaagagtggttgatcgcgtattcacacggattggcactggggacaatgttgaaaataactcaagcacagtatgcaaattcatctcttctatatggtttatacttatgttatcttgttatttgacttacagaattcttctaaaagcacgtgaaacaataaaatgattagataaagcattcaactgttactgttgatagtcctcaagtaatatttatcccctgagtaccattctttaggcttgtttcctcccagattaattcctatttattatcttaaatctcctgatgcacattatctctattgtgctcaaacctatcaaatttaagatgttttcttgtccatatgaagtataaatggtcatttgcattgtcctgttccagtagttggtgtttttggattccttggtggatttccttaatatagcattagatatggagggtcttaactcctaagatcggtacctgtttgtcatatttatggatgactctacatgaagaagcgcgttgaagtagtggattaaccatcttatctaggatcgcgagagcccatactataccatttcttggtaatatctggatggctgatctggacttttgaattgtttgtatactgtcatttataaccttccttcaagttgtattggccttggacacttgacaaagcaattcacatataatatttcttcgatcaaatcaaatatttcatcaatagttggtcgagcttttcctttgtgagaggcatcttgtagatatttgctttcttaatgaaatgaagcacagttctcctgcgtttttgagaaggaaataaaaacatcaatgctgtatcttttatggagtattagtaattagtctgaagccaattgatgtatagtttatttcaatgctgctaatcagcttaatttctctttgcagttcatgacagaaatgaaagagacagctttcattatgcagaatgtttcttcgaagtactatgggtctaccatgctgcaatagattggattgctgtttctcttgtttccttgtaatgaccatgtgcacatttgcacacttacaggagcctgattgttgtggatgagcttggaagagctacgtcttcctctgatgggttggcaattgcatggagctgctgtgaatatctattatctaccaaagcgtaagaactattaacctcttaagtaccacatttgatccttttcatgcagcataatttgacttatcacagtcctaacttggtggggtctgtatgaaataacttatgtgccttttaattgagtgcttctgaaaaagagatgatgatttgtgtacgttgtcatacttaaattcttagcagacaatgaaatagataagggcagaagagataaactaccatttttctacatgcatgcttactatttttgaacaagaagaggaagctaatatgcattgtaagactggagggagtatcaatattcacagcagatgttttcttgtcaatagttttgaaactgcatgcttttctaaatgtgttgtctaggcttctgttattcagttacctcatccaacatttttgtagcctatttattcaaccatatccatatgttctcatcttgaatcaaatatttgatcgtgataatggttagtacaagaacatttactacttgtcttgtgctcaccttaggccgtgctaccatcaagtttcagatatcatatttatcacagaacctactacttccgtcccaaaatatagcaacttttggctatgtatcttgacacgcttttgtccagatacatagctagaagttgttatattttgggttagatattagcagtaagttcagcatagtgcctgggggtgcttgacatgctgaatgcagctggtcatgtttggttaatcttgccaaccacaatatggtctattagttacagatataaccttttaagacaagatatcatccttgttgagcaaatcctactatcttagaagcatcactgtcgggtcttttcacccaatgcagctacacggtgtttgccacgcacatggagagcttgtcagaacttgcaaccatctatccaaacgtgaagatcctccattttgaagtcgacctgagaaacgaccgcctcgatttcaaggtataacctgaatcgttgacagtcacatgacttttttttttcatgtctcttaacatcatggatcatacaatccctctgcatcagttccggttgaaggatggtgtccggaaagtaccacactatggtcttttgctggcaaaggtggctggtctcccttcttcagtgatcgacactgcagcaagcatcacttcacggatcacagaacaggtaaacctctcagtactgattagagctgatgttgataacacagtgtgtgtgactgcttagattacattatgcaactcaaattgtatgcccattttcttctacttgggtccttttcttttttgactgcacagccttgctcgttcctgctgctggatttgatttcttctactcgagcgcattgatcaagtcaagtttacctgttttgatcccggcctgcaggaaatggtgaggaaggacgacaactgcgagcagtaccggtcgctccagatggcgtaccaggtcacgcaacggctcatctgcttgaagcaatccaaccaaggcgatgactacatccgggaagcgttgcagaatctcaaggacggctatgctgcaggccgcttgacatgagaagaaaaatatatgtaaaaaggagtttttgtttctctctcctacagctggcagcatgtatggattatggtcgtatggatgtagccatgtagggcaccccctcccccccactagcctcgtacaaaccatgaacggggtcgggtagttcctagaaacgggttgcaaggctagcatatattttttggttgccatactttttcacgccacattttagtcatgctacagtttcttagttacgtgtttggtttgctgccacaattgtatcataccttctaaactttgagatccacatatcatgctctcaaatttagagctaagcatgtcacacttgtggccaactatttctaagttacacttgtaccaccatgccacaactagtctaaacttagttatggcaaagttaggcatcaaccagacatccccttatagctgcatcaacgaatagaggtttgggaggcaagaggtagaggggctccggataactcaaaatgcgattatatcaaatgggcattttcagccttcaccaaaacacgcttttcatatcaagcgtgagaagggagatgaaaggaagcacgcaacgctcgtatatgtactctacgattgactatatcttatgcacataaggttttcatgcatagcaactatttcccctgtttcacaatgtaagtcattctagcatttcccacatccatattgatattaatatatatatatatatatatatatatatatatatatattcattaacatcaatatggatatgaaaaatgctagaatgatttacattgtgaaacggaggaagtagcaaatatcataaaaaatatctaaaaaaaattatattacatcgatgtgttaaattttcttttccaattcattactccctccgtccaataatataagggattttagagggatgtgacactttctatcttgttcagattcatatcactaggaagtatcacatccctctaaaatcgcttatattatgagacagagggagtatattttagctgtaacaaaatataatcaatttttctcttaacacccttagattttggtgtagtcagcagttactacagaataagataataaattgcctatataagccactgatctatgctttctgttgccgtttagtgaacagttgttctgctgcacacaccattaacccgactccagtagagaacgcgaccagtttgatccatgttcagtgaagtcctccagccgcttggcataattatcttctgtcgtcaacccatgcaatgtacaattatatttacggcatcgtatatgttttctttctgaaaatgcggttatcaggcgaatgctaaaaacactcgcaaaaccctgaatgttgttagactcatgcaagtttgtcgcggctcttcaatgatctgattatactcgtcaagaactgcttttcaccacggtatctgttgaatgagaaacgaatgccaaggtgattattatattatagcatataaaaagagcgagacattttttttttatgaaatggtgttcttacatctcgagtgatgagaaacccaggcacattatgcctatcgccatgtgaatgggaagggtctgcttgaacctgtttctattcagaaacatcctttcagagaaagctgtggtcaggccagaaatgagcaacacaccccagcctgccggcaagcagtggcggaaagagaatgagccctgtaaaataaagtcatcaggtatttttgttagaacagaaactaaaacaaactatgtgaaacatcaaccgaacctcttaccttgaaatagtctttaatgaatgccgctgaatatgtgattcgcagcagcatatctttacaaacagtcaaggcacaaagaaagttcttaaaagatactttaaaggaaataagatggtagtgattaaccaaaggatactgatggaatttgcagcaatcaacccaactgcaccagcagatttaatcaggacaacatttagcacaatgtaaattgccgagaacaggagcaacatatcatttgactgcttaagcttgtcttcatttgcaacagcatgaaggaaagcttcagatgtgcctgaaagtacacattaacataatcagtgcaactcaatattgcatcctcatgaggaatcaattgaatgtgttactcatgcccaattacatggttgtataaaggctaatatgtgcaatttttaaatatagaacacatcatcaagtatagctaactattgatcaacacaagaagcaatgctacttgttggtacactaactcaattcaaaaaggtcaactacagttcatcatttcagattttttttaatacataatttaagcatgaagacagtaatactgtacaaaaacattgctctactatgatataactggtaaatagaagtagtaagtacaaaccattcattgctaagcatatgacgtagaaacaatagtaacgaagaataactgtagcatctccatcactgtatcttgccccataaagtagtctaagaagggtatatgaataacttggaccaaatgagatgacccccaagcctgcaaagttaggacactttaaggatgactgtattcgaatgagaacgtagagaataaagttggtagctactaaacatgtttactgtacactacatgtactgcaattgcttgcttcttactccctaagaggacacagtaaataacacacgcaaatgcaatcaatatagcattcaacattggataacaaacctatcagcataataagcttaagagctccgagcaaagaaccttccaaattggatatattctggggattttgtcctgtggataaaaggcccattattagagcttttacagaaatatacatctaaacatatgcgtggaacatattgttttgaaataaacaatattgctatgaattctggtgttggtcaaatcaacatttcaaggaaaagttatcgtatcttaaagctgcaatatgaaacaacaataataccaaaagatatattttcaggcagtaagaaatatggaaaatgatcaagtctaaattgtaaggatcaaataatcaagaaacataccaaagttacaatttctgaaaggagtataaaaaaataaactcttttttttaaaaaaaaaaaaaaggatgaactgccatgtttggtgcaatgcctgcccagccaacataggttaattttcattgaataaccaatcaaagagatgttagacaaaacttcacagagaaactttcaagttcagacaccaaagggataaggaatgtgattctcatatctaaatgaagtaaatgcagaagaacctgatgccaactgtgcaaatgtagcataagaactctcctcgaatggcaggaaaactattctaacaaccagactccctgcaaataaacaaaacatgaattgcacatacccggcaacattagaagataaaaaggatctgaaacaaacagcggtcggcatacttacctaatttatccacaagaccataggcagcctggttatatggagtatcaaaccaaacaagaacaaacttttcgccttcttggagcatcagtttcctgaaagtctgtcctgtaaacaacatgcacatgtgcaacaactgtttatcgcagtccatcatggctgacaacctgacaatttgtttgttttaacatcaagtggaaacaaacataaacatgtgatggatcaaacaaaacctaatgatacaacacaatgcaaaggcagacatagaaggaacctgaatggaaggagatcggaaattttggtatttgtaaatataagaaaataggtccaatatccaaagaaaatgcaagctgcatagacaacctgtgacaaagcaaatacaaccaacttttcctgcaagaaataaattattgtttttgtgttgtgttgatcaacaattgaataagaaaagaatgacatgagatgaacaccaattaattgaaaagtaaagaaagaaaagattacttggacatatcactcagcagaattcatatttttgttttgtaaagtcctattattgtcaaagacgaacttaacatggaatttacaatggaggcataaccaaccaaaaaaacataaggtgatctgcttaaagttgaaaataactagattaagtaacactataagtctaaaatacatatagcttaattgttcgatttggcaattagaatggtcagtctaagactttgtttggctagattagatggttagccagattatacacttatatttggaaaaatagaactctaaagaggtttagttgttctatgttatcatattcactttttttgtgggttaacttaatcctaattaataaagttaaaatgtcacaacctgattaagttaatcctctctaacccacatcctgttaaccctgaacaaatgtagctaagagagaaatctcacaccaagttattttctttggtgcatggaccaaaagaacacaatatgaaattggcaatggaactttttgatttgctagctttcacaatgtaaccataaccaaatagatggctataccagtatcaggtgtaaacaacaaaaacaatgtgaacttaagcattttattttatcagtgataacaaactgagacagaaagtgcataataagttgaatagaacgtcaatagagtaaaaacctctgctgttaccattttagaatgtccttttgttatgaagataaaagttgttaaacaacgcagcagagtagccacaggttcagtatacactcttatttgatagtatttcttcctctgggagagaatatacagaggttctgccagtagctccagtacgcaagcaaatgctgtcatattgaatcaactaaatacattagctctcaacgtgaggaaagtggacagaagtcacacaatatgaaaaaaataaggcaaaacatgtggagtgatatcatacaaacaggaaagacaaagccattcatagccgtgcttttatagatcatatccaaatagaaaaacaaatagataaatgtctaaaaggaccatcttgaaatgctacaaataactgtatgcttgcatgaatgctcatctccattttattgatcaagagccaggtgttcaacaattgcatggaagatataatatttcagcaccactaacgagttaatatgtggaatattctaacttaatcaactgattcattcattccaaagagcttatcctcaatcaactgactcattcactctgacgaatttatactaaatgaaatatcagtcaccatattcaggacaaatacacaaagcttgtacagaaacttggttaatacaaagcttaccgataattaatgtagctttagcataggtatcggataaccgcaatttctttaccctcaacacaaataagctgctgataaaggaaactaagatgccaaatgggacaatcatccaagctacctttagtatctcttcatcacttatcgcattgccactgtaatataaatattttaaccatcatcatttaaagagtatattccaatgcaattgctagaaagacctttacaatcccagagcatgtttcaacatgttcaagtggttgaaaattgagaaaaaaaattaatagtgcatacaaactactaatagaaagcaattatttgctcaccgtttgaacagtatgctgagatgacacgttaggacttgtaagaaatgaatgaaattgtgtaattctaccacaagtacagttctaaggtttatctagaatatgtatatgaaaatagattttcacaagtatgcaaaataagaatgtgattttggttgattataaagaaataattaagttttagcacactagggctcaaattcacaagtgcacagcccgcatgcaagataagcctgcggacagagagcaactcacatgggatttcgtcctcatttcactcaaacaggttagctcacagttgttgcattaaaaccctcagcag

SEQ ID NO: 6266 - DNA, 15620 bp, Oryza sativa
atcattagcatatatatgaatatgggcaatgctagaaagtcttacattatgaaacggagagagtagatgatttgtaatggcatttctctaattcgacataactgtaatggtatattgccgccgccggcaggcaactctgtccctacaacatcggatcggaagcgtaatcagtgggcgactcaaaatttgaacgccatcgctgagaaccgtcggatggacttaatttcacgagcaaaacattacggtcgctcgagggctgacctgcggggcccaaggttttgtaggcagaagtcaatcgcgattcaagcgatcaatcttctccctaaaccactgcaactttcttcgctcaaccctaactcgacgaaaccttcagccgccgtgtgccatcctacgtacgccgagatgaccggccgcccagcggcgccaccccggggcctgattgctccaccatcgcacccgcacggcgcgctgccgcggaacaaacaaggatcgggagcagttcaggctgctgctgctgcgcaagacacaggacagcaaagaaggaactatgaccaagataatcggggcgcacaggatgctggacgtggatatacgcacgcggcaggcaaccatcgtcaccaggatcagccgggcgaggcttcaaccggcaatacagaggaccgcaacactgtcctgtcaatcaccggccagctgacactcatgctagtcgccgtcctgatcagagccgcagagaagaggagcgccaagaggttcctgctcgctaggaataggtaactgaggtgccggctaaacacaaagcaatggcaacaactgaggtaccagcggcaaaggcaaagaaaccacgaccacctttttgctacagatgcaagtgcaatggacatttgcctgctgtgtgcaaggcagatttgaattgcattatatgtaacaagaaggattcacatttgtctatcaagtgcccaatcctgaagatgccgaaaccaaatgcgtcgctgcttgggtttggcaagaatgagcttggttttcttcaagtgccagactttgattacaagctcgagactacagttccggcacctacagctttagtcacgatcacgggtggacacctaggagcggatggggtacagacagagcttgccaggcttattcgagcagattggaactgggaggctttgccacacggtaaagattctttcctagttacattcccatcggaggaggaactgaaaagaatggctgatgtcgagtttcgcctaaagaatcatggggttgctctgacgatctccgagtggcaggaagcaggtgatgttattccctcatatgaattggatatggcatgggtgcatgtcaccggtgttcctcatgcttggcggcattatctcggtttttgggcacttggtagtgtaattggggctacagaagaagtagacatgctaaccttccggaagttgggagtgatccgaatcaaagtgggcattatggatagggaacatttccctttcactactgatgttgtgtttgggaagcatgggtatgagctgatttacactattgagcctgaagattttcaacctgccattcccaccccatccaatgatactatggatcatgattctgcgggtactgataatggtagcaacatggatggaggtagtgctgatcatgcagcaaaaaagaagaaggcgaatacatcgacaccggagagttcgaatgctgcagtttcaggtccaactcctatgcagttagcagtgactccttttggggatcgtcgccctgtgccacagagacagcaaattatcctgggcactagagtgaacaagcagcacattgcggtcactccgttaagggtgaccggatcgacatcatacggtcggagagaagtttctctctcgacctcaacagctgcgccagccgcaccgacattgattgtgcttctaccgaagtcttcatcatcgatggatactccacccgggctgacaatggcggtgtctccacctacgcctgcacctttggggtggtcgctcacgtcgaccccacccccatccgctcctgtgcagaccctgccggcatccactccacccatgtagacccgttggcatcgtcgaggcaatcaacatcagcgccgacaaaatctccactagtgccgaccctgccgatgcctacttcactcgtgcaaacaccaccagtgcctactacaacaactcaaactgctgcctatacacatgagggtcatgtcactcagcccggatcgagctccatcaagcactcgaccttcgggcatgtgaggtccccatgcactcctttacaggaggaaaagaccgaagggcttcgccatagtgatcgctgcaatgcagccatatcatctaatggcattgcagcggccgatgaggattcaacgacgaaggctaaacgcagggcagcgatgagaaatctggatgggccaatgatgtccaagatggctgacttagcgaagtcatcactttcgtctacatcataccttgacccttctataggtatgcattctaacctcccatcttcttccattgtttatttatccaatgaacaattttcctccaatttgggaaagataggagtttctttgggtagtggaagtgaaaacgtggccttttctgttaatgctattaaacatatgaaggttgacagatggaaagtagcacctaaaactaagatgaaagctaaggttattgatgaagcgaatgatcaaaatccttttgatgatggtgatgatgaggatgccaaacctgatggcatcttactcgctcacttattcaaggaagtttctgaagtagacttggatgatgcggagcttagcacaacaatttgtgacttaatagatacccctcgaaaatccaaatctgcttcaaaaaagaaaggtcaatcgaccaggaccaaaagtaacaagaacaaaaaaggttgtaaatgaaaggcatcttctggaatagcagaggtctacttgacttggctaaatattggtatgttgctgagaacattaaggaacacaatcttgattttgttgctttattggagacaaggaagaatgatgtgtcaaagacgaatcttgatcgcctagctgggggcgcagatttcatttggcactgtcttccccctcgtggcagatcaggaggtatattactcggtattaatgcagctgtaatggacttgtccttgattgtggaagggaaattttacgttaaattccatttacgcaacaaagaggacagattcgaatggatcttgatggcggtctatggaccagcacaggatgaattcaaatctagcttcttagctgagctagtccgcgcttgccaacaaaatccacatcccacgctcattggtggtgatttcaacattttgaggagtagtacagagaaaaacaacaatagatataatgaccgctggccttttctcttcaatgctgtaattgacagttttgacttgagagaaattgctttagcaggtagacaattcacatgggcaaattccttagccaacccaacttatgagaagttggatcgagtcttaatgaccacggagtgggaatccaaatttccgatagtttcggtacatgctcttgagcgaggggtttcagatcatactcctcttttgcttgatactggttctgcggctttcatcgggaaccataaacagttcaaactagaactaagctggttgactcgtgatgatttccacgaccgtgttgtcgaaatttggaacaagccggtcaaagggcgcaactcggtccaacgatggaacaataaaatgagtgctttgcgtaagcatctacgaggttgggcggcccatatgagtggtatgtataagcaagagaaaaaaagtttgcaatcgaccatagatgaattggacatcgctgcagaggttcgagtcctgactgaagttgaaagagatcaacttactcaagcaagagatcgactagttatgcttctaagagaagaagagacaaagtgatttcaaagggccaaaacttctgatgttcgtctaggagataataataccaaatacttccaaatggttgccaatggcaaacacaggaagaaacggatattctacctagaacaggacgaagggaaaatagaggggcaagcagctctcaaggcctacattactagtttctataagaaactatttgggccacctgaagataacccttttacgctagatgaatctaggactggggatatatcacaggtcacagaggctgaaaatgaattcctaacggcaccatttttggaaaaagaaatacgagatgctgtatttgacatggagcataacaaagcaccgggcccagatgggtttccagcagaattctatcagaaattctgggaagtcattaaacatgatttgatgaatttattccatgaattacatactggtgaattgccattgatcagtttgaactttggggtgataactttgctcccgaaagtcaaagaagcgaatcgcatacaacaatatagacctatttgtctgcttaatgtcagctttaaactattcactaaggtcgccacaaataggattaactcggtggcggaccatgtagtgagtccgacccaaacagctttcatgcgaggacgaaacatcttggagggtgtcgtcattttacatgaaattttacatgaactacatcggaagaaactaaatggagtgatcttcaaaattgattttgagaaagcttatgataaggtcaaatggccatttttgatgcaagcacttcgtatgaaaggattctcaaccaagtggatttcttggatcgagtctttcgtttcgggtggaagtgtatcaataaaagtaaatgatgacgtcggaccttttttccaaacgaaaaagggccttcgacaaggtgatcctctttcgccgatgctttttaatattgtagctgacatgttggttattctaatcaatcgagccaaagtagatggacagatttgtggagtagtccctcatctagtggatgatggcatttctattctacagtacgctgatgataccattctttttatggatcatgaccttgagaaggctcgtaacatgaagcttctgctttgtgcttttgagcagctctcaggtctcaagattaactttcataagagtgaattattctgttttggtgatgctcgagccatggaagaccaatatactgatctctttggttgtgcttctggcgaattcccattatgctacttaggcattcttatccattataggaaactaagaaatgcagattggaaaggggtagaagaacgctttgagaagagactcagtagctggaaagggaaactactttccacaggaggaagtttaacattgataaactcagtgcttagtagtcttccactgtatatgatgtctttcttcgcaataccgagaggtgtacttaagaaacttgattattttcgctcgagattttattggcagtgtgatgatcaaaagaaaaggtatcgtttgacgaagtggagtattatgtgccgacccaaagaacaagggggtttaggaattcatgatttagatatgaaaaacattgcccttcttagcaagtggttatttaagctactcacgaccgatggggtctggcaacaattgattcgtaacaagtacttgggctcaaaacctgtgtcacaagttgagtttaaagttggggactcacaattctaggccagccttatgaaggtcaagcgtgactttttacgatttggcaaattcattatgagagatggtgcccaaatcaagttttgggaagacaagtggttgggagaagcaccattgcgagaacaatatccttgtctatacaatatagttaggaataaacatgatactgtagcaaaagtgctacaaaattaccctccgaatgtatcttggcgaagggatctcattgggccaaaattagtggtgtggaataaccttcttccacgaatcgctaacctagttcttactcaggatcaagataagtttcattggaatttaacccaaaatggagaattttcagtgaagtcgcattatcttgccttggtacattcagatttgcccaacataaacaaagtaatttggaaattaaaaataccgcttaaagtaaatatcttcctatggtatttacgtcgtggggtagttttgacaagggataacctagctaagcgcaattggcaaggaagtaagaattgttgcttttgtcacaaagatgagacaatattacatttgttttatgagtgcagatttgcccattttgtgtggtgcattatacaagtggctacatggcttttcccgccacgtggtgtatccaatatgtttggtaattggctacggggaattaggaaagacttgaagtcacttatcctgttaggggcagccactatttgttggtcattatggctttgcaggaatgatatggtgtttgacaaaagaaaaatctcttctcctttacaggttatttttttaactatccacttccttcgtacctgggctatccttcagaagcctggttcacgggatttggttgcagcggcgtgtcagcccttggagcaggtggtcagggaatgttttacccagggacatgggtggcggtctagcttgaagattggtgctccctgatttttactgctttccttctattgttacaaactcttttgtgggtttgtgtgttttggctgtgtgcatcctagttatgcagaggccgggagttttcttagtatggttctatcaacaatgtaatcgtctgagattaataaaagcttcctttatcaaaaaaaaatatatccaattaacaaaaaaaaaaaggacatgtattagcagcatgacaatctacgtaatcagagcaggaaagcgtaattctatcgaccacaaaacggacggctcaaaggggaaggaaagcagataggcccgcgatagcttaaacccccctcctcctcctccgccgccgccgccgcccgcgctcgccgccgatggcggccgccgcggcgacccgcctcctccgccttgccccgcgccgcctccagggcccacccagggcgtgcccgttcgccgccctcccgctccacccgacgccggcccggctcgccgccaccacctcgaggtggcgccgcttctgcgccgccgcgcaggcctcggcgccgcccccgccaccggccgccacggcggcggcggcggcggcctcgggggaggccgtgggggagttcaggagacggacgcgggtggcggatgtcaagggaggggaggacgagggcgccgcgtgggttggaaagcagctcgccgtgcgcgggtgggtgcgcacctgccgcgcccagaggaccgtcaccttcgtcgaggtgaggggaagctttgcgtttgcgctctcgcatccctttctgtttgaagcgtgaattcgtgatggtggcgctaatggttagcggtcttgtgtttgatgaaatgaacggtgcgaatgattagtttgcgcacattgcataaaattgcattgtggactaggaattgggagtgctggaaaagatgctttccttcagtgcactattcacattgcttccccaatgtcgttgatcattttacatttcatgaaacatttcgatccatggttatgcgattgtactaaactagctttcattgtactacttttgtacaaattacgataacaagactgaacttctggatagatattacagaaatcatttttgtgactgtttgataagtcgtccttcttttgatgagaattgcagcctgtttgacttgcataccagcagttctgtggagtgtgccattagttgtttggttgatgcctaaccttgccataactaagtttaggctagttgtggcatggtggcacaaatgtggcttagaaatagttggccacaaatgtggcatgcttagctctaaatttgagagcatgacatgtgggtcccaaagtttaaaaagtgtggcataacacaattgcggtagcgaaccaaacacatgcctagaaaattgtggcgtggcaaagtgtggcaaccaaccaaacagcatgttacttgcctacttttctctaaggcctacttttgtgttattaactgctttgaagttagaaatcaggacaatttctctaaggcctacttttgtgttagtaatcagacttcagacagtctttcatggaccagcaatactaatctagtaatctgcatgccatgagtgcacagtataatgaatcagagtatctcatattctgaatgcataggatgttaatactgtcatctggagactttaaagttccctgaaataatggtaatgactattggcttttactttaaatctctaacgcgtcctaaaatttaaatttatttcaggttaatgatggttcttgcttgtccaacatgcaatgtgtattgactcctgatacagaaggctacgaccaggtaagcaatcattcagggaatcagggtacaactagatagtagaaacaatacatgttaattttgttttgttattctggtcaataaaaatagtttgatcaatccaatggttatcttgtgaacacagaaaataaaactctgataattgtgacatggcaccaacaatgacaccagcgttgtctagttatgtctcaattccttttattttccttgctatagttgcagccaatgtgttcttgtggctatagtacattttactggtcaatattttcattggtggatgtcagatagactctatcactactggggcctctgtgttagtggaaggagttatagcaagcagccaaggtggtaaacaaaaagtggagttgaaggtttcaaagatcagtgtggtaatggtttcattctgcctatagtttcctccttttcctttttatttccttttttctttgcgtgcctcacaaatctaaatgaaatgtggacagattctggagttaactagctatttccagatatcaaaataaaatttctataatttattgatataggaaaatacttgtggagtagttaaggtatctctttttgtatgctactatgctagtcttgtactcttgttaaagacagatatgagcgttaaccgaacactcctatatcgaataagttatttgatgatccctaacgtggtaacacacaatgcacaaaaaaattcgcccctatgctttctttttatataaagaaatttctgatggcatgacaaaaggatagacctatagactgttaatgttgattgagaatctgcagttgcattttgctttatcaggctgtagacaatattatcccaggtaagcacgcttctagtgcatttttttggtgtgttctgatgtaggtttcacttctttgtacagattggagaaagtgatccaacatcttttcctatacaaaagaagcgggcatcaagagaatttctgagaactgtagcccatctccgtcctcggacaaatacttttggcgcagtatgattttactcattgctagttcttttctgatactttttttttgctcagaagctactaaatctgtagacttgtgttatgccttggaaatgatcatgccctttctgtccacaacttttctacaaaatgctcatcattatccttttctagatgcgttgttaattccctaatttagctcataaattagcatacaagttgtgacaaggtttgctatgcaaatattacaaaataagtggcatgtttatagatgacattctgtccaatccaaccttggatatggatctgccaatgtggtgatgaaatacatacattatgtagaattgcaatggactatgatcaatgcagccatggacaggaaatgtgtgtgattctcatattggcaagaatccaacaaactgctgatatagcatcatattctgcacatcaaaatagtgcaaacgttggtagttttatgtgttgtagtaagatgaacttttgcgttagaaagtgcctttttcttatgatgaagaagctggctggtgtccaacatttttcatctctctagttatgtaacttattctatggaatttttactgtactgttgtacttatttaggtggcaagagtgagaaatgctttggcatacgcaacccacaaattttttcaagacaacggatttgtttgggtagcaagccctattatcacagcatcagactgtgaaggagcaggggagcagttttatgtgacaacattggttagtatttcgtcaataagattctatagagtagtgtatagacagattgcttggtatgtaacaaatttactgtttctgggggaatgttctgctcataatgtcatttcctgtactaacatgctgttcatattgcaacacacattttggtcttctctatttttacctcaaaaccattagtgtactttttgctccagttcagaaattaagtgctctttttctttttttcctcacaaaaaaaaaagaaattaagtgctccgcatcatcctgtactaatatgcttgtccaaatcagaaactacttgaagttttcttttagttttgtacttctgtgtctgtttagaacagcttcactatgttattaggtgcactgctaaatcagtttgaattttccatctacagatttacttatttaaaaatcattaaagttctgctataacagttgattaagtttgtcatgattggtttttatgtatctgtctatatttaaagatatttatggctctgagtatcacttattatctttttatgtttacaatatattccatggaatgatcagagctctccattttggtttctaattgccataacccctttcattatgtttctatttaatgctgttagatttttttccctgtcatacagatttcgaatagtgctgaaggtggttctctagtcaaggatattccttctactaaggatggaagggttgattggtcacaggtaaaacttcagaatgaatgcttatgcaaccttttgttgttaaaagtcaaatgtttcttccccattttaagcaaatttacccgtataatttttgtgatatgctctgttatactgcatgccaacagctgttcaagtaatccaaatgtttcaatgtctttgtggttttcgtaacaatggttatttgcttgtatctatgctaggatttcttctgcaaaccagcatttctgacagtgtctgggcaactgaatggtgaaacatacgctacagctctatcagatgtaaattttcatttgccagattcatttgaaataattttctgtcgtatttgatatagctgtaaccagtgtttctgtttcctgacattgcttattctacaggtttacacttttggtccaacatttagagctgaaaattcaaacacctcaagacatttggctgaattttgggtatcgcaatattcttttacatttatgtttctttcagaattttaaattccagaactcttaatttacaggttttttttttgttggtttgtgttccggggaagatgattgagcctgaacttgcctttgcggatctaaatgatgacatggcatgtgcgagttcatatctccagtatgtagtaggtgcccttttttgcttggtgctcaactctgttagtgattatttcattcagacaatattttatggatgcttcacagttactgacttgctgaattgtggggaagatgtctctatatgcttacaccatttacctagttactgcttgtttgatacaggtgaagtatgttctagagaactgcaaagaagatatggatttctttaatacatggattgaaaaagggatcatcgatagattaaatgtattcctctcagatctttcttctgttgctgcactatggattgttttggtcaagtttcatgctgaaatattgaaaatgtttcttcttgcaggacgtagttgagaaaaactttgttcacttgtcatattctgatgctattgagctacttgttgggtccaagaagaaatttgagttcccggtaacacacaaattcaattatttatattctcatattctcatttggactacattacaattttgttccttgtgttctatttaaagtcctaaccaggaaacgaaaattgactgcatatctgtctttggtgttggatggcatgtcaacatgcttgttgatagaacaaatgcttatactttttgtagttactgataatttgatttgtttaattttaattagtgtgcacaaaattacctgtttgttttctacttctacatactcagttctgtgtactgtggatccttcaacaactgtccctgagtaggcaaatgggtaaatgcaagaatgcgagtgattattttacaaaaataatgcctctttcttttgtcttttgaaccatccataggtcaaatggggattggatctgcaaagtgagcatgaaagatatatcacagaagttgcttttggtgggcgcccggtgataattagagattatccaaaggtttatatcgtcactggtctgtgattaactagttcattaacaaagttgtcatacttcaaaatttccttttattttgcttaggaaatcaaagctttctatatgcgagagaatgatgatggtaaaacagttgctgcaatggatctattggttcctcgggtaagcatatacaccaatagctgacatctcaaacaatacatcatatgtaaaattccgagtatataaatagacaaaatggaggcaaagcttctagcatatttgaattagttgatttgtaatataactcttttcctgttcaatttcaggttggtgaactcattggtggaagccaaagggaagaacgtcttgattaccttgaagctcgcttggatgagttaaatcttaacaaagatagctactggtggtacttagatctacgtcgatatggatcaggttaaatttcaaatatcaaaatgagctggataatgcaatttctccttttacattacagatcatttaaaatttgttattcggtagcatgatttcccccctgtcatgatccataacgaatttccaccttttctgtaacagttcctcatgctggttttggtcttggatttgaaagactagtacagtttgcaactggaatggacaacattagagacaccattccatttccccgggttccaggctctgcagagttttagaatccaacattgctcacaaatactttttgcaacattctttcctgagattgggatttcaagaaaagtatacactctactgtttcattgtacagagtttagttaagttattgcttacatcgagcaaaacaatattgttccaaattttgttgtttggagtaacgtgcttgcaaatttcattgaacttccgatgtacattattgttactggacgtgttataatgatcacctgatggattgatatagtgcatttgatctgttttaccgcatagcaagaattttgtctataccggtcctgtcagaattttatctcaaggtacgatgatttgtttcacaagtaaattttgctgagaggagttatgatagtacttaaatttaccacatagcaaggaatgttgtggtctagtcttgcccttctggtgacaatgttttgattagcaagctcatttaaatggattttttttggttacccatagcgccctaaatattctttttcaataaaatacctttcagacgctatacaggaatcaaaggaagaaagctatacaatttacacgctaatcttgaaataacagcggtttctctatatcgttggctgttccgtcctcaaccattctgtcaacctggcattctttcttcttagcccacagaacgacataaaggccggagaacaggaaaaccattcccagcatgctgcatgcatccatacataaccaagagcaaatcagtttgcttttggaaaatctagcacgaactaaattgcagtcatgcatatctaagtttctaaacacaagcggtacacattgaacttatgttagcacaattattgttgtttcaagaggtcctacatgtcatgtttcgcttaacatagattagacccaatgaatccattagatttttaggtatatactacttttgttttttcaaatagataacactgttgactttttatcacacatttgaccattcagtttatctaaaaaatttacgtaattatatattttttttgttgtgagttgttttatcacttaaagtactttaagcataatttatattttatacatttgtataaaatttttgaataagatgaatggtcgaccatgtattcaaaagttaacagcatcatctatttaaaaaatggagagagtgagtatatgggcctgtttggcacagctccaactccagagctggagctcaaccaaacagtttcagctccaccaaaattgggagtggagttgggtggagttctctcacaaaatgtactagagttgtggagctgggttttggcagctccacaactccactccaaactcaactcctggagttatatttaggagttggagctgtaccaaacatgccctatatatgcacatagtgagagaagaactatacctcactgggtggaccaccctacccaagaacaaggccgagaagatcgccgatccgacggtctgcgtcgggctaaagagggagaccaccacgggccctttcttctccagcgcccatgtctggaacatcacgcacaccgagcttactagcccgccctgcatacatacgcctccatgatccatccatcaatagtcacccgtagcatccttattccttacactaataaaacaaacattaacatgcatgactcatcattgccagttcacctcataatgttttttttctcctttttctaaagtctaaaccggtatgtatcaacagtgatacgatcaatcactactgattgctcgctaccggataataaggaacgatagtgatgctggttatggaattgagatttgcttgatagtgcaatagtaaaggtgtgtgtggtagtgttcaaccctaagatcccccattcaatctccaatacactcataatttcttcttaaaaaatatttggaaaacgtctctcctttcaaagctcgtttttttttaattatgctgattgcgaggtggtggtggccggttcaccgctagcctaggcaagcgctagtgttgatcaatttgcatattcatcattcatggtttaatttgatgtgttaactagtatactccttccgtactcgtaaaggaagtcgtttaggacagcgacacggtctctaaaacacaactttgacttcttttttctataagaatatttattgaaaaattgatatatgtatacttttataaatgtatttttcaagacaaatctattcatataatttttatatttttaaactcaacaacttgagagttattcatgatttatatttcaaggtttgacttaaacattatcctaaacaacttcctttataagtatggagggaatatatactacttcactatatataatactccctccgtctctaaatatttgacgccgttgacttttttaaacatgtttgactgttcgtcttattcaaaaactcttgtgaaatacgtaaaactatatataaacataaaagtatatttaacaataaatcaaacgataggaaaagaattaataattacttaaactttttgaataaggtgaacggtcaaacatggtgaaaaaaggcaacggcgttaaacatttagggacggcggaag

SEQ ID NO: 6267 - DNA, 87218 bp, Oryza sativa
  unsure (1)..(87218): unsure at all n locations
agtcgtccgtcaagcgtgagtagaagagctagccctagaaggaattggagcaggcaagtgacgtaataatataaatgattgttatatttgtaatgcaattaattaagattattagacctgtaattagacttatcatataagattgtgtagtgttctaatattatttgagttttaatataagattattttattgcaaattagacttagtatgacattattgactacggaattggtgcgactcctagcaattgactattgtagtcttaattagacttagcatatacgcacgaaacacttagcatacattactattttagtcttagcatgtaatattatttgagttttaatataatattactttatttgtaattagacttggtatgtaattattgactacggaattggtgcgacaagtagcaattgactattgtagtcttaattagacttagcatatacgcaagaaacacttagcatatacatgactattttagtcttagcatgtaatattgtttgagttttaatataagattattttatttgtaattagacttagtatataattatttactagctagggttgtataatatacgtcacctagacttagcttatatcacgatttgtaattagacttagcacgtaaggttgtgtagggttctaatgtacgacatttacacttagcatacatgacttagattgttaaaacataaatgtctcgtgacttagcagatgtttcttgtatcaacagatggctgaccgcgatgaggaacagatattgtacgatacaatcgcggagggaagcagccagtactggaatgaagaagaggggaacgaggatccaaaccagtacttgaacgaggaagggaacgtggagagggatgcggaggggaaccagcaggggcacgtggaaagggatgtggaggggaaccaggaggaggaggctagtggtagtcaaccctccgttggacagaagagggcacgcgggcaacgaggtgcagcgaagaagcttgagggtcggcacatcataacggaagtggaagaagatggacgtcctagtgccccggccgaagccgccaagaactatgtacgtcacagcggttgggttgtgcgggataacgtgcctgtcagtacggtgtactggcgaagaacaagggcacgcggagatcatgagagctttgtcccagattcggagaaagagatgctgtggaccacaatgctcgagacattcacccttcctgcgggtacagaggacaaagtgaaaaggtggactctgaagaaaatggcagaacagtttcagagcttcaagggagatctgtaccagaagtatatactgaaggggcagacaccgaacttcgacacattcccaaagctaagggatcactgggacgagttcgttgcatataagacaggtgaacaagggcaggcgatgatggaaagaaacaaagaaaatgccgccaagaagaagtaccatcaccacttggggtcaggaggctatagcgtcgcgatgccgaagtgggagcagatggaggctagcttgattgagaggggtatcgaaccggcaacagccaattggccggaacgatcgaagttctggtactatgctcacggtggaacgctcaacccagctgatggctcactggtcttcggctatcagatacaagaggctgcgcgacgactaacagatgcagtggaagcctcctgtcagggcacgttccgaccagacagagatagggacgagctgacactcaccctgcagactccagagcatccaggacgaactcgagggaaaggggtgattccttggaagattggtttcaaggaggacatccacacgtacaggagtcggatgaggagcaagagagataccgaggcgaagattgcagacctagagttccgggtatcgagctacgaactcaacatgcaagaggaggtggcaaggaaggttgatgaacgcatggccgcacatcggtcccatgatccccagccgaccattcctcctgcaatggtgagcccgtcaggaaaccgtagcagctgcgcctcaacggggcaggtaggatcacagagcatggacgccatgcaaacacaggacgaatcgacctgtcccgttgatgacatcactcagcggacaccatgtgagctgcatattcctttcaagaacttatcaataaaggtaagatttagccattccgctagttgctgcttatatatgttgattactaataaataatctctcacaacatgaaggtggcgtcgggcatggccatcccaacagacccttcaggtacttaccactgcaggccgattccagcaggatactccaaggtcgaagttgagttggtcgaaggcgcgtacgaggacctcgaactggattaccctggaggagacggtgagacgcatctacgagacacatgccatgccattattctatggcgcaggcggtacatcatcctccctgggcgacaagcggcgtctcgtgcaccatctcctccggctccgccatctcctcctcaggatcctgcaccgtctcctcctcatgctccgccagcaccgtctccacctcaggctccagcatcgactcctcctcaggatcctgcaccgactcctcctcgtgctcctacacctactcccccgcaagctcctcttccggcaccttcaaagtcaagggcccccccagctccaccgcttgcccacacaagggcaacaaagaaggcgaaagttgacgccgccaagaacaaggacccggggtacgattgcacgcaagaggagcttgacgcttacgttgcatcagaagtcaagagacaattcaagcctcgaagtccagaaaagaagattcctatagaccccagtgtcaggaacttcttcaggggtatgtctgcatctgtcaaggaggctatcaagctatcggactatgagcgaacgctgaagaaagcatcttctggaaagtccaaaccagtccctcagcttggagagcaaccaaaccaggagatcgagccgttggtgaccggtaaagaaatgacaatagaacaatttattactgacaccggtctaactacggatcaattgctaggagtcgcaccaatcgaaaaggcggaagtgaaatacatgtacgaactcggtaaaccgcttgtcaagcctgagctgctgcagtccctacccacacaaatgtacaagttccatcagctgtacatggagatgagcgccaccggtagagagatgatcggagcgaggatcagggacacggacttcttgcaaggagatgacattctctggatcaatttcaggggaatctacgaactataccagctggacgccctcgacgtctctattatgagttgctggattttgtaagtatatcgttcagttagatttcttactatacgtctcctttaattaattaggtccttgtatataagtagaccatagaaaataatatactcccttttatcgttgtagaatggagattcaaagggcccgacggcggagggttttcgatactggattcatcgaccctcggaaagtaaacgtcgcaatgctcgaccaatatccacaagaaacagaggacaatctcgtccatctcctgaaggcgcagcattacaagacgttcatactgttgccatacaacacagagttagtttaattttactgtcttcctacataccaaatttcattcccgtacgaacttgctaagtgtttcatatgtaatgcatcccacgcacattgcagattccactgggtgcttttactcatcgacctggaggcctgcaccgtcaacgtatatgactcaatggataaaaaagagtctacgtttgacaaggttttcgaacttatagacaggtaccgtcataagttcctttgttaattaagaaaatcttgttatgttaattgctactacgaatcatagctttaaactccatgtagggcttggtatcggttccgtcatttggtccgcggcaaatggagagaaagacttaggcggaagttcaaatttcctgtgagtacacatgctctacatttatatttctccgattcaaatacatacaagtgtatattaattagatctctcgttgtttgtcatttatttgtagtgcgcaaagcaaaagcagggaactaacttgtgcggctattacgtgtgcgagtattgccactgccttgcagaccaaatcatcaccacaagagagctcgatgtacgtacaaataaattcaaaatttcattacgtagcgatttcttgtttaattactaatcaatttcatacattcatatagtttattcgcatgagggataacctgaccatacacaaggaatttatcgcggcggttcaagaacaactcatgggattcatcaacgaagaaatccttgatcccaagggtgaattctactacgacggaaacacaattcaccggtccttagcttctgagctagcagcgagtactactacgtcgaaatcgtagctagctaggacatataatggattgtaattaatacatgactacatatgtttctatatgcatgtgtacacattttctataatgtaaatatattttgttcatatatatatctatatacatatgcatttgcataacatatatatgtataaatacatatatattatgcatgtatatacatataatataatataatatatatatatatacatatatatatgtatgcatatatatgtattgaaacatatatatgcatggtttatatatatataaaccatgcagcaacaggggcatgcaaaaaaaaaaggtcagctcgatctttagtcccggttggtgttaccaaccgggactaaagatcgatcttttactctcggttatttcacccgggactaaagatagcgatctttagtcccggattggtactcccggtttggaaaccgggactaaaggggggttacgaaccgggactacaaagggtttctccaccagtgagccaacaggtcggctataaggtgacctgccggcggcaaggtgagcggtacctacacactgatacaaacacgacaatgacatcgtcttctttctcatatccctcgtcttccctagagataatcgatgccgaatccttccgcgttcactcggacgacaccttgtttccattgaaggcaaggtgtttgaggacggcgtggtaactctctttgtcctggccatttcatgctctccagattatccgaatgcatccgcttcccgacgacaggcctccttggccgctagatgcattgccttgcagcttcaaattaacaaaatgtacgtgagtcagcagtgtgtgtacgaaatgttatgttcggtatatactagagtacgtacgagccacagtacaaaagcaatgtacggcaggacaatacacaacataacatacatggcgcataggctgaggaggtcggcaatggactccatcacggtggccgcaacgagaacgaggcccgcgatttagacgagtatatcatggcaacaaagcacatgacatgtctctgtgaaagacgtggccacgttggtgtttgtcacgttcgactcgcccacatgcaatgtgaccgcggcctgggcaagcgcattctcggccgcttcgtccttgtccttgaaggaggtagccatggagatagccccgtgttggctcatggaacaaggttgaagaagaagaaaaagaagaagaagaagaagaagaagtggttgctgagcgagcgatgggaacttacggttgtgaaaccttgtggttctattgttgatggatgtaaatgatataagtataacccaatcacggcgattcggaaaattcacgcggtgtgcgacgctttgttaaccacattttaatttgcacaacgtattgtttcacatcagaatttaattttcccttgcgggcgtaaatggtcatgtacgtactacgttgcttcgttaaccacgaatggcctggccgttcattggaactcacgtaaatattgtgcggttaccgagaatattgcaaaaagaatgatggaatggaagcgaaaccaatgggatttcccaaacgtccgtacttcgtgggaggtggtggtttgtgaccagcggtgtgaatggggtcgatatatatgcccccgccccgcaccactccacagtccacacctctcagatcccctactcccccattccatccctccctccatgtcccacgctgacatccccccactccctccctctcatgccggcgcagacgttaatacatgctcctcctagagaaagtcaacgtggaccttaacatagattcagtgctataataagtaaaggaagtacatagattcagtgtcaagctgtagaccttaacattttgttgatatgtttatagaaggaaatcttatgctactgatgtacatcgcatactaaaaacttgatgaagataccgtttttcctcgatttccgttagcacggttctcaaattactaaatgatatacttcttcataggcaaaaactttttgattataagttgttttagaatatcatataaatctatttttaatttataattgttaaaacaccattaatcagttgttaatgactccagttttatgtgccatcacttaatcttcgtatttcaaacgggaaatagatcatcttcacgcgcgcgctgcctgtgcacacaagcatatagctctgatattgctcagaagtgaagaataatcttgtgcaagttcagagcaaaggtgctgttggaaattcggtcataattcggcatattttaatccaaaatattaagacaataaacatgacatttgcagtatgagtagatctagtgacagtgctagatgtatacaacttgagtatgcttaatatgaaataagcatcaacatttacaaagtaacgcaatgctgccattgcaaagagtattaacaaagaaatatctaatagaatcgggagaatgaaagtataccccgagaacgtcccaccgctggattttgaggcagtattgcttccgttgatgtcgttcatcttcttgtctccaatctccgttgacatcttggtgaaggtgccgatgcagcagcagtagccacgaagaacaagagcagtcgcgcttgaagtgctatccaaaaacttgatcgcccgcctacccgtgcaagttctcaagcggacggagttccggaggcacctgctcgtcccatacacctgtgcacgcaggtgaatagaaccggggaaggattctgcagctcaggaacagaggaggaggaactcgaagtgcaagagtcgtgaagaacttcttccgtccttctggtcgctgcggagtatacatatgcgagcacgagagtaacgttcggagtcatcaaccgcggtgtttaatttcgtaaccgacgcgctcgttaatacggaatcaattcacgacgtttaattccgtaaccgacggaatcaatttacgacgtttaattccgtaaccgacggaatcaattcatgacgtttaattccgtaactgacgcgttcattgatacgaaatcaattctctgtgtttattatcgtccgttacaaaacgagagagcgcagcagcagcagttgtctgcctcgcctctcctcgcctcgccccgcctggttgtccgcgcaccatctcaaccggtcaataaagactctccactagcttcgtatttaagttgagacctcttcacttagatttccaaggtgatattattactcatagcacttaatgtgggccaatggaatttattaggatttaattgggcctagcccattaatctaacaatccccaccaaatttcatggctcacaggaaatgctctcgattctgatcctgtttgttataccagtgtttcggtggagactgttaagttgaacttccacctaggaaaagagctacaccagatcacaactgaataatggactatgccttgaattgtcagtctagtgcgattcaggtttcactcaaacccttaactggtactaggcagccgtttgcatcccctctgtttggagcgtataagtcatactcctggccttttcatgagtatctagatatcacccagatctcatagactgtgactagcagtcggactcatataggtgtgttccttctaagatgttctgtaggccaacatctctgctttatgaaaagccactcggatcatattaaggtgtataccatcctaccatacagattagaagagaagtgcatcatgaagataaagcccattttagggtctcttctctcagttacacaatagtttgtttcgccatccaaattcacgggatctccgatcacaatggacaggtttccaccatgtgcaactctaagtgggtctcaagcccatctccctcgatgcacagtctatcacattacgtggtagccccttggtaaactgatctgccagatttttagccgtctggacatagtccaatgctatcactccggaatttttctgctttctgacagacttcagtcttcttttaacatgcctggatgacttcatgttgtccttcgaactgttcactttaataatcactgtttgattatcacagttcatcaggattgctggtactggtttttcaaccaccggcaagtccatcaggagctcacgaagccattcagcctcaactgtggcagtatctaaagctgtgagctctgcttctattgttgacctcgttaagatggtctgcttgcaagacttccaggaaacagcgccacctccaagtgtgaacacatacccacttgtggcctttatatcatcagcatcagatatccagtttgaatcactatagccctccagcacttttgggtacctggcgtagtgaattccatagctcattgccccttttagatagcgcattactctttcaagagcatgccaatgatcatctcccggatttgaaacaagccggctcaacttgctcacagcaaatgagatgtcaggcctcgttgcactagctaagtacatcaatgaaccaataatctgggagtacctcaattgatcccttgctattcttcggtttttccttaatagcacactaggatcataaggagtaggagctgccttgcagtcactataaccaaagcgactcaagaccttgtccacatagtgagattgcacaagtgtaatcccaccctcaactcctctcagtagtttaatgttaagaataacatcagccactcccaaatccttcatttcaaagcttttggacagaaagtccttgacctcctcaatcacattgaggctggtcccaaagatcaatatgtcatcgacatataaacacaagatcactccctctcccccaccatagcgatagtacacacatttgtcagcttcgttcacaacaaagccagcagatgtaagtatattgtcaatcttctcatgccattgcttaggcgcttatttgagaccatacaaggacttcaacagcttgcacaccattccctcctgacatacccatctggttgatccatatagatctcctcctccaactctccattgaggaaagctgtcttaacatccatttgatggacgagtagaccatgagaggctgccagagcgagtagtacacgaatcgtagtcaagcaagcaaccgatgaataagtgtcgaaaaaatcctcgccttctttttgggtataacccttggccacaagccttgccttgtacttttcaattgtaccatcaggcctaagctttttcttgaaaacccatttgcatcctacaggcttacacccatatggatgctcgacgacttcccaagtaccattagacataattgagtccatctcactgcataccgcttccttccaatagtcagcgtcaggagatgaatatgcctcttcaatggttcttggagtatcatccacaagatatacaatgtagtcatatccaaaagactttgcagtcctttgtctcttactctttcgagttgctacaatgttatcctcctcaggattttcctcaagcgtttgatcaatgtgttctatcggcacaaagtgctcaggggataaaataggttcttgactagaagtgctaggtgcatttttcataggaaattcattctcaaaaaatgtggcatctctggactcagtaattgtaccaactcgcatgtcgggtactccagaatttactattaagaacctatatcccacactgtggatagcataaccaaggaacacacaatctacggtctttggttcaagtttacgctttttggctataagtacatttaccttggtcaaacagccccatgtgcgcaggtgagagagatttaatttcttcctttcccattcctcgaatggtgttacttccttatgcttagtaggaattctattcaggacatgacacgcagtcaatattgcctcaccccactattccttggaaagtcctgcagtgtctaacatggcattcaccatctcagttagagtgcggttctttctttcagctaccccatttgactggggtgaatagggaggcgtcctctcatgaataattctatactcttcgcaaaaagaaataaactcattggaaaaatactcaccacccctatcagaccttaaccgtttgattttcctttccagttggttttctacctcatccttatagatcttaaagtaatgtaatgcttcatcctttgttttcaataggtacacatagcagaatctagtgcaatcatctatcagtgtcatgaaatatttctttccccctttagtcaacacgccgttcatttcgcacagatcgaaatgaacaagttctaatggtgccaaattcctcgcctcagatgccttgtgaggcttgcgaggttgtttcgattgaacacaagtatggcacttagagcctttgactaaagtgaattttggaattaaactcatattggctaagcgtgtcatacaaccaaaattcacatgacaaagtcgcaaatgccacacattggactcatcatcatcatcgtttacatggttcacaactttattacacatatcatccaaggaaaagcgaaacaaacctccgctgtcataaccttttccaataaacgttccatatttagatacgacacatttattggattcaaacacaagtctaaaaccatctctacacagtagagagccgctaactagattcttctttattgaagggacatgctgcacattcttcagctgcacaatctttcccgaagtaaactttagatcgaccgtaccaacaccatgaacagccgcaagcgatccgtttcccatcaaaaaggaggaacctctcccgacttgataagaagaaaacagggaaatgtccgcacacacatgaatattagcaccagtatcaacccaccaatcaggtgagtgacacacagagagaactgtaggtaaaaatttaccataccccaatgttcctctaccctcactaataaccatgtttgcaaacttcttgtccttgtgctcaggacaatccttggcccaatgctcaggcttgccacacaaaaagaaatctccttttacctttcccttgcctttcttcttaaaattggttgtagccttgggtttgacgtcaggtttgactttcttgttgttgttgttggatgcgtgagggttcttcttctgcatcaaattggcgctagaacctccctcgatctttttgcaccggttatcctttgccctcaccttctcctcaatacccaaagagccaatgagatcagtgacactgaactcttgcctcttgtgttttagagaagtagcaaaatccgaccaagaaggtggcaatttggcaataatgcctccagccacaaacttgtccggcaactcgccgttgttgttctcaagttccttcagcatctgaatctcatgagcctgttccactacagaacggtcatcgaccatcttgtagtcatagaactgttccatgacatacagcttgctgccagcgtcagaaaccccgaacttggcctcaagagcatcccacatgtccttccctgaaggtatgtgcatatacacatccacaatattatcggcgagcacactgatcattgctccacggaacaagcaatctgtagcctcaaacttagcctcctcctcaagagagagaggcggttcactcggtttgccccgtgagacaaagaaacaatgcatcaccgtcaaccacaaaagtgcacgtgctttccatcttttataatttgaaccatcgaaagcatgtggttttagtgatgcagcaaagccaactaccgaaaaagacctaacaagtttttggattgttggaaatttggtcataattcggcatattttaatccaaaatattaagataataaacatgacatttacaatatgagtagatctagtgacagtgctagatgtatacaacttgagtatgcttaatatgaaataagcatcaacatttacaaagtaacgcaatgctgccattgcgaagagtattaacaaagaaacatctaataaaatcgggagaatgaaagtataccccgagaacgtcccaccgctggattttgaggtagtattgcctccattgatgtcgttcatcttcttgtctccaatctccgttgacatcttggtgaaggtgccgatgcagcagcagtagccgcgaagaacaatagcagtcacgcttgaagcgctacccaaaaacttgatcgcccgcctacccgtgcaagttctcaagcggacggagttccggaggcacctgctcgtcccgtacacctgtgcgcacaggtgaacagaaccggggaaggattctgcagctcaggaacaaaggaggaggaactcgaagtgcaagagtcgtgaagaacttcttccgtcctttggatcactgcggagtatatatatgcgagcgcgagagtaacgttcggagtcatcaaccacggtgtttaatttcgtaaccgacgcactcgttaatacggaatcaattcatgacatttaattccgtaaccgacggaatcaattcacgacgtttaattccataaagttcattgatacgaaatcaattctccgtgcttattaccatccgttacaaaacgagatagcgcagcagttgtctgcctcgcctctcctcgcctcgccccacttggttgtccgcgcaccatcttaaccggtcaacagaaactctccactagctccgtatttaagttgagacctcttcacttagatttccaaagtgatattattatccatagcacttaatgtgggccaatagaatttattaggatttaatacaggtgctcccttatttttgagtgcaggtcacggcaagacaggaaaaggatttgcttaatgttaagatgtcacgctaagaaaaaaaaaagaagcatgtgctccaactccaacgctttgaaagagagtgaattttctttgtacaaccattatattgcaaatgtaaaaattatgttatttgagaatacaatagtgtaaaagattggcgctcctagatttctaatgccattggaaagcacccaatacttaaaaaaaatagggcgtctggttcttgccattgccattttattgaggtgtacgtgaggctcgaaattaggccaactagcccaccacttagaccaactagaccaaatagccggaaaactccaactcgagctatgctttaatcaactgtagagaatggttcaatgaactgactttggcctgatatatatgatccctctagtcaaaccaaccatgataagtacgatctttggtgaacgtcatttaagtgtatccaaaccaaaaaaaaaaagtgtatccaggcttggtttaagcacagtaggtggcaaaattaccagtacttacaggaaataagttaaataaatttagttattttgtgtgattattatgtaaaaaaaagttattttgtgtgattttatagatttgtactccctccatactcataaaggaagtcatttaggacagcgacacggtctctaaaacacaactttgacttcttgtttctataaaaatatttattgaaaagtaatatatgtatacttttatgaaagtatttttcaagacaaatctattcatataatttttacattttcaaactcaacaacttgagagatatttatgatttatattcctaagatttgacttaaacattttcctaaacgactttctttatgagtacggagtgaatatgtaaaattaattcaggacgtgcagttctatcggttgcatttatgggtagcggataatattccacgctaacaacaaacaggtagaggtagggcacgcagtaggctgtagttataggattgaaaaatagggggtcggtagttggcgcgcgtgttttctcaagtaaggtagagataatttcggtagtagttaagattttcttttttttcacgagacttttttcaactaacaaattgaaaagaaatctatatttgaaattaaatttttaaaattttaaacctatatttgaaaactttcaatccaagatttgaaaactttcaatttgaggtttgaaaattttcaagtttagatttgaaaatttttaagttaagatttgaaaaattttaagttaagatttaaaaattttcaagtcatgattttaaaactttcaactcaaaacatttgaaaaaacacgtgtaataaaaaaaaagcagaaaataaagaaaaaaatatcgccaaaagaaaaaggaaaaaaaagggaaaattgcaaaaaactaccccaaatatcactataagtttgagatggcccctataagaagatttgttgcaaatccccacctctccacctcctaattcaccttggttcgatttaggcaccttctctctacacatgcgtgatttaggcatctcatggcgtaattagccaagtcccgctcatcgtgatgatttgtcaacaggtccctttttgcattagattgtgtggccttaattttctgattaaaccgtactaaacttgctattttgggtcatctgatcaattacaacatatgaaatcatcaggtctaatctaactatatgattactgcttaatgttcaaatgtttctatatgctcattacgtccctggaaaaaaaaaacggatatgttgttcagtccaaaagatatcgatttggaatatatagctaggataccataaaaaacacagtgaaatggtcatgacatcacaacgaaatgatcagtttatactgaacaaacatcataatctcttgcacccgccaagtgggactcggttgattttgccacgagattcttcaggaatcacgcacgtgtggagagaaggtgcctaaatcaaaccaaggtgaattaggaggtggagatttgcaacaaatcttcttatggtgaggcatctcaaactcagagtgatatttggagtgttttttgcagttttcccaacgagaaaaggtcgtgtgggaaggagccaccagcaatgttgctagcgcgcgaattagcaatcctgggaaaatagagcttttcggtccgctccggagaaaaatcaaatacgatcgtgacaaatctctgttacgaatatggataatttctaccaaatatgaataggaattttttttgggaggagatacgaatacgaatatactaacatttctgttcctggcagatatgcggacgttgttgctatacaagtatccacgcgaacacatagcgtatctctggctcctttctgccaattttcttagttctttaatggtattttagccaccaccaatatggttgtgtttagtttacctgaagtttagaagtttggttgaaatcggtacgatgtgataaaaaagctgcgtgtgtatgaaaggtttgatgtgatgaaaagttggaggttcgaaaaaaaactttggaactaaacaggacctatatgctacaattatatacttaaacatccattaaacctcctacaaacactctcaagctgtcacatggccttttataaacgctcataaactatcgtgtggtgttctaataaattagaaaaaaaataaaaaaaaattgataaatatctaaccattgatttcttattaaattggtgcatccataagttttaaccattaaatctcttaaaaatgggatttactatagttgtgtcgacagttttttcttctatggttacattcagtactctagctgccgttggatctatgttaaagatctgtgcttccatccgacttttttctcgggaagagtcccgcttgcagctatagcagctaattttgtgctacatacatgcattctaatttagcactaactttcaaatacgaattcctatatcttttttccgatgtactagagcatcaccgacagtatttcaataataaattcctaaagtgagaaaacctatagaagagaaggcctaaaattaatttcctataatcaaaagtgggccttttctactcctcacgcgcgcaccacgtggccagctcctccttcatctcattattttttttccgtgcgcggtcattttttctccttgcacgcacaagagagagattgggaaaaaatcgttctcttgaggtgaggaacgagatatccggagttgagaacctggatcactgggagaggatactaaatagaatggctgcgcgcgttcttttctgtggattgaaaactatttccctccgcacagaaaacagagcgatctattagcacgtgattaactaagtattagctatttttttaaaaaaaatggattaatatgttttttaagtaactttcgtatataaacttttttaaaaaaacacaccatttagcagtttgaaaagcgtgagcgcagaacacgatgtagaggggttgggaacagtgagcaaagaacacagactaaggaagctgttggtcatgctcctcggatttaggaaagttcagtcaaaaattgcatccaacgtaatccctaacctgtctcccaataatactagttcccaactccggatatctcgttccccgctttaagggagcgattttttttttacgaattgctctctcccgtgcgcacggagaaaaaaatcgcgagatgtaggtgtaggggaggagagaaaaactaattttatctgttggtagttaaagggagtgcccacttttcattacaggaattaattttaggctatcttttagagtgagattagttttctcactttctatattctgtttaggagctctgagaaaaaatagttttgagaattgatcattgtcaatctcttggtgatgctcttagcagtacgtacggttgactctaactttcaaataattattgtcaacgcacgctaacatgttgatcaaccgttgatctgtgaaatccaagggctaaaaagctgattattatttttttgccaaaaaatatgtcaacagatttatagatttatagatagtcccaaaaacacaaggtagcctcacccccactgtgggcaagtacgtacgtactctctctatccggccaccctccaaccctcctactctatatcttctcctatttttttaagctaataactatatttacattatacatatcatctcatctatgacggcccctcacatgtttgagttttgcaggccgtcacaatgaattcatctcaaacggcccaaaaaaaagagaccgacaaagatatactcgcatagacatgttagatatgcatagaaatcgagcccgtcacatatgacacctatcggtgatgagctccaacttaaggcccgacaaagataaccgatgatatctttgtgggccctaatagaagcccgtcaccgatgtccatcattggtgacgggctctaacttaaggcccggttgagataactattaggctcatcattgatgacgagcttttgcttaggctcgacaaagataactgaaacccatcactgttgtaagttttttttggccgttatagatatttattacagtacaaatacccgaactacctagtgtaatggttatcccacttctcactattttgatgggagtgtgagcgggccgatttttgtctctgttttccaagaaaatcataaattgcaaatggaattgaaaaatagtagtcaattctcataaatttagtaaatacttacctgcaaaatttatatataatacttttccacttttttcagctcagggatggaccaaagttggatgtatgggaaaaactgtatgacgtcataccaaggagtatagaaatggtgtattggatattattaacgtcgcggaggaggataggaaaacaagaaatagcgattacatgtgttgtacatgtgcagattacaaacatgagaatatatttgatagcagagtggactgtggacgtacacgcttatctgatacaaagaggtttcatggaggactacacatgttgggtgaagcatagagagcaagaatcaggaagtggtgcacaaaatcaagaagatgaagatcatgagcatgaatcaggaagtggtgcacaaaatcaggaagataaagactagggttcactctcactcagatctagatcgaaaatttttctaagctctgccactctctgaaccctagcggcgccgccctctgggagcccgctgccatccccgagcccaacaccgtcgtccaccgagcccggcgccaaccccaagccagcgtcggccgccgtcgacctcctccacaccgtccttgcccccgtccttgccaccaccgcatcgacgtcccccgccgtccccgagcacgcccaccgcctcacctcctcctccgctggttagaaatttttgtgaattagtaggatttttaggatatgtttttgaattagtaggattttttttgaattagtgaaatatatttgagatgtttgtgtgtgatggtacttagtgaaattgttgtgaattagtgaattattaggatatgtttgtgaattagtgaattattagtatattttttgaattagtgaattattaggatattttttgaattagtgaatctagggtattttattgatgttaaggtgatttagtgaattattaggatatgtttgtgaattggtgaattattaggatatgtttagtgaattattaggatatttttatatatatgaattagtgaagtattaggatatatttgtgaattagtgaatatatatgtatggatgatggattttagtgtagatagtacgtaggttatcaaattatcacataatacaaggtgcatagggtccgaatttggttttatcgagttagtgcattcacagaactgattaagacaccttcggacccagcgcacctcgtattctgtcatttttttgataattattcatttatgtatggatttagttccttggttatcaaataataacacaatttgaggatcatagtgattttaggatttagtacctaggttatcaaaccatcacaaaatacgaggttctttgggtgccaagttggtttggtcgggttagtgcttggacggaaccgaccacgacaccttggcacccagagcacttcttattctattatttttgataattaaggaactttaataggaaatatgtatgtttagggtattttaggggtttaatgcaaatgtatgaaatttgtgatgtgagttactaatttaattaattttgtgattttgtaagttatttagacgatgcctcagcaaggcgaaccaatattgatgacaactagagggtccacaaggacacggacccctaggatagggaacaaattaaatccctaaggaacggtacaccataatagaggtgaaccacctaggagtgttgataagtcccccaaatgttctgaagaggtacaagttgatatgcggggtcatagcgagggagaccttcatcattttggaggatgacatcaacctagtacccgaagccgagaagaacgctgcttagctaaaattcaaggagagcttcgactatcttgcagccgatgaggataggctcaagagggcggctttcaagaatatgggaaattcttggaaaaactttaagtccaggatggtcagtgagtacgtcctcaacccggctactctggagccatttgggaccttcccgttcatcacacgaactgtgtgggagtagttctaagacaagaagtcgacccccgaatcctgggccataagcgagggttatcgggcactccagggtaggaacttgcacccgcatcggcttggcaccggaggatatgcctgacagtaccctcggcataacacaatttacagcagcgcaccgtatcagaggtggtctctcgaaacaccaggaggacatagttagggggtattggctacatgattgtatactaacaagtgtaaactactgacaactatatattagaagtatatgaacgattcttttttttattcatcctccacttagcctagattatattttggcagagtagttcttagttctttcttctgtgtgtcacccttatcatactcacgaattaattaaccccaacatagattttgatctatacaagtaatatatgaattattagcatagtactctcttatcatatgttccattgggattaaataaatatgataccttggattactcatggatgaaatgctacaatggtatatacgtgcgattgcggattatatctgtgaccataaatttaccaagaatatttcggtgtcattgctttgaattatatttctattaatgttgttaagaaatatcaacagggagttggcccgaggagggaggaagaaaaatagagggacgggaaggggactttgggctgggaagggagaggggggagaattttgggcttaaaaaggcccaaaggagagacagaattattttatatttttctttttataaaactctaaaaattggttatgttgattagaattatttatagtcctatgaaaattgaagcaaaattttagggttcattttaggctatggagaatttaagaaaaatacattcgaacttttcttgttttattgtttgttatattttttaggattttaataaattctattatttattttagagaatgatttataatttgggatgaatttatcatggcacgccaaatctccactgccgcagaggcctcctagcaagttctttgtattttccctttgccttcttcctctttaggtaacattttgattggtgtggtatgtgctcgatggaatctccttatgaggacagagaaaaggagatgagggaatttgtatgtgaaggaaacagttcaaagtcccgtgtcttttattacgatgtgatttcctcttttgtgattgtatccatggacctccgaaaggattgtatcactggtataagcctctttcggcttgactatgtggcatgtccttggactgaaacacaagtgctcagtactagccttgaattgtgctctttcttcttgatgaaacatatacatagaggagagaaggtagggaaaacaagaacaaggatgcctcacacgttctcggacacaagggttccatttcaatgttgttggaagaaggttatggtatgtgttgaccacgacgatagcgatagccatggcgacaataggatcttagtgggagccattgaaggtagggtaaaaatttaagggttaattaaatccatgccactgcaactttgctaaatttaaaaaataccactactattcgtcgtatcggctacatgccactgaaaagttctaaaattagaaccataccactcccgtcggtttttctgtcatcctctctcacgtctatcattggtttctagattttggatgtagtttttatttatatttttatatcacggcgttctacgactactcattgatggccgcgatcgacacggtcgtgctcctcatcatggtcgctgcgctaggtttcctcatggtgccttatgcgaaactgtagatccgggggttggggctcggtggtagtcttgacatgctcaacttcatggcgctcctggcgtggaccgagttcgaccttaactggaacaacttcaccagtgcaatcagagagcagcggggaggcattgtcagcgccgagatttgggtctgagaggagcataagcagagaaagaggagagaatgaggaaagacagaggtagaagatggggacattttcatccaatacatacaaaatactatcttagtggcatcattatagatatgcaaatagtaatagcatattttgaaaccacctaatttctaatggcatataggagtatctaattaacaaaaaaggaaaaggaaaatcacctcactctcccatcccccttctgttccacgacacggcctgcccacacggcacggtaagcccaacccaagatggaagaacccgccgccgccgccgcctttcccgatccgccggaggacccctccccctccccctcctccgcgccttctccggccgccgcggcgcctcctccggggccgagggagctggcggcggcgatggaggcggtggagcgggacgtcgccgccatctccgacagctacgcctccctcttcgcctccctccgcgtcgccctcgccaacgtacgtacgcactcacgcacgcgtaactggactaagctcccgcggcttcttccaccctccacccttcgctcgcttctcccatttctccgcctcgcttcgtttgctgctcgttcgcttcgctcactgatatattgtagcctaaccctcttgccgcaaaattgaattttaaaaaaaaaggtcacctcgacgtcggcggagaacatggagtgcctgggagacgtcgtcggccgcctccaagaatccggtgaggatgtttgcttacgaatctgcaaatttctctcgatttcatcataagggtaaacgattggggggaaaaattatgttataggggggtaaggctgtaagagtgtgcgacatttacctctgaatgctaattcttgtatggtagtagtttgcatccggacatggtgccctttattttgatattgtagttggtaattcgatcatttcgccaggtttgcttgcgcattggactgtcatattttctctttgtacagttggggtgtcctaatgttgattgtatcgttggttggttgctttatttttctggataaaaaagaatgattagattcgaccaggtggcgatttttacctttttactctgtccctgcagcactcgaagcttcttcgaaaggaaataagtacatcaattcgtgcttgaggtgatcactttcagctaatcttcgtcatctttccgttttctgctacatctattttttctctatgaatgtagatgggctaattgtagtgattttatagcttattgtatgggtgttccctttcctgtttcatctgtaactgtaaaagcattcatccttgaaactgtggactgtttatatatgaaatagtaattttgctttcagttccttcatacattattttaatgacctatattgcaggttgaatgaggaaatgagaggtctggaaagcctagccatgcaactgtatcctttgttagtttttataaatttgttctcctggatctatgtcatataattaatcaaacaccattttgctgtgcagttttattagttctgaagtatattctgttattcattttgtaagccttaatatttgtaaaagaaagattttacggaagaatgttgattcactagacttggctgtcaatcagttgctccgcctcccctagtcagttgctgttatccagtaggcagtagctaatgcaaggtaactaccactgctatatgatttttggggtcatatgcttttaattcttttttagttttttatatgtgcagtaagtgtttaatgctttcacaaaaagttaacagctagaaatggtttttagattttctgcaatttggtttcaaagcatggacatgctactccacatgtggcctatctgatgatggaccccttgttactacatctcttttataaatgcaccattattagctgttggggaaacacgagctttattaaaaagagataaattaattgttaacagagagtgttcattcatggcctgatggcctcatgaattgactacccgaaatatatatttattatgtatatctgcatactgatagtttatattctggtatgttgtgttatgtactgattcttttataaatcatgtactgcaggaacatgtaatgacattgtttcagcaattatacataataactcgcgctccaagacagcaaatgctataatctgaaatggcacacaccagcaaaggagaagatttaccttgtgtggcaatataaaatactacatccagtgtttcacttcatttcctcttctatatgtgtgcttatgagctccgtatttgtatagtgggttattcaattcaacccatggtgacataatatcattatctgtaaattggctataaagactatcttcatcactttgttctaactccattcaaaagaaagcaataaagatcctttttattgtttgtttgtttgtttgttctactattaccctgtctccgtttagccatcatttgatctatcctatgtgatcacttgattgtgttaacacatatacaatttcttgacgtgttgtttgttcggtcaacttattttaaagtttaaatattctcatatgaataggtctgcactcaatagctacgctagttgcattatgaagggaacttaaagagtgttatcttatcatggacacttattggacgtgcacatagtaccttttcatgctattttttgctcttcatgcttatgtttgtacttaagcagattccatgtgattgcatgatggagccagaaaagatgaaggtctgtgctactctcaaatttgtaaggcttgtatagtgttttatctgctcctaattgctatggttgatttttacatttttattttattcttttacttaacatgacttgagtatgttaaaaaatgtgaatcatagctaccactagtttgcaggcagccttgtaattccatcactattgttgctctccaatatgttggttgatgccatatatttttttggttcttcagatcctaggagggtaaaggtgctgcttcaaatgaagagcacagaatgaatctccagatttttcataggcagtaggtactgattctcatgctcgtaatacattcagatttttatgctcagatttaagcacggctatttatttgaaagagactttatttaagcacggctatttatttgaaagagaatttattcaagcatgagtattaatttttattgaacataggatagattcctcagacgtatcaaattcggtactccttgattgtgccaatgttgattcaattggacaaactactgttgataatgattcttgtaagctactcatagtatgcaatttgaatttcaatatcaagtcaagaaaattatctgttgaactggacttattttatcctctcagatgaagcaacaattacaaatattaatgtatttcccttaatgctatcatacaacaatatactgaaaaacaaaaaataaatacacaattggatattgatctctgaaaatatttatagcaaagaatctgtctttgcaggtagcctcctgaagaagttcacaggtgccgatggaaccttatgacgaaaccgtgggtgcctcatccagaagaaaccaaggcagagtgcaatcacttggaatggtgtcacatacaagataactgcagtaagcaggcaaaacaataggaacatagatgttgcccttggatccctccagctgagcagcgactgcagcctctctccttgagttgcaatgtccccaacaactgtctgtatcctcccagcaacatgccgtagcctgtcatacctcatcctaaccagatctggactctttgatgttgggaatgtatcaaattcttcatcaagctcatctgggtttgtcatatcggcatgagatatccttgtgttcatatgaggtgggaaacgcggccggaaccggtaattccacaatcctatcaagaacatgtagaggaagattgttgggaggataaggtctgggtagaagacaagcatgataaatagcacatgaactaaaactgttgtgactgggtttttccactgacaaacgtcgccaaaccactttcctgcagcaatgaatccggagaagacttgcataagacggaagaagttagccttgcttcgccgcatgctccacaggtgtgagcgggcatctgacatgaactcaacaacttccctgcgaactggtggctccatgcgccctagacgctgtgcgacaagttgcacagcttggtggcggagcatttcctgctgcactattgacagtggttgcgcgtaatgcatcttgggcaagaggggccgagaatatgtgaagagcacattgagaagggatgtggctgtgaacctgatggccaggtggagttctcccattttcttaactcctgatgggtggaggacaagtaatggatacgtgtgtgtgtacaccctcccagtctcaagagttgaaagccgaattcgcactttcccgatgggcttgtccatatggccgggggaactactgtggttgctgtctgcagatatgtggcagttgtcaaataaaccaatggtgagcactgttccatggtcgaagacatcccatgtgtactgttcattgaatctagggttcaagttgtcaacaatagtacgtgtccgcacccatttctgaccatacttggcaacacaatatgcatcgcatgacccccgctcatgcttggtctttgttggattgagcccatttgcacttagaatgccaacttcaagcagaccgattggtggtttccacagctgcttcattgttggccggagatcgctacagtactgtgtggactcatcgagcacatggtaaccaccttcaaggcaaatacgaagttgcacctttgcatagaatttatcttcctttagttggttcagatcaatcagtcctggccttctgagatcaaaccatgctggcagcactggcttatggtcagccctccttggaagccttgcgagaggtatcatagtttcaccaatcacttcatccttgttctgagcaactcgatcctctatttgtatgatcaagtcctcctcgaaaggctctgccgcgacaaacatcatctcctcattccacatgaagtttctggttggtgagcgagctggccttgtcttcagcatttggtggcccagcctcaccttaacaaatacatcaggtatgtggttctccattggaaatatatcctgtgccccaattacattgaccctcacataccacattctgggtacagggtagaccttcccacggatgtagttgtgaagatgggaatcaattggttctgatcctgcgtggatggcacttgggaagcactcatctgcttgagttccataccagacagcgagcatcagctcccctttatccctgtgcccttccttccccacaagtcgataccactctggtgccaatgggctgtcaggagggacccttagtggtacctcatttagatctattgacacccggccaacataatcatcccgaatgaagtccttatccttcacaataacttcaagtgacgttgactgcattacttccctagggaaagcaaacacctcatcccactcaggcctctggttcttctcaaagtgccttgtcttcattttgtagtttccgaggtgcacctcaacataaggatcaagactcccagtgatgtccatgtggggcagatcacgggccttaaccacacgcacaaataggtactgcatcttctcaacaaggtcgtatgcccctgccttttcaccggggatcacccggccgccaataacacgtccgccaccaagtgttgggcttgtttccttcagctggaattctacaggctgctgctgtggaccttgagcatacatcctcatgactggaggtggaggaccttcagctttgttcccgacagcagagtaggttttctgttgctgttgtccgtatgaactttcagggtagtatggctgcgcagtcattggctgcggacggtgctggtgctgttcttttggtaagtgttggaattgcctcacttgatctgctctggtctcctggaaaggatttggaatggcattggcggctacctgctcttgggcagtcgtaggcgtgcttatgaagtcgaactcctgaccaggagcggacactctgactgatggatcatctgtaaggaacaccctgagaccgagctcaccacgagcacgggataagatcgtgcgcttctccagggggtagtgaagaggtgtggcatctgagtggctgacaaaggatgtaccggagatccgaaccttgccaaggcaagtcttggaattgctggcgcggtttgcgtggtacacatacgcctcgaggtctttctcagtgaggcgggatggatcagatatgttgaagtagaactgctcgttccagacagggttgatatccctctctttgatggctgtgcggaacttctggtcatcgaattcgatctcgacataggggttgcatgtgccctgctcttttggtaggaggtcatgagcactggtaacctccaccccaagcttaagattgctcatcatgttctgccactagatcttgtacctctgcagcagattttctttatcctgaaattagaacaagaacatgtatttagaaacctgccattgctgaaaccagagaggtagctggcagcgtaactaccactttgacaaatgttcttggttgcaacaagagatgaaaaaacaaaagaaggttattgcagaagaaagttgtgccagctaaagttggttgggaaagttttgttgggatatcgaatgcccacaagatttactttttcccaaggaatcataagattggtagtaggaatcatcaggttgtttgaagcatatcccgcacagaatgttcaacaagaaaagtgttgacaacaacatgaaaggataaagaagaaaaagtatgtctcctttctgcagatctttgtattcacatcagctggatatcagtttttaactccctgtctggaatttacatctttacagatggaagctatctatcatgataggagtattctgcctcaatttcaaatctttggagggttgctacatacgtgtacgcttgaaatctctattaattacatcctacaagtatctttactacaatagaagtatctttaaaaaattcaattatacccagatgatgacatgttgatgcacacatagtcatcaatcaacatttagactctaaacacatattaaattcaatccacagatagctgcatgcatgcgtataaaatgtgctgaaataataagttacaagtaaaccctcagcagcatttggtagaccagatgtgaggggtagggaaagtgagaggccaccggccaccctcttttctgattgggacatccattgtaaccacataaacaattgatcaaaaatattattataacataacagaaacatcaatttttattaaaacaagaaaataagaagcataagccggtatgaatacgatgcctgtttactattactacagcctaattagcttcctggaaaacgctttgattaacagtgatatgtggtcagatgacataaatgaagaaacaggattctcaggtctgaaaggtagcatttgaattgttcaattaaaagcacaaatgggcatgagctcagaatggagaaaaaaaagtaagagaaactttgatggatggacaccatggagcatggaccatttcttgcacctttattggaaaaggttggcaggtgatggctaagagatgggggagggtgtcaccattggagttaagtgaagtgctccatgatgttgcatccatccatacatacatcagatatcaaaatcatgtttattcatgtgatagtctctattctctaggaagttcaggcacttcattaaatagatggagcaaggaccaaatgaaattaaattggagatctcaacagagaaaataggatctgttttcacatttttgtgcctccttggttgaactttggacggttttataggaactgaaatttcatctcccttcctcaactcagagtaccataaacaaatctgcagccctcatagtaaacaatctaagaattcttcctcccttacctagttacctaactaataactttcatccgttcaacaaaaataactaatacaaatttcaaaacaaaagaggggggtgaagaaaaagccaagacaaacataccaaaacttctctcgggtacaaaaacagaatatgattaaattcacccaaaaacagactaaatcagccacgcagaagcacaagacggactctagaaaagaactaaagcaaatccggaatattcagagcaaagcaaaacatgcagaggtgtcagcagggagggtggtaaccttgagagctacgatagaagccggcagagaagcttctgctccacgtgttcttgatgtcttcttcttcttcttcttcttcttcttcttcttcttctccgttttgattgattcaaagtggagaggaaagagagagagagagagagagaaagagaagcgtacgggactatgggttatctatcctcttcgcggcaacaaggagagaggaggaggaagatgaggacaactggccacacggaggagcagccggagaaaaccccaacgtatggtagggaaatgaaaacggcaggtagctagcgagaggaggaagaagaagacgacgaccccgaagacgtaagagagagatggacagggatagatatagagaggcagatcattaccccagcctatagagcgagaaacacatgcaaatagttgttgcttaattgcgtgttaaggttattaagatattattacactgcttgggaggagctgagccgaaaccagcgtgtgaaaaggggttaatttagaaacagcagtgcctatttaaacaaggattaaatgctctcttaggaggaacccaaacaggattgtgttttgttgtctgtacttgcattgctagtataagggtgaaaacagtagaacatggtcggaaacagtatattattttttatgggaacggtttttggttggtcatgaattttttctatatacatcaacttaactatttagtgacgattacaatatagttctgatagatatgtaaaaaaaaaaatcaaaatttatactttctccgtttcataatgtaagactttctagcattgtctacattcatatagatgttaatgaatctaaatatatatgtgtgtctagattcattaatatttatatcaatgtgagctaatgttttacattatgaaacagatggagtatattggttgaaaatggtaccacttttacgaaaatgatatttcgaacgctcaggaatttcagccaccgtttttgttataaatgaacaatgaaagagatttcgttttaggtaaaattaatcaaggattgttctgttcaaaacttactgttttttaatatgattattagatgtgattaaccaagatttttttatgtaaataatcaaaaggattgggttaacagcgacaggtggaatatacatacacggatcagaagcgtggcgacggatcaacgagaggctgtcatttccgtcgcattccgacgctgacccttcactactgtggctggccactactgttttgtctgtttatttcttggtgtttgcttgcttgattattattccccttttttcctgcttgctttcttgcacactaatacccccatttacttgtggtccttttgtgataattatcacgctgaatcccatcgttttttttaacagtccttacctatcattgcagtgctagtcaaccgtcaatgcactggcggtttttgggggcattatactggcgctgatttttttttatttggttttgttttaacaatataactacctaccccacgatgtaatactgctagtttatagtttagcagattttattaattagtcgtcgtatcatcacatgataattgcagatcagctctcgttttctttcttgactcgacatgcactaaccaaaaaactagtcggggactgcacgcacgtgccggtgcaaccagcctctctttttttcttcccatttagcaccagttaatttgtaagaaaaacgtactctctccgttttcaaaatatttggcactttgactttataataacgtgtttgaccattcgtcttattcaaaaaatttaaataattatttattcttttcatatcacttgattcattgttaaatatactttcatgtacacatatagttttacatatttcacaaatttttttaataagacaaatggtcaaacatatgctaaaaagtcaacggtgtcaaatattttgaaatggagggagtagaatttagaggattttaatctatatatgaaaatttccaaaggaaaggtctttgaaacgattaattaatcctatcattttcttgaaatcctataaaacagataatcctataaaattttagagaaaagttaacaatagctccaacctcttaaaagatatttatgtgagtctatctctctcccttgtctcacgtctttcctgtggtagagtaaattgcattggtggtacacaaacttgttaggatggtgcaatttagtacataaacttataaaatgcccatttcagcacatgaacttgtctagtttgtgcgaacgaggacctaaatatcattgttcggtttttttcatctttttctactatcactatatcatattctattttttattgagaaggtgtatgtctaatagcaaccttcctagatataagtttacatagtatattaatcagcccctgaataataagattagccatgtagtttccttttcgccttcctccgcacgcaccagacaattttatgcaccaaaacgagtattttacaagttcatgcactagattgcacccacttggcaagttaatgtatcggtgatacaatttacatccctgtgatatattcaaaggacattttttttatttttcttgtattttacaatcctttattttgcacatgcattcctatccaaatcatgcaatttttttatattttcttttgtataagagaccacttctcttttcaaaatttatgagcaattgcttagttttgattgactacgattttgttgcttagttttcgtcaagtcaatgagcaccaacaacattttgtcattgacgcgtgtcatgtgggtttgctagtataacaaccatcattattttacaatctcggaaaaaagggcgttttcatgctaatctaggattgatgattatgagctactagtatctatctattgcatcggatccaatagtttttggttccattatactgcacctattaaaatgggtttataatttttacagggataactaaaattaaaattggaaggcatgactgtagaacaaatatactccctccgtattgtaatatatgacgtcgttgattttttatgccattcttaaagaacatttgatgataaatcaagccacaatgaaataaatgataattacataattttttttgataagatgaaagaccaaaagtcgacaaaaaagtcaatagcgttatacactaaaatacggagggagtactttcaaatagattacactataatagattaatggtttaatttattcctttaaaactttcaaatatttttttaaaataattatggaaactaatggttagatttagattctactgctccctctattccaaaatataattacctttaaattttaaatttattttaaatatagctacctaatattgccactcttacaagtggtgctaaattatttgccactaaacccatatgtcatatacacatgagggcccacatgtcatagacagtgagtggcaaataattaattaccacatcttaaaaatggtaagaagttaaatgtcccaaaataaaagatgatcttactttctcatcctacccctaaccatctatatcacaccgactacttaactctaagaatataatgaggggtcgttttatcttgcaccataatccttaatatcctttaaaaccttcataagtaactataactattttgatatggagggagtactatcatttcagttaggacagagggtaccataaagcaagaaaaaaaaggatttgatagggttgtgtttagttcacgtctgattgaaattaaaacgatgtgacggaaaatttagaagtttgtgtgtgtaggaaaattttgatgtgatgaaaaagttgaaagtttgaagaaaaaattgggaacaaaaccaggccggagtactatcatttcaattatctgctgaacaatttttgcaggggagtcctggactgagtagttctagtttgctggtacactgcaaagaaaattgaatatggagtggcctggttgaatgtgctgagaaaataatgcagggtacagctagcgcgaaggaacaggagtatgggtccagacttgagagatactcaacgtaaaccatatggttgactgacttgacgttgacatggacttgttagagtacaagtcaagaaaataaaattcgcatagtactccttatgtttgtatttactggtcgctattacttttactgttcaaattttgactagtattagattttaaactgttagaacactggtggagaaatcctttttaatcccggtttacaactcctgtaatcccggttatgcaaccaggactaagaatctaaaactaaagatacccatctttagatctggttgaaataaccgggactaaaaatgaacggtatagtcccggttggtaactccaacaggagtaatatttttttttcttttttttcctgctagtatgatttcgaaatacacaaatcattcataaaattatccacaaatcattcgaacaccacaaatcattcacaaaatccccaaatacatcaagttgcattttctatatatccccaaatacatcagaaatcattcacaaaatcacaaaaacatctccaaaatctataacaaaattatccacaaattcatccacacatcacatgtcacacagatcaggaaaaaaaaatccacatcgaacagatcggctgtacacatcgcacatattaaggaaaaaaatccacatcgcacagattttacagatcaggcgccggccgtccgccgcctcgccggcctcccgcccagctgcctcgggctccgccgccgcctggggaacgcgccgcccaccgcctcggcagccggcgcccgcccgctggcgcctccccggcttccctcctcgtgcgacggccccgccgggcgcagcctctgcgcgccagccgccgccctccgcacaccggccgcggccctccgcgtgtcggcggtcgccgccctccgcgcgccggccccgcggacctcggctcgctcgatctgcatgcagcaaagaaaaaaggagatgaggagttgaaggagaggataaggcaaagaaaaagataagagagagtaagaataggagatgaggagttaagaggataagtcctaaggattatatacggtacatcaaattttagtcccggtttgtgataccaaccgggactaaagatcacggtgatctttagtcctggttattaacacaaattgggactaaagatccaaacggaggggcctgacaacccctgacagcatgtgaaccggggctaaagatcacatagccccatcttgcttataaactaggactaaataccatctttagtcccggtttttactgcaaccaggactattgtggtttttggccgatcaggcaaagatggtttcttcagtagtggatgtgataccagaaacaaaagtttatgtgaaggacaaaagtcacaaaacacactttgataatactgttgacagtaggaatcggcaataaaaaaaggtagcacacaagagctaaaataaatgggttgtgagacaaagttttactagataggttcggaccctctctatcgacgggggatacccgtaaaccggatatagagggtattggggtacgttggtacgaggatctatgtaatacgacatcaagcaggcagaaaacaaagattatactggctcaggccccttggtaggtaatagccctaatccaattgatatgggattatatgatggaaaccacatattacaaagggaatagtggaactcgatggtattgacaagatcgtagtcaacttgatccgactagatcctcggcgacttggctccgataagctctggcttcgtaggctgtggtggatgtgttggctctgagattcgatgccttaggtcctcccggggggtcccttttataccataggtcaactggtctccaagtaggactcggagacatcagacccgatacgatacaatgacgacccagttctatccgagtaggactccttacatctgtgaattccgtaatggatttccccaacttatgccgaaaacgtccgcatacgcgcaagcataccatgttgatatgtgacgtatatcaaagggtagagggtataactttcccgtaaccctgacagtagcccccgacttctgcttgaataaactcgtgaaaccgatcgcgacttctgatgtcgaagttgtcgtcgttctcggtgtgatgaccgagagacaagaagtgatcgacaatgccgggtgaagctcaatggtcatgagtgaatttaaattgaagtccgagaaactgccgcgcgtaacggacccagaaatttccggcggccatctctcccctttccttggaattcgcaccgtcaaaggtgcgtctatttaagggagttttggttctcgattcacaggtctgagcagcgaagccgtggagcgctgtgtcagccagatgatgatcagtggcccgacaatggcaagaacgtccctgttcccctttgcgagaagggggcagccgaacgcgaagctaccatcaatgtaagtgtactcgacagctcttttgcacttttttcccaagatcgcatcgtgacttcataaagcgtaggatctctctctgactgacatcatcggaccgctcgtggatcacctggcggcggcgtcactgaaggagaacatcgccaaggaggtgtccgatgttgccgccgctgctgccacaacgagtggcggcaacgttccgaagagggggaggaaattctcctccgtgatcggaaatcgtcggaagacacccactccctcgataagcttcctggtccttcatcgcgtgatcggcaaacttccaacttacatcatacccgttatgctccaggcctcagacgcgtctcccccgcctccgcgacagcggcgggttgtgatgcttggcgagaagtaagcggatgaatttgaggttttgtcactttgccaaactcatttagcctgtctcaattgcaacctttcgcagagcggcgcaggcaaaggcggcgcaagacgggtctggaggaacctccagcgcgtctcctgctgtggcctcgacagacgtcgtggccgtgcccaggagctgcgaagcgacgcctagtggaccggccagtgatcttgcggctggtcggggtccgccggctgccgtcctcacctgggaggagctccaggtcgagatggggcgcctcctcggggctggtgctcgcggcattagttgtgagatcgcggaggcgagggcggcggtggcgtcgtcggcgaatgagcgcgccgatcggctggcgcgtgatctggcagaggttcgcgaggacctccagaagatgagagaactggtggccggcaacgagcgacaacggcaggggctcgagcaccgcatgtcggagcttgagaacagcttgtcggaaatccgtggctcgttgcaggtcacctatactggtctgcaccagcttgccggggagtgcggtatcaagtccaccatcccggcgaatcccgatgagttctcgctgacgtcttctcttgcggagctggtgacggcgatggaggaaattccctccaagcatgcggccaggatcggagaagagacgtctaacgggatctacaccggggcgtgccacgtccttgcgtgtgtgaggctggcgcaccctgaactcgatctgtggaagatcttggatcagggggtggctagcgacgcgcacaaggatgtgatggaggaggtcggcgatctgggggagtccgtcctcccgcttttttaagagtagggtcttagctctcttgtactctttagtcatgctttgtaaaacttttattggtcccaaccgccctagtgtgtgcggtcattgccttagctttctttagcattttgatcttgagtgctttgttgtcgtttgtagagatgttgatgtcgaggatgtccagcagcgtgggcagcctgagttgccagtggtcgttccgttacttacgtccgagccaaatgtgccggagggcgatgtagatcgaagttcgcctgtggaaatgagcatggcgacgactcccttaggttggttgtctttgttatcatttccttttcccttccgtctggatcgacttgatttgttgtgctctcgggagagaagagcagcttgacttagtcgtttccatgctgagcaaatcccgagagtgcgcttgctgaccaggattgtcgcatccagtattgaaggacgaagtttgaggtcgcgggactcgagaggactatgctggaagtgagaaaggaccaggccatggagacactccggggtcgtgaggtgtggttcaactcgtatctgaagagttgttgcacatccatgtcgagagtctgtagagagctccgagtaccccgtggggatcccgagggatcggcagccggatacatctcgtggctgaatggagcctgcgcctagctcgaaggcatcggtcaacgtctcgacgaggccttgaagcaggagtgtcgtcgctcaagccgatatgctgaggggcacgtgttggcctgcatacgagatcatcatccgcagctgcaccttgagttcctccgcgaagggttttcacgttctcggaggaaccctgcggagatagatggcctggcgaagttgatggcgccgctagtggagaaggtcttccagtcgatggactggcgttggccttcctggtagtctctgtgttctatcacaaatgtcttaggaaaaagtgtaatatagttttggactttgatggaattgtaagaaatactagtggaatagaaaagaaatctatctaactaagctttcttactctggatgtagtgtgtatgagtgtcttctcacttcgcgactttgatcagtcgtttgagttatacactctccctagcccccagccttgtcatcggagaattcttctcggaagataaggctcttggacctttgacctgcctcggttgaacaagcactgatcctagccctcagtcatgaagttggaaagtttatttccgattacacggcttggttaatacgcatggcgagaactcttacacgactagatcttacatggtctttcatctctacaggatccgacaaggccttatcggctctgggcgtccccagccgaagttcccttaggttcctcggaggccttgtcaagatggcgtaaagggacatgaggataggtttcaatgctaggtgtcatctaggtacgggatcataggaaaggaacactttgattgtggtcttgacctgaaaataggctttattgaagctgtaagatgtcttacaagtatggatactattaacttatacatagaatttacgtaattgatcaatgttccaggaatttgccaactcgcgaccatcgccgtctgcaattttgaatgcgcctggccgcagaacttgtgtgatcgtgtacggtccttcccatttgggtgagagcttgtttcgccctgcttggctttgaacccgtcggaagatgtagtcgccgattgaaagcgtgcgtgctcggatgcgcttctcgtggtaacggcgaagggcctgttggtagtcggttgcttgaatggcaactcgttcgcgatgttcctcgagtagattcacatcgtcgtttcgctgctcctcctgatcctcatcggaatacttctgtacttgtgtactttgatgtcgtagctcggtggggagcatggcctctgagccgtacacgaggaagaagggtgtctccttgttagacgttgtcggtgtggtacgcgcgacccatagtactgatggaagttcttcgacccacttcttgtcatgtgacatgagcctgtcgtagacgcgtgtcttgattccttgtagtactatgccgtttgccctctcgacttatccattgctctgaggttgagaaaccgaggcgaaacagatcttgactcccagcctgatgcagtaatcttggaaatcggcattgatgaactaggagccgttgtccgttatgatacggtggggcaatccgaatctgcagaatatccctttgatgaatttgatggcgttgttggccttgatttcccctgtgggtgtcacttcaatccacttagtgaatttatcgattgccacgaataggaacttgtagccgccctgtcctcgtgggaatggcccgagtatatctagcccccagcacgagaacggccaagtaagagggatagttcggggtgcttgcgctagcagttttgtgtgtttactgtggaattgacaggcttaacaccgctgaaccatgttgcaggcgtctttgagggcggttggccagaaaaacccttgtcggaaagcttttccgactaatgtccgaccggcagcatgtgacccacagatcccttcatgtatgtcgaggaggaggtgtctgccgtcgtcggacgagacgcatgttaggagtaccccgtttggtgccttcttgtatagatcgttgccgatcatacagtaggacttttgctttacgggatattttcttggcttctgcgtcgtcttcgggcaactcttcgctgcttatgaatttaatgagtggggtgcgccagtcgtccgtggtctcaatatcggcaacggcgcgctctgcctctgtagcccaagagctggtgtcaggggcgaccgggctatctttgccgcttgcctctttcactgatggcgtcgtcaggacgtctagaaaggtgccaggttcaagtggttctcatctggacgcacgtcgtgctagatcatccggttcgatgttgtctttgcggtatacatgtcagacctcgatcccatcgaaccttttttccagcttcctgacttctgcgagatacttggataactcggggctagagcacttgtaatctttatgcacctggttcgcgactagttcggaatcccctttcacgatcagttgcctgactctgagtgcagccgcaactctgatcctggcgagtagtccttcgtattcggctgtgttattggttgccctgaagttgaggtgaattgcatgcttgaattgatctcccgaaagtgatgtcaagatgaatcctgcccctgctccctggtgttgatgaaaaaaatcgaacacaccggcctgggagatctgcttagctccagtgcaggtccagagattgatgagatgcgagcgtgccagtcagtttgatcctgcaactgacaagatatacaaatagtagatcaaaacagccgatcggctgacaagccgatggagtagttccagccgatagcgataatagccgatgccgataccagccgatagcgatagggtttaagcaatcggctatatgtccaatgtagataacgatataaaggcaatcggctgatgataataaaatataacaataatatagtccagtagaaaccaatcggcaaataatgatatgacaaataagcattgatccgaaggttaaagcacacatcggctggaggtccgatgtcatgaaatccacaagattagattaaacagtgaaacctttgttgccatcggctaaatccaacttatatatatatgcaatccttatgagccgatgcaacgtccagataactcaccggctgaaaccccgatgaaacccttattagcagtaaaaaagcaggctagagattatggttctaagcacgacttagtagatcaaacttaactgatgcagcactaagtatgaaaagaaacataatatctagacaatcaagccgttgactttgttttcagggtggtagatgtctaagctaatctaatttagcaacacgatttagccgatacctgcagaaaccctaaaacgagaagcagccattagagctaaattgatatgctaagactagattaacagagacatatgataaataggtaggcaaatatatcatccaaaccagagcaatccaagaggttgaatgtactcatgcagccttgaacgacgccaacgtagacgatacaattgcctggaccaacggaacattggacttaccccttcaccggagatcgaacaccgatgcagccccgcgtcgggtgccaagtcccgctggacgataaaataaagtagaaaaggtaaaaggtggcgatgcgccgaattgtattgatcgtgaggataaattacataaaccccgggtgtacatatttatacccatgggttgatacaagtccttgtcggacaagaaagaaactttactaaagataaaaggaaaagataaagtccttataggacactaaacacactttcctgaagataaaaggaaactaacgaactattcctaattaatagataacttgccatgccgcattctctttgaactcagtctcttctggataagcttcctttagtagatcaatttccttaaccgaatatagcaagaatccgacaaccgacgacttgacaactctcatcggctaatctcaggacatcgaagccgatgctgactctaagccgatgactactccgggcttgccaaattccactgttaacacctggctgttgagtgcgcccgtcaaacgccattgtccacgtttcattgtcgatttggttgtctgacctattatcaggcatggtccaatcggctacaaaatcggcgagaacctgggacttgatggctgttcatggcacgaagtggatatcaaattgacttagctcgactacccattttgcaatgcggccgacaacgtctttgttcctcacgacttcgtcgagagggaaggaggagacaactgtgaccctgtgggcttggaagtagtggcgtagttttcttgatgtcatgattactacgtagagcagtttttggatctatggatatcttgtctttgcgtcgtggagagcttcgctgacatagtagactggtcgttgcaccttctctctcgacaataatgacagtgcaaacggaatatggcgtggcggcaatatagagaaataattcttcattaggttgagggcaataagtacaggtggatttgataggtagcgcttgagtgcaatgaatgccttttcggcctcttgtgtccatacaaatttgtcttgctttttcagcagagcgaagaaaggttgtcctcgttctcccatcccagcgacgaacctacttagtgccgccatgcatccagttagcctctgtacttccttgagtcttgtaggcgacttcatgttctcgattgccttgatcttctcgggatttgcttctattcctctaccagagacgaggaagccgagtagcttgcccgatggtactccgaacgtgcacttcactggattgagcatgaggcgatatcgtcggaggttgtcgatcgtttcccacagatcgtcaatctgagtcgcttgtcttggtcttgataacaatgtcgtcgacgtaggcctcgacattgtttctgagttggttgctaagtgcgccctggaccgtgcgctggaaagtgtttcctgcggttattagtccgaacggcatcttaacgtagcagaataccccgaacggcatgatgaatgctgtcttctcctcgtcctctctcgccatgctgatttggtggtagccggagtaagcgtcgaggaagctcaacaactcacagccggatgttgagtccaccagttggtctattcgaggaagagggaagtgatccttgggacacgccttgttgaggtcggtgaaatcgacacaaattctccatttcccgttggccatccacaccatgactgggttggctagccactctggatgaagtacctctatgatgaaaccagctttgagaagcttgtcgagctcttctcgtatggcttgtttttgatctggtgcaaatctccgcagtttttgctttacttgcttggcattgggtcgcaccatgagtttgtgctcaatcacctccctgggtacccccggcatgtcggacggctgccaagcgaacacgtcagcattgtcgccgaggaaggtgatgagcgcgagttcctatttctcgtctagtgatgccccgatcttgacggttttgtcggggttggcgctggagagtggaacgatcttgattgcgccgtccggcttcagcgtcttgtttgttttgctcactttcttgggtggctcagctatggcgggtgggcttggcgtgtgctcgaccatgtcgaggctccgcttgtcgcattgtactgccagcttagcgttcccttgaatagtgattgttcccttcggtcccgacatcttgagcacttgatacgcgtagtgagacgcggccatgaacttcgcgagtgcagctctcccaatgatggcattgtatgctgtatcgaattcagcggcatcaaaggtgatctgttctgttcggaagttgtttgcttggccgaaagtcacaggcaacgtaattttgcccaatggtttggacgatgactgaggagtgattccatggaagggttgatcggtgggtgtcaactcgcttcgtgggatccccatcgcgtccaaggtgctggcgaagaggaggtttattaggctgtcgccgtcgatcagaactcgtgctaccttgatattccgaatagtgggttcgaccacgatcagatattgccctgggatgacagcagtcttggggtggtcctcttctgagaattctatcttctgctcggaccacttcatgttgggcgcagccccctgccatgtcaaatagacttcacgttccactttcttgtattctcgctttgaggagtatgccgtggaacctccgaagatgtgtgagacatgaatgtcggaatctagttatgctgagtccgattcctgagtaggcgccttagcgtccttctcaaccacatgtactcgcttgcctttttccgatgccatgtgttttgcgagtgactttttgaagacgaggcaatcttctagagagtgtctgtccgtcttgtgtatatggcaccatgctttcttcatgtcgctgccttgtgggtctaggcacttgggagggtccgcgtattctgttgcgaaaacttccgattgagctttcctcttcccactcttgcgatttttcttcttgctcgactcaggtgcgtccttggctggtttcttctctcctccggtcttcggtttgtcgttcttgcgtctcagtgcgtcatccgcatgagcgcatcgatcgacaatttcgaataatctccgagtagtcgtgatgcgcctcattgccaactcctgagtagtatagcgatctctgacatcggatttgaaagcgcgaattatagaagcattggtgatctcggggattatgtttctgcactcgttaaagcgccgaacataatccctcaagtattcgcccgggttctgtgtcaacgcatgtaggtcgtcttcgatcgcgtggcgcttgtaagttccttggaagttggctatgaattgctgccacaggtctgcccacgaagagatcgagtaggggggagatgcatcagccatgaatgtgcagagcctttcaatgcggttggcaagtaattcgccaatgcgttgtcgtccgctccggcagcgtagagtaccatggagtaaacctgaaggaactcttccgggtcggtgctcccatcgtatttctctattgctccaggtcgaaatctttcaggccatcggacatcccgaagtgaacgaccgaaagctctacacccagtgctgggggcagtgggttgtcggcgatcatacgttcttcgtggatgtctatctgatgatgaagatgacgaggatgatgatgatgacgatgagtcgcttggttccggcgtgcgattacgaggacgtcgaccgggttctcgagaatcctgtcgtcgtctcccgttgttgtctcggcgccgatctccatcatcgtcgtcattatggcgatttcctcgaccagtatcgcctggcacccgccgttcacgatcatcgtgatcgtggcggttgtggcagttatcacggtctcggtcttcgctcgaacggcctcctcgttcttcgttatcgtgacaccgtgaagagacgcgatgtcgggaacggttctcgttatctcgtgtgcgtcgcgcctctcagcggccattcaggtgatcgcggagatcgccaatgctgcgaggtggaggggtggctcgatgaggcgattcccgctgttcagggttttcaccattagcatcgccagttggtggctgttccgggtgcgctacagcagcggcctcttcgaacgcgttgctgaggttggtcactgattcccgtaatcgttctgtccaacgtgcgagatcgtcgttcagaacgggatcgtagggggtttccctcagtattgcgttgacggctctgatatgctgggccggagtagtcacttgattctccgcttccgcattggtgcgcgctgacgcgccgacatcgtcgatagccaatacctcacgcggcgtgctcgttgtcgatgatccatagtcttcgaggaggtgcaagactgatggttcgtggggatcgatgtcgattaccccaacaaatcgatccgaaattggcgtcgctccttgttccttgtctttatccctgatggggatgtgtgactgctggaccttaggagatggcgccttcatggcgctgagaaagaccttgcagctcgagaggtcgtgattctttgtcttgtgaataggacaatagacatcacgagttggagaggtacgctgaattccatgctctttgcaggcacgaatttcagcatggacgttgagaaagacccagcaggcttgcagggtgtttttcctggttttgtggataggacaccaggaccttgtcaccttggaagtaatcctcgtcggcttgtgattcctgtcggaaagacaaggcttggccgcactaggatccttcttgggctcggatgtcgtcgacgctccgatctccgcttcggcgggaggatccttcgacatggagtcgccccgggttgtagccactacgttctcgtttccggccattggcggaccagctgagatcggcatagtggtataaaccggaaagacaatttcgccgacttgagtccacaccagtgttgttgaagtaggaactccttggttgaggttggtgttgacactgttgtcaacgaagctggatgtcatagtagtagaaccttgagcaccaagtccccctacctggcgcaccactgtcgacaggggatacccgtagaccggatatagaggttattagggtacgctggtacgaggatctacgtaatacgacatcaagcaggtagaaaacaaagattatactggttcaggccccttggtaggtaatagccctaatccaattgatatgggattatatgatggaaaccacatattacaaagggaatagtggaactcgatggtatcgacaagatcgtagtcgagttgatccgactagatccccggcgacttggctccgataagctccggcttcgtaggctgtggtggatgtgttgactctgagatttgatgccttaggtcctcccggggggtcccttttataccataggtcaactggtctccagtaggactcggagacatcagacccgatacgatacaatgacgacccagttctatccgagtaggactccttacatctatgaactccgtaatggatttccccaacttatgccgaaaacgtccacatacgcgcaagcataccatgtcgatatgtgatgtatatcaaagggtagagggtatacctttcccgtaaccctgacactctcgacgagaagtaatactctgctcttatttaaggattggaatctaccgggtgttgtattgatttgacgatcttggtgttggttgtgcccttgagaggcctcatgccctctttatataggtcgaagcgcaagattacatataaaaacctaacctacggcatctactttacaatattgtcgaaataagactttaagacgtttccttaataccttaatcataatccgttacatattctagagatataacctatcctctacaaccagtcggataaaccagccatgtggatataaggtactcataatctccacaaatacaataaccatttaaagctttgttcaaatcaacagttagcttgagtctttcagttgcatgtaaaacggagtgagtgattagtacaaaattaattaattaagtattaactattataaacttaaaaatgtatttacttgatataaaaagtctcttgtaaaatacagatcatttagcagtaaaaaagtgtgcttgataaatgcaattggacgcaacctaaagtatttatagaactttttacgattaagataaatggttaaactttatgtatttgtactccaacgccaagtatttgtgcactgcatcagttagtgcacaacctagctagttcttcaaaacaattattcaagcacgcatatataatgcatggctaatgatccaagtatgtagattaaataagagacatgagaaggtagctactccgtgcacatctttggtggaaaaactagcctgactagggtaggggatcaaagagatgataattaatttactatataatgaggtactagatgacatggaaatggaataagataggcaggatatgttccccgtttataatgtccttcctcgatcggaactgctaacatccccgtttagtataaggggatgtttagttcatactacatctttggtcccgttcgattctgtaactgggcttggatgaaaatgaagattttcatgtcacacttttcaaattgttaaacggtatgtttcgtgcgaaaattttctatataaaagttgttctaaaacatcagattaattaatttttcaaacttgtaataattaaaacttaattaatcacacgttattaccacctcgttttatatgaaacacttcatcttcaggagattcaaacaccatagggatgttagccgcttcttaggcaagtttgaaaaaaaaaagttttgaagtcatcaactcgtaggattgtgcggttgaaaaattaatgtgcctagccatgatcacaaatcatcaaccaaactcttcctaagtaacgtgtctaaactttatttgacaaatttaaggcattcaattaaacactccctaagtattttttttcagccaaaagttaatagatattttcatcttaggacgtgtttggctagtgaaaaaggcaaaaataaacatttagctaacccataaaaaacatagcttgtctttttatatgcatattttagcatcaatccaaattaaactactctctccgttccaaatgtagcaatctaaaactaaattagattttttgcactaagaatctaaacacatgttcctcaatccattttcacgctagtatcctctagctatattttataacaaagtgagcgtttaacttacacacaccaccaaaattttggtacaatatcaaaccaagccgatccttagaccagcaatctaactatgatgaacgtttacttacactacatgaagcaccatctacgtaccacacatcacatataatagctttctcagtttctctgggtaaatatagttatggggtgtttaaattcaggggtgtaaagtcttggcgtgttacatcgggtattatataggggtgtggtaaggagtgttcgggcactaataaaaaaactaattacagaatccgtccgtaaattgctagacgaatttattaagcctaattaatctgtcattagtaaatgtttactatagcaccacattgtcaaatcatagagcaattagtcttaaaagattcgtctcacaaattaatcgcaatctatgcaattagttatttttgagcctatatttaatacttcatgtaggtgttcaaacgttcgatgttacatgatgtaaaattttggggtgggatttaaacatggcctaaatatagcttttacgacgcttacgacatggttacattttgcggtaatattctgctaagaccatgagagtgtgtctccgcaccttttttttttagggtaaatttgcttgatttgatatcatactttcacaaccatgagaagagcatagtaatccggtggtaagagagctaccagtactattgactgccagcgtttgagtccccccgtactgattttcacaccatttcttctctcttcgctgttacgtaatcgaatttttcggacaaaatccccaataaattataagcggatcataactacttctatatgcaaaaatcacttcccagatcagatgtcggtctgctataataggttattctcgcaagcataccggctggatagcaagtgggtcccacgaattttaccacacctctttttctcatcctcctcttcctctccactgcatctttcctctcccactcattttattcactccacaccttttcccacttctcttctgcattcctctcctcatctcttccccttccgtatccccattctcttctctggcggcaagcgggcggcgacggatctaacaccgctgccctcggccccaagaaaggcaatgaagatggtgggcagcgacggtggagttcgagggtggctgatccgtcgtagccatcctcggccctagagaggcgatgaagatgttgggcagcgacgtcggagctggaggatggcaaatctggcgctgctgcccctaggcctagggaggggcgatgaagacggcaggtggcgacggtggagctcgagagcggcaaatctggcgccaccaccctcaaccccaggaggggcgacgacgagcccgagtgcaacagaagctagggtttcagcggaattttctttttggtattctttaaccaaaattatttttacagtcggtcggcttaagcgttcgtatgcgaaaataccgaatttaatttgcatgcggttgctatacccgcatataaaattatcgattttcgcagacacctaggtgcaagtgggccacccatgcacctatgaaaattgatctttttttagaaacacattacaaatgcaagcacccaacacccacacagtcatctctatgaacgtgcacacacacattacctctataagcatatccgaaagactataccggcatatctatcgattctatagttatatgcgaaaatcttttatgtagtagtgcttataatcgattctactatcagtatcccatattatcatctttcaaattaaaatggagtatttcacaactgtagcaaccgtattatttcacaccacacgcgttcggtgtgccgcgtactaaaactcttttttcagagatcacgcggcattattgatcgttctctcactggtttaatttcgtcgtaattgcgacatgacaggagtatttgtcagcaactagtattgaaaaagaagagcgcctaaaagaatctgtggcgagcgctgagtgctgcaaaaacatcatcatgagcaatctccatctaaagcgcaaacaaaccacaaattaatcactttttaaaaaaataggatagaggggttatttgagaggtcaagaatccgaaaaactaggtttctcaaattctaggttctaatttgttttatttgttttatggattctaatttttaaagtttactccatccgtcccaaaacagacaaactctagttatttatctggatatacatcatgtccagttacgtagctagagttttttttttttaagacgaaggggtagtgataattttaactgtttaaaaaggtttctgacagctagaaattctgaaagaaggatagaggtgtcagaatgttccaaacagggcaaaaatagaatatgcactgagccgaggggaaaatcagataaattaagagaaaaatagaatatgcactaagccgagggggaaatcagataaattacgggctcccacgtggacgttccgtaaacgacaattcgcgtgcggcactgcggcccaccaccacgtcagatacgtactgatattttcaagcggagtagagtatacgcatgatgctaaaatctattcagtatacgctttctatttttttaaaagagttaaacagtacaacatatacactcaaaacacacgcacactaacccctataaacgtatgcacgcaaatcctacccctatgagcatcttcgaagactgggccgacaaatcctcgagattgataaagtcatcacagacgcctcgttatcgacggatccatctcctaccactgaaaccacaaagctgttaaatcctaaaaaattcgctcccatggagagtcgaacccaggacctaaggggaaaatttgctcccatgagtatacgctttttatttcatcttatttagataccctttcataagtccgatcagttaatgatgattgaggtacaaacacgtgaatattatatagataaacaagatcacttgcgagaaaaagagaaccacatgctatctattactacctccatcctagaatataagcatttttagagttgggcacggttattaagaaagtaggtagaagtgaatgatggagggtggtgattggttgagtagtggaggtaagttgaaaaagtgaatggtggaaggttataattcgttgggaaaagaatgttggtggagaagttatattttaggataaatcttgaatgctaaaaagttattatattttgggacggagggagtagttgtcatgttgattcacgtgcatgttagagcaggtacaatagtaagctataagccagctataaccacatatccagaagaaaagagaagagatagaagaaagcgggctacagatttgtagtcagctgcagtacggactctaagatgttatgtgtgtatgagaggtgggaccaggtattaatggtatagcatgattttatagtcaactattgtatgaatgagctattagattaactatagacgatttagagtaaatatttagctatcctattaaacttgctcttacgaggctaacatatcgttacactagcacattttccttttatagaatctttgatgacttatattttttttatagacagtatattatttgtaagattcgtttgaactgtcctatttcacttaaaatatgtaacaaataagtctaatattgaatatattcaaattaatttttttttctgaactgttctcgctggatagttaaagagttacttcctcagtgtcgttactttcaacgccgtgataagttaattctctagcaatacagttatttctaataccttaaatagttatttatgttttatgtttcttagttactttcctctagaagtgtatttacttataatattatgaagagttccgtctatttttcaaaaagttaatttcatccagtagcgtagttacttttaatataatgaaggattactttttatataacgtaagatttgattttttctaaaataatacagtgattactttaaataaagttggacatcttctctacactttagttgtaagtttattccacatagttttgtattccaactcagtcgtaatgtaattacttctaatgctatagagagttacttctattgcatagctaggttacttctacaatttaaataaattacttttaagttaataaaatgtttgaatatatttaacattgatcttgttttatctcatattttaagtggagtacaatgaagcaaatagattttaaaaataatatataatttaagagatactccctccgttctaaaatataaggcacaaccacccttaactcaaagaccaagaaacaattattatcatctcctagtttgaatcactctaataaatataatgcatacatctaatagaattagagatcttgaggatggaggatttaaaaaagtaataatttaatggagaaaaggtcctaattaattatatgcatgcatgtatatcttatattatgaaacatcttaaaaaaaatagttgtgccttatattatggaacggagagagtacaagttatcaaataggtaagaaaaaaaatacaatttagctaaggagatttatacgtggaggaagtgatcgcggctttaatcaaaccaacgaccgatcgttgtgtagtcgtgttcgaagcagcatcagctatctttcatatacggtacaaatttaagccgccttttgaaggctaaagccctgcaaaaatcgttttgtatagtgtcagtcggatatcttgggcccattgggccacgtctgcgcgagggcgaccggccgcgtcagcgtgagtcggctgacgctgacgtgtccgcacgcctgattcttggtctaactcatgtccggtgattaaggttaatctctagatatatcatctgtttacgtaatatccttcattcacagatataaaaaatattacaaattaggatgggttggatttgactctttctacgataacgaacctgaatataatcagtttaggacttggtcaaatcctattatagattgtaatttttggagaaaaaaaaagtaagtactccctacgtttctaaatcttttaacaccgttgacttttttaaatatgtttaaccgttcattttattaaaaaaatttaagtaattattaatttttttcttataatttgtttcattgttaaatatacttatatgcatacatataattttacatatttcacaaaagtttttaataataagatgaatggtcaaacataaacttaaaaagtcaatggtatcaaatatttagaaacggagggagtacttgttttctcaactacctattttgtaaatcagtagtaatatattcatatgatataactagccatgcctatataagtagggatatgttataagcaaattagggatacaattaattttagatccggtggttacataagtaagctacgcgagtgagcgcagtgggaagatgggaaagtaggactgctaatatatataatatatattcttcagccgttggtcggctttatccatttcgcggaagacaaaattaacaagtccatgatgtcccgtagttaattatttatttacagctttcacatacgtacaactataaataccttcccacaacaacaataatataaggggcaattttatttttacccctacttttgatcttcaatgttgattttaccctgtttttaagggtttttatttttgcccctttttttttttaaatgaaagcaaactctacccctactttagatggacaagttgacggcgttaaatctttggcgaaaagacaatcatacccttatttgatattgcatatttgtctgaatgtttatttaataactgtgtatttgccccctttttacatgcagcttgtattttgataaacttttacaaatatgataattttgatagaatattaaaattttgatataatttttccacaaatttggtaaaatttgggtattttgaagaaaaaaagacagaatttgggcacaatttcggcatggtttttacacagctaacaaaatacatgtagcaatcatcacaaaatcacacaaaatcaagcaaatccaaatcatgaagccaagcaaatacagtccagtagcatgtcgctcctccctatcgcctgtttacagccgagccaggttgatgctgcttgccgcagcgtgcacctccgtcgtgccctgcttgccaacagcttgcagtgcccctgataactgctcgctgcgcgcggcctgctgcttggcgtgctcgccgccaccgcttggccgggccacctgccgtcgcctcctctctgcgtcgagccgtcgccgccttcccgcattaagccgccgatgcctaaccgagacgccgccgtcgcttgctcctccgtcaagccgctaccgtctggacaagagcccaccttcgtcttgtcccctcgtcgagccgccgtcgcctggcctgccttgatacgcgccgccttctgctcgccaccataggtgggattggggaaggcaagaaggacggctttggttatggctcaccaggggtacaaaggtccatcaacgaattaaaaaatcactatttctttttctctctacgttttagctccataatcctaggtcggctaacttccgttaaaaatagggataaacgtctatttcatttcagaaaagcaggggcaaaaacgaaaaccacaaaaaacaggggcaaaatcaatatttaaacatgaaagtgagggtaaaaacgaaattatcccataatataaagtaccttagattaaaagaaactacaaaatattatcttttcttctttttgtttttgaaaagactatatatcgtcacgatggtcgagttagagcatcatcacaacaccaacatgtctagtcggtcatcaacagatcgaacagaacgtccttatcagtacactattgagagagaaaagcacgtttcggcacatcgatcattcagcgtagacccctgagaaaggataaacgtgtggcatcagatcacatattgcaccgacgatcatcacacacctaatctctccatccccaactaacagaaatatactggagtagtatctattaatttttcaagtgaattaattagtccgttaccgatttgtttggtgagtagtgatttaatttagaagtacgtacacgcgatcgatctcggacatttcagctacaagtgcgtgccagcggtggtgtgaatataatgaaattagccgctccagccgatatatgtagacgtgtactaacacaaatactctatccgtcttataatataagtgattttaagtttttacttacactatttgatcactcgtgttattcaaaatattataaaattattcttttacttactttattatccaaagtactttaagcacaattttttaatttttatatttacataaatttttttgaataagacgatttatattatgggacggaggtacatgctagcactgggagagaaatggcgtgtcgtcctcgtacgcagacaaagccatccccactagcttactgtacgtacaggttcactgagaaccagtacatgtacgccgcgcgccattaatttttaaagagtaaggtatacgatcggtgaattttttttgaaaataatattattttaatggaaaatcacaaaactttaggtcggctagacgaaatcacaagtttagcgccctgtcgaactgggacagggtactgtcgaactgccctagttcgacaggctagttgtccaagaaaaaaaataaaaaagtacttgctacaatgcccgatagggacgtatcgaacagggggagttcgatagggcgcgtggcatggacgtatcgaacagcgggagttcgataggcagcgtcgctacagtgtcgctacagtgtcgctacgtctttgatagagaaaagactggactagcatttttgaatgatgcaacaacgcaatatatgatgttgttgttgtttctttgcttccaagtcgtaggccggtctcctcagtacgtgtggatagatatgccacaatgaagctttttggttaagacgtcacaacgaagctaacatcggtatctctgggtaggtttagcttgaaaacgagcccgttgcagtcttatggaatgaaacaaatgaaagaagaaaaaataatgtgcacaaggaaggcaagcccagctataaaggtgctggtcacctcacattcatatgcctcagcccaagtgtttctagcggtcgagcccgatcagatgcaacggcaaactttattgaggcccaagttcaagttagcaaaatggcttcttttaactttgttaagttttgaagcacaacgtaggcgagtagagataaaaatagagcggatagcagagaggatagcttccatccgctctaaagaaaaacaaatacgaatataactcggatatgaaaatgaatgcgggtaagtttttgctagatgcaaatatgtaatcatggtattcgacggaaacaaataatacgaatatccagtgaatagtgttatttggacatcgccaaatgcatgaaacatgtcccacatctttttaactcaccttcgatatactccctccatctcataaaaaaaccaaggatgagatgtgacacatctagttctatccagattcgtagtattaggatatgtcgcatctcatcctaggtttttttttatgggacggggtatatctttagagtttaataatagcacaccccactagcactagctcgcactattaattgagagaatatactctttgtctttgagtttatcttagttcaacgatttaccatagacattatcttttctataatataccggtaagtttatcaattctcctacaatataccattatccattgagttgggcatggttttaaaaataacactaacacacttatagatataaaaggttaacaattgttttatcctgtcataagtctcaaaaaaaattatgaatttttttagcctctttacacaatgtatatgttcaagatttttgtatttctactttttataaaatataatttatcagttatatgttatatagaatatgttttgtgttgttgtttttaatgtaaatcatatttcttaggctacacaaaaatatttttatgctattatttttgcataactaatttctctctcatatactccctccatctacttttgatgtgtatatttccaaatctgaaaattttacttttgataggcatatttcaatcaacaacctatcctcttaatgaatttttcggatttaatgcgtgactctctattcttccacacaagattggctacatgggcatcgagaaatataaatattaatgaatcgcctgtttacgggaaataactagtagcatgtttaaatggataataagtagaattacttatccttagtcattgtgccaagatgcaatatgactatcaaaagtagatggagggagtaccaaacaaaaataactatgttttttaaaaaatagaaataccagaaaaaacatgaaacttatatacacacttgagtaaggaggctaaaaacttcatatttttaaaaacttctaatgggataaatcatttttttaactttgtatgacttcaagggtatttttagtatttccaaaaaactgtcgacgggtgatacccgtagaccggatatagagggtattggggtacgttggtacaagtatctacgtaatacgacatcaagcaggcaaaggacaaagattatactggttcaggccccttgataggtaatagccctaatccagttgatgtgggattatatgatggaaaacacaggttacaaagggaacagtggaacttgacggatccggcaagattgtggtcaagttggttcgactagatccccggcgatttggctccttgcaggctccgacttcgtaggctgtgagggttgtgttggctctgagattcgatgccctaggtcttccccggggggtcccttttatatcacaggtcaggcggtttccaagtagaactcggaaacatcgaaccttacacgatacattgacgatccagtcttgtccgagtaggactccttccatttgtaaactccgtgaggggtttccttaatatatgcggagagtatccgtatacgcgtgggtataccataccgatatgcgacgtatatcaaagggtaaagggtatacctaacccgtaaccctgacaatgaccttgcctaacaacatatgcagaacaattgataaacttgccggtattttatagaaatagacagtgtcgatgacaaattattgaactgagataaactcagtggcataagctcctattaatattatttgaacttttaaataattttatgaattatattatatgttatctattataatattcgccagccgttgccgcctcaaatccgccacgtccggccacaatttctccctcccgagccaatataaaccctccccgtgctctcctcttccatttccccctctttcccgagcccggcactctctccctcgctctccccacgccgctcccgcgcaccgccactttctggcgagctccggccgcccgccaccgctgctccacccaccgccgcacaaatccgccaccaccgtcggcttcgcggcgccgtgctgcagcccggcccctactccatttcccctctccgcctccggaacatcgccgcctcgcgcaacacctctctccgccgccgccgtcacctccagccacgcgccatcgccactcccgccgccactgtgctgcgccgcctccactgccggcttcaccaccgcgcgggcaagctcggtctccgctccgtttccctgttccttcaccggaactccatcccctctgtcaacccaagccaccaccacctcgccgccgccgcgagcgacctccaacctcacgctctccttcgtcggcttcgcagcaatgatagggagcccgacatcccctcatccaagctctccgtcaccggaaatcctttccccgctgtgagaggtgagctccttccctcgtcgccggcttccggccgagttttcccgccgccttgcgcctcctccctattccctaactttccctccatgttccccagatccttccgatcgccgtccgccggttcccgctcgcggaacaccgctggaccgctattgccgtgccaccccgaggagcgccgccgccatctcgcctcccttcggtgccgttccgcttggtgagcatcccctctccgctttttccgccgctctccgcgtgccgacccgcgccgccggtgtcgtcgccggtggtcgccgtccggccgcgcgccgccgtcgtcgttcgccgccgctcggccgcgcctgtactttggccgcccgtggaccactcccgtggtctgggtccacggtgccgccaggctgcagtggaccgagtccaccgtgcgccctcccctagtcccgctgacgtgtggggcccacctatcggcgcgcccttcccctttgatgacgtcagcggctgtgccttttcctttgaaaaattaaataataattccgcaataaatcagtaataattctagaaatttatttaaatggctcaaaacttctaaaattcatatctaattcattcgaactccgaattgggccattcaacttgcaaaattcatctaaaattgacctctacatgtttgttttactttttatgtactgttttcttggtttttattagagtttttcctcgttttgcgtgccagtgtgtagttcccgtcgtttcggaagtccgtggtcatgaggaaaagagttcggaagatcaaagtgaagaagcaaggcaagtcacacattccccttgagcattttgatcctaatttacaaatgttttatcgtttgcaaataaaattgcatgtcttgctaattacatgggatcagggttttacctatctgctcacttgtgccatgtttacttgatatctgtcctttgtcaacattgggtaataaaacgaatagctcatgttacttatgtgacctagctagaactatatgcttagccatgcttaattaccactagctcagttgatgggataactgcagtattagacctttttagtatcatgaggagctgcgtgctcaagacacccggccatgcttcatggtcataattgtccaactaaaatgcgactaaatggtgggctgtgggtgcatggttttgctagtcgcacccatggcaattaaggaccggtttgcgggatgccctggaagaacttatcgtacttaccataagccagcgtgggcaacggctgggcttgtagtgtagctttcctctagccgacgcatccaggcaagggtgggcgtgatggagtttggatgggccctgcgacggcctatgcggcttccggattcacctaggcatgagaggggactgcccgctgccttgcgaggagtgggggtgaaacctgaggtgtggtgtgcttggttagagggggttatgcgaagggtcctgtcacggcctctttccggtatgtcgtggtggcatgtcggcgcacgaaaatgtgtcgtggggctgtgtcttgtgggtacagttgtacacctctgatcagagtaaaactattcgaatagccgtgcccgcggttatgggcagtcgaccaaattcaccgtgattagtcccaccttaataaattgactcaatgcactgtagttcaggtgggttggttgggcctgttcaacgtggtgtagcgttgatcagtggagatttaatgttactttaattactcaacagttttactgttttactcaataaaatgttttacaaccgcctttatgcaaatagccacaaatcgttcttgtgttccccttgcacgtctgcatcgttggtgtggcttgctaagtacggtggttgtactcagccttgctattattcccccttttcagaagtgtagtgcttctgagctgaagacgaagttagaagaccaaggctcagaccccagttgagttttgcttgtggagtggagctgaagccccgctaggatcgcctttttccgctgctgtcattctctttcgttgtgaggactaagtgcctcttctgtaagtattttacgctttatttacgtttggaactgtttattacttgttgttttgtgtaccctggctggtcctagacagagatttaatacacaaaatagtctggaaatttgggctaaatttctgggcgtgacaaagtggtatcagagccaactcgactgtaggttgagccaaatggtcaaaccctaaggacaagttttctgaaaaccctatttgcaaaatgtctcctctcgtccttcggcatttctttgcgaaacggtttttaaaattctcctcgatgtccctccaattcttttagttgtaaaacctggaggacaaaccgtcagcttcgtgtctgttcggaagtcaagtcaagcatcaagcttcgtgcagcaaagagcgagaaggtcagttcagagtcgtcgttccgcgaaggtcaagaagagttttcccggagttacctaaacccaatctttcccggaagagtagttccgttagcttttagatcgtgtgttgtttgcttgtgtgtaggggtatggattgcatcattggtggggatgcgaccatactaggttgtttgcttaagcaacttgaatcataaaaatccattaacaacagatcagtaggcaatcggtttaagaccttatctttagtaacccctctcatctccccctccctctcttgtgcccgtagcaattggtcagtatgagggatagttgcattgggtcaggatctcaacagtttcatggatcaactcggtgcaatcctatgggcattccacgtcaacttcatgaagatcagcttcaaccttaagtcatggctaatcagactcagacagtggaagagttgttacaacagatgcgacgtcggtaccagatctatcagatgcagcaaatgcaatggcaatgtcaggagccacgtcaatgtctccaatcgcaggtgcaagtccaaatgccagcccggaacccaaatcagagtcagagtcaggagttcccaatatcggcaccgaagacccctgtcaaaatgctgtccagatccccgaagataactgtagccgagtcatcgtcagaccaaaggaaagtaagtgctacctgttatgactgtggtgagcaaggtcactatgcaaggaactgtccatggaaggtgttcaccaggtcacctgaaaaatacgagaagcagtgctcaggaagtaaccaagctccaagccagtctaccgacaagaaggatggtactttgcagcccaactatggagcgaacaggacagtaatatggaagatggataatggtaggaccatgatcatcactggtttggaatttactcctgaagacgccgcaaggatacccaagcgtcagagaagaaaaaataccttccgtggagtacgtcagctaacccgacacctcataaagtacggcccgcccagacccgaagatgatgaatcaggagagcggttctctgctgacgatgatgataatgacgatgatgatgatgatgaggatgaggcgacacttaacagtttcatggaaagaggaatggagttcaaagcatgtactagatgtgggatagtcggacacactgctagtttatgcctccccacatgtcgctgtggtgaatatacccattactcagatcatgccctttgaggaaggttacatgattcttgtgtgaaggaacagatcatgtgcctaaggactatcagttgaacacggtcatagctaagaccaagaaagaacaagggacaaccgtgcaacccattcgtcgaccaatggcagacgacaacagcagtcacaatccttctgctcttcctccaactccagctccagcggaagccaaccatggaagaagcaacatcgccagggatgttcagaaatcactgcttgttccagtttcagctgccaaagtgcacaatcagaagcctgcaccccgggaccaagcaagtcgattatgtcgcaactgtcgtaaaccaggacattgtttcagcgattgtcctcttccaagagcagcaaaggcagttcatcgttgttcacaagttaccagcactgcccacgacaccaatcgacagctgaatgtgcaacctccgcctcaatggattatcgtcaagggcaccgtcaaaggccgcattgttccaccagcaacagcttcaagccttcagcaccagcgccagcagggtaagcaatgccaggaaaccaacagctcgctacagctacaaagaggcagtatgctccttcgtcagcacccgcagcaagtgttgccagcatcaggttgcccaactattgccaatcctagcaatgcacctcgtattgctccaatccggaggcccatcggcaaatcatcactcggtaatcccatgagctagaagatcctacctgctacagctgtcaagaggattgccattccctcctcgaagatcaatgcccagagcaatgtttccgatgcaacttctgttagtaggaactaaagaaacaagtcagttaggtttaaataatggaagcaatagcagttctagacaagacttctacttttcaagttcagtcgtgaaaagggcagttctaatcagtagcagtctaccagtgtttaattttgtaatacttctccttgtacatatatgtttatggcagccatgtaatgaaaaggaaatgttgaataaaatatgagttagccagttcctctccttttatggttcatcttgagcatgcagaagcaatttattatgtgtatctgtcggtgccacaagaaaccaagagtttctcttctaactcatcgcaattttgttgagctccaaaacctgtttgctagccaatagaggaatggttaaccaacggagtgaaaatggttagacactcaacacttgacatgatgagatctctttaaaggcagcatcagtggtactcaaatgaaaagagggatggaatatttgaaagtgacatcatataaagaatcttgggaactctctaaccttggaagctgttacaggatggtaatcggcaattacgccctagtggtgtgatcatgaattcagtataagttccaggaatcatctcaatgtttctcaaaagttgaaaaaagaaattgttccatacatgagtcaggaagatacaagagtttggtccagaaatagaaatgtgtagtcaacaaggtatatggcagagaatctattttcaacaaatcatctttaccgaagatatgaaagcgaagtggttatgatcaaagagcagaaactctcagcagcatcaaagtcagtttccgatagttgttcagattgcagtattttccggaaagttgttgcaggatctatagtccgtcaacccaggaagagtcagcaaaggatggtcgaagaagtgaaatgtcatgccatggaaaggacctcttgagttggatctgttaagtgatcagtgcttgtttcaaggaatgttaactatgcaatctgtttaggcatatgacaccaaaaatcaagtcagaagcaagatagttgtaccagcagttagaactggttggggaagtagtcaagagttagtaagatcaggagcgaaatgagaatttctttatgtggagtttcctatcagcaactgagggttaagttccaaatcttgctgggatgaaagtgcgtcgtcatttctctattttgatgaatcggtgaagttcaattttcaaagtgagggcctttgtaagtaagagaagtgttggttatttttcaaggacaatagtccaattgttcccagtcaggcgaaagtaagactactccctgtaaggggggtaggtctcggagatgagttttggctcagttcgtcgctgttttagtgaaggttcaacctagtgcagcaatccgagtagcacttgaagaagcctgttgcaaggtatcagaagagctaagccgatctcagggcatccgattgaattctaaggtacacccgtgaggccagatcaacaactccgcttagagaagcagcatcagggacagttgcagttcagacgaaagattgatcaagcagcttcttagaatacttactgttcatgtcaagagcagcccaagcgaattaagggtcaatgatttacgaatgccagagataagtcttaggaacaactccatccttctctagccagcttggtgaactgtcaggttatcaaattgctagtatcaacggttcagcccaagataagagagtttcacgagcatccgcagccctagtttgggtcagttcaagcagaaccaataagttcagttttgggaagcaatgggacaacagggttgaatccagccagattgctcgtataggtttgatcagttaatcgatcgtgttgggtaccagaactccagggatctaatccaatgaggccagtcagttcagttgtttgaagcaaaagaaacgaatggtcgatgccgatcagttcaattatgcaggtttggtccatcgagcaatcaaacaatcagtcaatccgaaacagaaaaaaacagtgcagtgtctagatcagtcagatcggtcaaaccgcccgcacaaccagttttctctctagccatcccagaatctcgggacgagattcctataagggggtagatttgtaacgccccgattttcgtttgggattaaaaatcatttaataatgcactttctagaaattaaataaaagttaaagctagttaatcaagtgaaattattgagggaattaaaaatttcctttaaaaatcaaggccgggaatattttgtaatattctttgtgccctaatgtactctccggaattttccgtgaattttcggagctcaagaagtaattttaatagcacaaagttcattgaatcaattaaataaaaagaaaacaaattaaaaactccccttcctccttgggccattttcggcccaagaatccttcctctcccccgcggcccgcgcgcccctccccctctcgggcctctctctctccccctcggcccgctcgtccttgaagtgtaaataaccccctgctccctctctctctcaggccgacaagtgggaccgcgggacccacttgtgaggttcatccccaaccttcctccatcccggccagcaaccgcccgaagccgccatgccacccgttgccgcccacgtcgccgctgattccggccctcccactcgctccctggcgcccaaaccgcataaaatcggttcccctccacctcctctaccaaatcccccacttttccccaatttttggcgccaaatcgagcccccacttcgcccacgatgtcgcccacgtcgccggccgttgccgcatcaaatccgccacgtccggccacaatttcaccctcccgagcctatataaaccctccccgtgctctcctcttccgtttccccctctttccagagcccggcactctctccctcgctctccccacgccgctcccgcgcaccgccgctttccggcgagctccggccgcccaccaccgctgctccacccaccgccgcacaaatccgccaccaccgtcggcttcgcggcgccgtgctgcagccaggcccctactccatttcccctctccgcctccggaacatcgctgcctcacgcaccacctctctccgccgccgttgtcgcctccagccacgcgccaccgccgctcccgccgctgttgtgctgcgccgcctccactgtcggcttcaccgccacgcgggcaagctcggtctccgcttcgtttccccgttccatcaccggaactccatctcctctgtcagcccgagccgccaccacctcgccgccaccgcgagcgacctccaacctcacactctccttcgtcggctccgcagcaacgatagggagcccgacatcccctcatccaagctcttcgtcgcgggaaatcctttccccgctgtgagaggtgagctccttccctcatcgccggcttccggccgagttttcccgccgccttgcgcctcctccctattccctaactttccctccttgttccccagatccttccggtcgccgtccgccggttcccgctcgcggaacactgccggaccgccgttgccgtgccaccccgaggagtgccgccgccatctcgcctccctttggtgccgtgccgcttgctgagcatcccctctccgctctttccgccgctctccgcgtgccgacccgcgccgccggtgtcgtcgccggtggtcgccgtccggccgcgcgttgccgtcgtcgttcgccgccgctcggccgcgcctgtactttggccacccgtggaccactcctgtggtctgggtccatggtgccgccaggctgcagtggaccgagtccaccgtgcgccctcccctagtcccgctgacgtgtggggcccgcctgtcggcgcgcccttcccctttgatgacgtcagcggctgtgccttttcctttgaaaaattaaataataattgtgcaataaatcggtaataattctagaaattcatttaattggctcaaaatttctaaaattcatatctaattcattcgaactccgaattgggccattcaacttgcaaaattcatctaaaattgagctctacatgttttttttactttttatgtactgttttcttggtttttattagagtttttcctcgttttgcgtgccagcgtgtagttcccgtcgtttcggaagtccgcggtcgcgaggaaaagagctcggaagatcaaagtgaagaatcaaggcaagtcacacattccccttgagcattttgatcctaatttacaaatgttttatcgattgcaaataaaattgcatgtcttgctaattacatgggatcagggttttacctatctgctcacttgtgccatgtttacttgatatctgtcctttgtcaatattgggtaataaatcgactagctcatgttacttatgtgacctagctagaacaatatgcttagccatgcttaattaccactagctcagttgatgggataactgcagtattagacctttttagtatcacgaggagctgcgtgctcaagacacccggccatgcttcatggtcgtaattgtccaactaaaatgcgactaaatggtgggctgtgggtgcatggttttgctagtcgcacccatggcaattaaggaccggttcacgggatgccctggaagaacttatcgtacttaccacaagccagcatgggcaactgctgggcttgtagtgtagctttactctagccgacgcatccaggcaagggtgggcgtgatggagtttggatgggccctgcgacggcctatgcggcttccggattttcctaggcatgagaggggactgcccgctgccttgcgaggagtgggggtgaaacctgaggtgtggtgtgcttggttagagggggttatgcgaagggtcctgtcacggcctctttccggtatgttgtggtggcatgtcggcgcacggaaacgtgtcgtggggctgtgtcttgtgggtacagttgtacacctctgatcagagtaaaactattcgaatagtcgtgcccgcggttatgggcggtcgaccagattcaccgtgattagtccctccttaataaatcgactcaatgcactgtagttcaggtgggttggttgggcctgttcaacgtggtatagcgttgatcagtggagatttaatgttactttaattactcaacagttttactattttgctcaataaaatgttttacaaccacctttatgcaaatagccacaaaccgtccttgtgttccccttgcacgtctgcatcgttggtgtggcttgctgagtacggtggttgtactcagccttgctattattcccccttttcagaagtgtagtgcttctgagctgaagacaaagttagaagaccaaggctcagaccccagttgagttttgcctgtggagtggagctgaagccccgctaggatcgcctttttccgctgctgtcgttctctttcgttgtgaggactaagtgcctcttctgtaagtattttacgctttatttacatttggaactgtttattacttatcgttttgtgtaccctggctggtcctggacagggatttaatacacaaaatagtctggaaatttgggcaaaatttctgggcgtgacagcggctagcaacacgcgtaaggaggtgatggaagaagtcggtgatctgggggaatctgttctccccctttttgaagagtaggacctcttgtactcccaagacatgctgtgtaaaactgaatcttaaccgcctttggatgtgcacttattattctagcttactcttgcatgttgatcttgaaaacttttgtcccttgtagagatgttgatgacgaggatgtccagcagcgcgggcagcccgagtcaccggcgactattccggttctcgcgtttgaaccacatgcgttgcccgacaatgtagaccagacccttgctacggggacggagatggcgacgactttcttaggttagttgtccattcatccctttctgctcctccgactagatcaactatgttctcgaaagaggcgcgtagcttgacttagttgttcccacattgagcagatctcgagagtgctcttgctggccaagatcgtcgtatccaatattggaagacaaaatttgaagtagcggaactcgagagaaccatgcttgcagtgaagaaagagcaagctgtggaaacgctccgaggtcgtgaggtgtggttcaactcgtacttgaagagttgctgcacatccatggccagggtttgtagagaacttcgagtgccccgtggagatcccgaggagtcggcggccggatacatctcttggctgaatggagcctgtgctcaactcgacggcgtcggcaagcgtatcgacgaggtcttgaagcaggagtgtcgtcgatcgagccgatatgccgaaggacacgtgttggcttgcctacgagatcatcgcccgcgcctggacctcgattttctccgtgagggttttgctcgttctcggaggactccggcggagatagaccacctggcgaggtcgatggcgccgttggcggagaagatcttccagtctatagactggagttggccttcttggtagtcttcgtaacctgtgatagatatctcaggaaaaaggtgtaatatagctttggatttgtgtaaaaattgtaagaagtattttgtgaaatagaaaagaaatctatctttaacaaatctttcttactccggatgtcgtgtgtaagagtgtgttctcagttcacgactttagtcagtcatttgagtcgtacactctccctagcccccagccttgtcgtcggaggaattttcttggaggataaggctcttggacctttgacctgccttggttgaataagctctgatcctagcccccagccgtgaagttggaaagttaatttccgatttcgcggcttggttaatacgcacggcgagaactcttacacgaccagatcttacatggtctttcgtctctacaggatctgacaaggccttatcggctctgggcgtccccaaccgaagatcccttaggttcctcggaggccttgtcaagacggcgtaaagggacatgaggataggtttcaacgctaggtgtcatcagggtaagggatcattgggcggaaacactttgattgtaatatgggcctaagaataggctttattgatactgtaaggtgtcttacaggtacggattgtattgactcatacatagaatttacgtagttggtcaatgttccaagaatttgctaactcgcgaccatcgtcgtctgcaattttgaatgcgcatgaccgcaaaacttgtgtgatcgtgtagggtccttcccatttgggtgagagtttgtttcgccctgcttggctttgaacccgtcggaggacgtagtcgccaatcgaaagtatgctgctcggatgcgcttctcgtggtaacggcggagggcctgttgatagctggctgctcgaacggcaactcgttcgcgatgttcctcgagtagatttacatcgacgtttcgctgctcctcctggtcctcatcggagtgcttctgtactcgtgtactctgatgtcgtagctcgctggggagcatggcctcggagccgtacacgaggaagaaaggtgtttccttgttagacgttgtcggtgtggtgcgtacagcccatagttactgatgggagttcttcaacccattttttgtcatgtgacatgagcctgtcatagacgcgggttttgatcccttgtagtactatgccgtttgccctctcgacttgtacgttgctttgagggtgagagaccgaggcgaagcatatcttgactcccagcccgatgcagtaatcctagaaatcagcgctgatgaactgggagccgttgtcggttatgatgcggtgcagtagtccgtatctgcaaaatatccccttgatgaatttgatggcattgtcggccttgatttcccccatgggtactgcttcgatccatttagtgaatttgtcgatcgccacgaataggaacctatagccgccctgtcctcgtgggaatggcccgagtatatctagcccccagtacgagaacggccaagtaagagggatagtctggagcgcttgcgcgggtatctttgtgtgtttactatggaattgacaggcttcacatcgctggaccatgtcgcatgcatctttaagggcggttggccagaaaaacccctgtcgaaaagctttcccgaccaatatccgaccggcggcgtgtgacccacaaatgccttcatatatatcaaggaggaggtgtctgccatcgtcggacgagacgcatttgagaagtaccccgtttggcgctttcttgtatagatcgttgccgaccatacagtagatctttgctttacgggttattttcttggtctctgtatcgtcctcgggcaactcctcgctgttgatgaatttgattagtgggatgcgccagtcgtctgtggtctcgatatcggcaacggcttgttctgcctttgtggcctccgagctaatgtcgggggtgaccgggctaacttcgccgctaacctcttttactgatggctttgtcaggatgtccagaaaagtgccgggctcgagcggttctcgtctagacgcacgtcgtgctaggtcatctggctcgatgttgtctttgcggtagacgtgtcggacttcgatcccatcgaaccttttctctagcttcctgacttctgcgagatacttggataactcggagttagagcatttataatctttgtgtacctggttcgcgactagctcggagtcccctttcacgattagtcgcttgaccccaagtgcggctgcagctcttattggtcgccctaaagttgaggtggattgtgtgcttgaattgatctccggagggagacgtcaagataaatcctgccccaactccttggctgttgagtgcaccatcgaacgccattgtccacgtttcgttgtcgacttggttgtctgatttgttatcaggcatagtccaatcggctacgaagtcggcgagtacctgggatttgatggctgttcgtagcgcaaaattgacatcaaactggctcagctcgactacccatttcgcaatgcggccgacaacgtctttgtttctcacgacttcaccgagagggaaggaggagacaactgtgactctgtgggcttgaaagtagtggcgtagcttccttgatgtcatgatgaccgcgtaaagcagcttttggatctgtggatatcttgtctttgcgtcgtggagagcttcgctgacgtaatagactggtcgttgtaatttatctctctcgacaacgatgacggtgctaacggaatatggcgtggcggcgatatagaggaataattcttcattaggttggggggcaacaagtacaggggggttctataggtagcgcttgagtgcaacgaatgcctcttcggcttcctgtgtccatacaaatttttcttgcttcttcagcagagcgaagaaaggttgccctcgttctcccatcctagcgacgaacctgctcaatgctgccatccatccggttagtttctgtacttccttgagtcttgtgggcgacttcatgttctcaattgccttgatcttctcgggatttgcttctattcctctgccaaagacaaggaaaccgagcagcttgcccgacggtactccgaacgtgcacttctctggattgagcataaggcgatatcgtcggaggttgtcgaacatttcccgcagatcgtcaatcaatgagtcgcctgtcttggtcttgataatgatgtcgtcgacatatgcctcgacattgttgccgagctggtcgctaagtgcgccctggaccatgcgctggaaagtattccctgcagttatcagtccgaacggcattttaacatagcaaaataccccgaacggcgtgatgaatgctatcttctcttcgtcctcttttgccaagctgatttggtggtagccagagtaagcgtcgagaaagctcaacagctcacagccggctattgagtccaccagttgatctattcgaggaagagggaagtgatcctcggggcacgccttgttgaggtcggtgaagtcgacgcacattctccattttccgttggccttccgcaccatgactggattgactagccactctggatgaagtacttctctgatgaagccagctttgagaagtttgtcaagctcttctcgtatggcttattttcggtctagtgcaaatctccgcagtctttgctttactggcttggcatcgggtcgcaccatgagtttgtgctcaatcacctccctggggaccctcggcatgtcggacggctgccaagtgaacacgtcagcattgtcgcggaggaaggtgatgagcgcgagttcctatttctcgcttagtgttgccccgatcttgacggtcttgtcggggttggcactggagagtggaacgatcttgattgcgccgtccggtttcggcgtcttgtttgtcttgctcactttcttgggtggctcagtcgtggcgggtgggctgggcgtttgctcgaccatgtcgaggctccgtttgtcgcattgcaccgccagctttgcgttcccttgaatagtgattgttcccttcggtcccggcatcttgatcacttgatacgcgtagtgagatgcggccataaacttcgcaagtgcagttctcccgatgatggcattgtaagctgtatcgaattcagcgacatcaaaggtgatctgctctgttcggaagttgttggcttggccgaaagtcacaggcaacgtaatcttgccaaatggtctggatgaggattggggtgtaattccatgaaagggttgatcggttggtgtcaactcgctttgcggaattcccatcgcgtccaaagtgctggcgaaaagaaggttgattgagctgccaccgtcgatgaggacctgcgcgaccttgatgttccgaatagtgggttcaaccatgatcggatatcgtcctgggatgacggcggtcttggggtggtcttcttccgagaactctatcttctgttcagaccacttcatcttgggtgcagccccctaccatgttgaacagacttcgcgttccacttttttgtactctcgcttcgaggagtacgttgtggaacctccgaagatgtgtgaaacgtggaggtcagagtctgtcgacaggttggatctttcgacatggagtcgtcttggtttgtagccactgcgttcttgtttccggtcattggcggaccggttgagatcggcattgtggtgtaaaccgggaagacgatttcgccgacttgagtccacaccagcatcgttgaagcagggaatacttggccgaggttggtgttgacactgttgtcgacgaggccggataacatagtagtagaaccttgagtaccaagtccccctacctggcgcgccactgtcgacgggtgatacccgtagaccggatatagagggtattggggtacgttggtacaaggatctacgtaatacgacatcaagtaggcaaaagacaaagattatactggttcaggccccttgataggtaatagccctaatccagttgatgtgggattatatgatggaaaacacaggttacaaagggaacagtggaacttgacggatccggcgagattgtggtcgagttggttcgactagatccccggcgatttggctccttgcaggctccgacttcgtaggctgtgagggttgtgttggatctgagattcgatgccctaagtcctccctggggggtcccttttatatcacaagtcaggcggtttccaagtagaactcggaaacatcgaaccttacacgatacattgacgacccagtcttgtccgagtaggactccttccatttgtaaactccgtgaggggtttccttaatatatgcggagagtatccgtatacgcgtgggtataccataccgatatgcgacgtatatcaaagggtaaagggtatacctaacccgtaaccctgacaatgaccttgcctaacaacatatgcagaacaattgataaacttgccggtattttatagaaatagacagtgtcgatgacaaattattgaaatgagataaactcagtggcataagctcctattaatattatttgaacttttaaataattttatgaattatattatatgttatctattataatattagttaagcatgcatttgtgctgtaatgttatatgtgttgaactcaatattatgtatgatgatagttatttctattagatagaagtttgggttgttttggtgttacgagaaatgtttgttttcatattcatgtccgatcatattcgatccttatttatttttgagataatttttattactttatgtattcgattttgtcagggttatggataccacatacctaatagtagttgactaaatctcggcaagacccaccacataccatgtcctatacggaaacaaccttcggatataggaggagttccagataaggaaagacaatcaaagttctacatggaaacgacaaggactactcggattgtatccatattggtttctctagttctatttggacaaggggacacctatgggtataaatacaaggccccctaggaggagaggggggacaatacacacccaacacaatcaacatacacggaacaacagaagccacaacatacaagccaacataagccaagacaagacgccggatatcaacttcggagataggtatggctagtcctctacggtgtctccggatactgtcaggaaagacgaaagcgctatctctgatctcgccgggcatggattcgaggaggaagactaccctgttgtcgactacgagtcagaccttcagaccgccatgtcgacaacagttagataggctacccaaaatattgtactggtatgattatggtgaataagatcaacgaccggcttcagccaacaggatgtagggttattatctgacaattcaggggcccgaacctgtataaaaatccctgtctccatctcttttacctcagtctcgtgtataccctagtaccaacgatccctataccatgtaaataccagaattgcgacatcaaacgtcgacagatttattcatatttgttttcgtatccaactaaaaatatgaaacaaatatgatacgagtattatttgttaatatctgctttgtttgcatccctaagtaagtaagtaatgcaagtgtagaacactaaaacagtgtgctttgagttttcataaaagtaagtcttaagtttagaaattgttttacttcatcctcataaataaatttatttgatagcctcctaagagattggaatagaatctagaaatttgtagtctcattggccgtgctagttttgggatacaatgccttaaatctttagtctcacaataactccggtgttaaatttgtagttttatgaagcatcttttaaatatatagttttatgataatttgataaaattatcaatagttttgtaaaaatttgtaggtgataggtgatgtatgcccccaatttgtaagccgtcccgtcaaggcgtcaaccatcaatatccgatgtgggaataaatgaacaggtatacatttataaaaagctctcttctttaaaaaaaacgccttcaaagtttattcaaggtagaaaacaattggatatgtaataatgcaaactatatcatcatcatcatctgatcatgtaagttgcaaccaactatttgatcgatctcacctccatgattatctttgtgagaggcagccatggccatggccatgcttgcattgcatgcaggagaaggtgtggggaacatgtctttagggctggcaggccaaggccaaggcctaaacataaacaaagagaaagagaggaatcaagcgaccaagtcaaccattgcctccatattttcccttcaccacacacacacgcacacacagagaggaggacgtgcatggcatcatatcaatctctgcaactgcaatcgccttaaattatctctcctcctcgccgcgttcctctcgcgaaacgcagcgcattgtccgctcctcctccgatccctagcaaaagcttcctagctagcttgcctaccattgccatcctctcccctccaacctctccctccattcgcattaccgcgcaaaggaggaagaagaagaagaactcactcgcaggagcaccaatggtgatcgatctcctctttctttctctctctctctctctctctcgctacaaattaagcacaattgcaatttcagtttcttgcatggtcaatgatgaattgcaattaatagagtgatttcccccgcaaaaaaaaaattaatagagtgatttgatttgagaatggcaggcgaattctgcgtcagggctggcggtgaacgacgagtgcaagttcaagttccaggagctgaagacgaggagggggttcaggttcatcgtgttcaagatcgacgacaaggccatggagatcaaggtggagaggctcgggcagactgccgagggctacgaggacttcgccgccaccctccccgccgacgagtgccgctacgccgtctacgacctcgacttcgtcaccgacgagaactgccagaagagcaagatcttcttcttctcctggtatgggtacttaaaaatatatcctaatcttttgaggggacgtcctctcatttctcacgtctaaatagttaaaaaaaattaaaatattaataagatatattaatatgtgatatatcattaatttgaacctgacttcaacaaggtgcaaaagaaaaacaaatatgactgaatacacgcatcttagctagagtttaatttttttgctttttacaaatcgtaaaggttgaatttgaatagtatatttgtgtatataataatctatcttgataactttttttactaaatttttcattactaaaagggacaagatgcaagaaaagaacgacagagagttttagaattcattcccctatatagctataccatcgaaattaatatgcgtggctaagttcaatttcatttcgatgaggtatcatttctgttataccagtaaagatcacagaaagtgccatgcatgtatgtgtaggtcgcctgacacggcgaggacaaggagcaagatgctgtacgcgagctccaaggacaggttcaggagggagctggacggaatccagtgcgagattcaggccacagaccccagcgagatgagcctcgacatcatcagagccagagctcactgatgatcatatcatttcatcatccaacaccaccagattaattaattcattcccaacgtcgatcgccttattcaaccccagatccatgcatatatatatgcccatgggttaatatatcatcaattatggggtttatgtccgcttaaatttaccctacgtacgttttgatcctcgcaaaaaaaaacacatacatatatatatataccgttttgatcgactatttatacgttgttatacgacattgatgtcgtccaagtattattatcctattatatataattccttcatttcattctatttttcttctgcttatatcttcaacttttcatttttgtaatttgtaagttgtattgatgcaatttgttggcaacaagaatacactttttctattcatgtataatagaaacaacatattctcttattacgtgttatgagttgtgtgtgcataatggaatttactgtgtccaaacattaggtgcacggctagttctttacttttagattggttgggtgaaggcgaatactgatggggcgtttttgtgatggcacactagtttggagcagcggtggtagtcttgcgaaatgaccgcggagattttctgccccattcgaatgtcctgaaaaggtggattaaatttcggattaaagtggcgcgctttttaaactgctaaacggtatgttccgtgcaaaaactttttatatgaaagttgttctaaaatatcagattaatctatttttcaagtttgtaataattaaaactcagttaatcacacgttattaccacctcgttttgcgtgaaacacttaatctacatcttcatcttcatctttagaagattcaaacaccttaacaatatcatctaaggattaggatgctaccatggcgaaaattctaccttatcgcagagcgactaatattgtaagggagttaggagtatctaaactaattattgagactgattctttggaagtgaccgaccgagaatggtgggagtgtctagcaaacattcgaatgatttttgtcatccatttcacttagatttttcaacgtctatccggatgacacgttgccgagtgaacgactttactagttaatcgttctaaccgattgctcggtgaagaaaaaaaaaaagccaagacatcccttcattttgattgtctagaaaaaacccgagatgaatgaataaatattactaatacatctacttaaaaagttacatgcagttacattatagtcatattagctacagtataattacagtatagttacattgcaattacataatagttacactacaattacataaaagttatactgtaattttataatagttacactttaattatataaagttacactgtattttctagaattacataatagttacgatgtaagtttatcgttgtaactctaatcaatatttattgtatatatattttttgagggaactattttccagcattgcatgcttgctcggttggtcgtagtggttctagcgggaagcgcaggccgcgagatcgatctcacatgtgggcatctgttttatattttcccaccagtacagcacgaatcttgacacaaatcctacggccagaaaattgacagatgtgtaactaaaaaatctgtcgaaagatttatagcaaatccggagatgcttagaggaaagttaacagatagatttgtaggactttggcccaagacctgaagataaagctgagttatttcgaaagcgcaagggtcacagattagctcaaggagagtcttcgagtagttttaccacctggctttctatttttccaggttctattagttcgattctgactgatgattgtaagtataatagtctaagttaattaagtgcgagtagtgtactgtgtaattcttaaaaatgtagtgccttggtgtggttcctattttagcatatatcaggccttggtgtgaacatatcaatctttcttgcatttggtgcctaactgtggacacggttatgcatgaatgtatgatgagactccaggacggttgaaaacacttcaacaatatgatatcaatcttgttttaatcaagatcaacacgcatcagtttcataccaaaaaaaaagggggaagaaaccatgcaacatatctggcagactccgatattaaggagatattatgcaatttacaaaaccagtaacatattacaaaaaaaaaaacccactaggaggtagaaaacgaagattaaagacagtttatcagatgtccatcaaacagctgtcagcgtttcatatccaatgaaggaggcacacaagaacagcagcacacgtttagacgttttcactattcattggctctcatcgacaaataattttattgggatgacaaacacacttttatttggatgataacatcttctacacatgctatcctacgccatattgagcataatattatacagctgtgattactatacaaagccggggcattttagtacattgggaagaaataaactaaaaaaaacacttattacaagaaccaagaggtgcttggacacccaggttcgtctttaacttaactatacatcctttcatatatgaacttatagccggtaaacatcgtgcttatatgttgtattgctggtttatcttttattgcatcagcagaagattatttacagtagcgtttatattatttgttctcatcagatcctacaaattggtgaagaaaaaacatcagtgcataccagtgcgtaaggtaatagctaaaactagagttgagaggaaatagaagtgtacctcaataattagctcgtcagggatatggggtaaaacttctcgtactctatctaccatggagagaacctccgacatgctaccattcgcgggtcttgcagtgcctcggaaccgcaagccagcagctgaagcaccatcaggcctcgaggaagaggatggaacaaccgaagatcctgcaactggctcaggccatagactccaggtggcatctggatgcccataattatcagtcactgaagtcaactgcctcatcatcatctgaactccactaagccccactgatgtcacggcgctggaagaactgggattgtccatcccagggctcgaccatggtggtgcccagctagaatcaagaccagcacctctgcaccacccaacacctatgcatcagtgctgcagaatcgtatgcatagcagtacaactatagggttatggtgatcaacaaacaatttccaaaaacgaggattcactgatatagcaagtgtatgtgtgctaaattataatagcatctgagagataagtcatactgcatatacaatacaagtaggcacagaagagccatcaggcaaccataagaaataaaaggaatagacgagagatggaccagtttgacccatccaacccacctgcacgcatgagtgtatgcgtctctttcggccctttccagcccaaccaaccaaacctgcacagatgtgctctataaaacttagccccttatctctgactccatgtgtatgcaagacagtagcagcttcacctctttctccatctaggtttctctaccctcacaattactctccccactccccctgcccccctgctctctatcctcgacctacctcttctgcctcactgccacgaatcaaggtagaattctcccttgcatagttgcaatatggaagagctggtagcaagcggccaggagataatgcgtttttgatggtcaggaagttgggggagcgagaacaggagctaaacgcacactatatcaaaggtacaaaagtaccaggaaaatatcattacttattcaaattattttggaaattaaacaaatcaacaatacccgataccatatccccttgtaagttgtatcccaccacatccatgtattggatacgtatttgcacacaggatcagcattttgttgtataggtgattaataggaagataaaacatatatcttctggtaattttgagtgagcatgagttttagtcatctttggggatcccttctttgccaagttttcaaaattatgtttcctttggtaagtctttattactaccaggttacaatttcaatgttcaatcaagattcaatcctaaaaatatgctaaacctgccagtataaatcaatctgactggaacaaaatattcaaaataatgatggtaataggcaggtgagcaccatcagtttgacatactaaacctacttagtttcacctagaatgaataagattcgaaaagatgcattgaaagactttggttcatcattatgaacaaagataaagtccattaggaaatgaaactatggctattattcttcctttttctttagatcaactaggcctggtaaactcgctttcatacccatttaaaacttcaattgaaccacaaactaggaccaccattaagtgatacattacaacaaacaatagcttcatcggattaaagattatcacagtatctagatagaaaatgtgcatgccataaggctaacaaaatctttgcgagggtagtaacttgaaagagaacaggaaattaaaaatgccctcaaactataccattcatacactcaaataactgaggtagtctatcaaggcctagtttcaaataacgatataatgtcagacatttgcccaatcactttataaaatgagcttaagttgtgacaatgaacaccaggggcgaagaatagggaagacatgcatgagtggagnnnnnnnnnnnnnnnnnnnnnnngatcttggttatgttcacggtcacggcagatgaatatgggctgggaaaaatatgttttgtgacaaatgagctgcagagatatggtgcttaggtgaggcaatggtagccagatatgagaaggggacaatgatgtttcctgagaacttcacatagaagtgatagtgctatgaatgtggccatgttggcgaagaatgaaaggaatgacaaatttaggattttccctcctgtgagtgcactctattgtgctgttctacaagccatcatcatcttccttctttcagcaaaaagagcatatcttcctcttccttctatctccgaaaagggcatatcttcctccttgtctgagcaggatgtgtgctcaattcagatctagcatgcataatggagtcgaccgctaggggtgaggtggaaggtgttcgtgcacatcagcctatggcacacacaagggattcacggtaaacagcgacagggacaattggacatgatctctgctgcactgtctttgccacgacagccaccacctacactacagtaatctggtaagcaatttggcactgcagcagaaagatagcctctcgcttctttaccctgtgtgagatcaccaccctccctaagacttataagctgcgagataacacttgttggcattgcccacgcataccaccaaggatcatccttgccaagtgccacagcccacaaccagtgccaggaacagtccaagatcctgatcatattatctctacatactccatcgttccaacagctaccagggtaaatcaggcggcttttgtgataaattatatttgcttaggcagttgtaaattaatgaattggcagttgaaatgagatagttgggaggaactctacaattatgtcaagttcaatctaccatacaacaactgatcaccaagaatgtagtggaattagctcggatgctggacaaaaggcattacaataggatgttcaaagataaaatttctgagaaagtttgatccagcacctcaggaatcaatgatggctccaatgtacaggggttttctagacagcaaaagttaaccttttcttttctcatattttttgttcattcccgtactcttgttgatgtagaaacacatgcaggaagcgcttatggaacacatagagcatgctggtgaggaggcaagaaactggtaaacgaagaggtcatagagtggcatactcactctgagtaagcaacagatgcagttggttgtttcttcattggcacaaactgcagagcagcctcctcagaggcacctgctgtttttgctcctctaagctcccatttagtctttgcactgctgatttccacattagctgccttctcttccatattatctctctctatatatagctaggcctgcctgaaggttgcaactggctatccagctagcattgagtaacaaatgatgggaggctgtcaggctgacttgtggatccacattgttagctaatatgtgggactgatgggatgtagtgatttcataaaatcgagcacaaaaactatcgtaagatgggtccttaaaggtgtaggtttgtgatagttttgaagttttgacaagacatgaataggttcattgaatttaccccaaatcacatcaataatttgacaagacattgttataacatgaatatgatgagcaatgtgaagaataagaaaatagatcattccaagtttgttatacacacctccaaacagcatctgcaggattctgatgttcaataggatgttcatgaccaggaaccctctgctgattcaaccccgcattaagttgttctgcaattaactggacgtttcctacctctgctgtagatcttgtgtgaccttgagatgacagaaagagaggtcttcgacaagttggacatgagtaaccatccattaatccttggtccaacctacacatagcaacaatacttaagggaaaaatcaaacatagaatgcaatttgatgtggtcacatttgatggtaagatgtgaagctatacacaattgctaagcatatctacttttgtgggtgtagaagtgttgcatatttttgtactaagtgagaagcagaggtcagtacagttgtacgaaagagcaacaaagggagctgaacaacagtctaagctgaaatacaagtaatactatgatctgttactaatgactaacaactgcaacttcttcacatcagcttgctggcaagcttcaatctcgtcaaagatatttgtgagaatctgactaataatttgctaagaaggttaacagaaggaccatccaccatgctcagcaatatcaattttccttatgcagagattccatgacagaaaaatttaagtcaaccgtaaaataggaatgttggtcccgtattttaataagtaaatttggaatgcataagatcaaatggacagttatgacggcatatggagtctgttcataactacagcctgcagtccttatgcaaatagtgggagcacaatttccagaaaatgaaaatgaatctacttaaagttttttttttggtaggacattatgagctatcataaaattgaaccacagaccatcaattgcaaaatagtaaaagggactcatcgcgtaccatgatcgcaagca

SEQ ID NO: 6268 - DNA, 32845 bp, Oryza sativa
tctccactgcatctttcctctcccactcattttattcactccacaccttttcccacttctcttctgcattcctctcctcatctcttccccttccgtatccccattctcttctctggcggcaagcgggcggcgacggatctaacaccgctgccctcggccccaagaaaggcaatgaagatggtgggcagcgacggtggagttcgagggtggctgatccgtcgtagccatcctcggccctagagaggcgatgaagatgttgggcagcgacgtcggagctggaggatggcaaatctggcgctgctgcccctaggcctagggaggggcgatgaagacggcaggtggcgacggtggagctcgagagcggcaaatctggcgccaccaccctcaaccccaggaggggcgacgacgagcccgagtgcaacagaagctagggtttcagcggaattttctttttggtattctttaaccaaaattatttttacagtcggtcggcttaagcgttcgtatgcgaaaataccgaatttaatttgcatgcggttgctatacccgcatataaaattatcgattttcgcagacacctaggtgcaagtgggccacccatgcacctatgaaaattgatctttttttagaaacacattacaaatgcaagcacccaacacccacacagtcatctctatgaacgtgcacacacacattacctctataagcatatccgaaagactataccggcatatctatcgattctatagttatatgcgaaaatcttttatgtagtagtgcttataatcgattctactatcagtatcccatattatcatctttcaaattaaaatggagtatttcacaactgtagcaaccgtattatttcacaccacacgcgttcggtgtgccgcgtactaaaactcttttttcagagatcacgcggcattattgatcgttctctcactggtttaatttcgtcgtaattgcgacatgacaggagtatttgtcagcaactagtattgaaaaagaagagcgcctaaaagaatctgtggcgagcgctgagtgctgcaaaaacatcatcatgagcaatctccatctaaagcgcaaacaaaccacaaattaatcactttttaaaaaaataggatagaggggttatttgagaggtcaagaatccgaaaaactaggtttctcaaattctaggttctaatttgttttatttgttttatggattctaatttttaaagtttactccatccgtcccaaaacagacaaactctagttatttatctggatatacatcatgtccagttacgtagctagagttttttttttttaagacgaaggggtagtgataattttaactgtttaaaaaggtttctgacagctagaaattctgaaagaaggatagaggtgtcagaatgttccaaacagggcaaaaatagaatatgcactgagccgaggggaaaatcagataaattaagagaaaaatagaatatgcactaagccgagggggaaatcagataaattacgggctcccacgtggacgttccgtaaacgacaattcgcgtgcggcactgcggcccaccaccacgtcagatacgtactgatattttcaagcggagtagagtatacgcatgatgctaaaatctattcagtatacgctttctatttttttaaaagagttaaacagtacaacatatacactcaaaacacacgcacactaacccctataaacgtatgcacgcaaatcctacccctatgagcatcttcgaagactgggccgacaaatcctcgagattgataaagtcatcacagacgcctcgttatcgacggatccatctcctaccactgaaaccacaaagctgttaaatcctaaaaaattcgctcccatggagagtcgaacccaggacctaaggggaaaatttgctcccatgagtatacgctttttatttcatcttatttagataccctttcataagtccgatcagttaatgatgattgaggtacaaacacgtgaatattatatagataaacaagatcacttgcgagaaaaagagaaccacatgctatctattactacctccatcctagaatataagcatttttagagttgggcacggttattaagaaagtaggtagaagtgaatgatggagggtggtgattggttgagtagtggaggtaagttgaaaaagtgaatggtggaaggttataattcgttgggaaaagaatgttggtggagaagttatattttaggataaatcttgaatgctaaaaagttattatattttgggacggagggagtagttgtcatgttgattcacgtgcatgttagagcaggtacaatagtaagctataagccagctataaccacatatccagaagaaaagagaagagatagaagaaagcgggctacagatttgtagtcagctgcagtacggactctaagatgttatgtgtgtatgagaggtgggaccaggtattaatggtatagcatgattttatagtcaactattgtatgaatgagctattagattaactatagacgatttagagtaaatatttagctatcctattaaacttgctcttacgaggctaacatatcgttacactagcacattttccttttatagaatctttgatgacttatattttttttatagacagtatattatttgtaagattcgtttgaactgtcctatttcacttaaaatatgtaacaaataagtctaatattgaatatattcaaattaatttttttttctgaactgttctcgctggatagttaaagagttacttcctcagtgtcgttactttcaacgccgtgataagttaattctctagcaatacagttatttctaataccttaaatagttatttatgttttatgtttcttagttactttcctctagaagtgtatttacttataatattatgaagagttccgtctatttttcaaaaagttaatttcatccagtagcgtagttacttttaatataatgaaggattactttttatataacgtaagatttgattttttctaaaataatacagtgattactttaaataaagttggacatcttctctacactttagttgtaagtttattccacatagttttgtattccaactcagtcgtaatgtaattacttctaatgctatagagagttacttctattgcatagctaggttacttctacaatttaaataaattacttttaagttaataaaatgtttgaatatatttaacattgatcttgttttatctcatattttaagtggagtacaatgaagcaaatagattttaaaaataatatataatttaagagatactccctccgttctaaaatataaggcacaaccacccttaactcaaagaccaagaaacaattattatcatctcctagtttgaatcactctaataaatataatgcatacatctaatagaattagagatcttgaggatggaggatttaaaaaagtaataatttaatggagaaaaggtcctaattaattatatgcatgcatgtatatcttatattatgaaacatcttaaaaaaaatagttgtgccttatattatggaacggagagagtacaagttatcaaataggtaagaaaaaaaatacaatttagctaaggagatttatacgtggaggaagtgatcgcggctttaatcaaaccaacgaccgatcgttgtgtagtcgtgttcgaagcagcatcagctatctttcatatacggtacaaatttaagccgccttttgaaggctaaagccctgcaaaaatcgttttgtatagtgtcagtcggatatcttgggcccattgggccacgtctgcgcgagggcgaccggccgcgtcagcgtgagtcggctgacgctgacgtgtccgcacgcctgattcttggtctaactcatgtccggtgattaaggttaatctctagatatatcatctgtttacgtaatatccttcattcacagatataaaaaatattacaaattaggatgggttggatttgactctttctacgataacgaacctgaatataatcagtttaggacttggtcaaatcctattatagattgtaatttttggagaaaaaaaaagtaagtactccctacgtttctaaatcttttaacaccgttgacttttttaaatatgtttaaccgttcattttattaaaaaaatttaagtaattattaatttttttcttataatttgtttcattgttaaatatacttatatgcatacatataattttacatatttcacaaaagtttttaataataagatgaatggtcaaacataaacttaaaaagtcaatggtatcaaatatttagaaacggagggagtacttgttttctcaactacctattttgtaaatcagtagtaatatattcatatgatataactagccatgcctatataagtagggatatgttataagcaaattagggatacaattaattttagatccggtggttacataagtaagctacgcgagtgagcgcagtgggaagatgggaaagtaggactgctaatatatataatatatattcttcagccgttggtcggctttatccatttcgcggaagacaaaattaacaagtccatgatgtcccgtagttaattatttatttacagctttcacatacgtacaactataaataccttcccacaacaacaataatataaggggcaattttatttttacccctacttttgatcttcaatgttgattttaccctgtttttaagggtttttatttttgcccctttttttttttaaatgaaagcaaactctacccctactttagatggacaagttgacggcgttaaatctttggcgaaaagacaatcatacccttatttgatattgcatatttgtctgaatgtttatttaataactgtgtatttgccccctttttacatgcagcttgtattttgataaacttttacaaatatgataattttgatagaatattaaaattttgatataatttttccacaaatttggtaaaatttgggtattttgaagaaaaaaagacagaatttgggcacaatttcggcatggtttttacacagctaacaaaatacatgtagcaatcatcacaaaatcacacaaaatcaagcaaatccaaatcatgaagccaagcaaatacagtccagtagcatgtcgctcctccctatcgcctgtttacagccgagccaggttgatgctgcttgccgcagcgtgcacctccgtcgtgccctgcttgccaacagcttgcagtgcccctgataactgctcgctgcgcgcggcctgctgcttggcgtgctcgccgccaccgcttggccgggccacctgccgtcgcctcctctctgcgtcgagccgtcgccgccttcccgcattaagccgccgatgcctaaccgagacgccgccgtcgcttgctcctccgtcaagccgctaccgtctggacaagagcccaccttcgtcttgtcccctcgtcgagccgccgtcgcctggcctgccttgatacgcgccgccttctgctcgccaccataggtgggattggggaaggcaagaaggacggctttggttatggctcaccaggggtacaaaggtccatcaacgaattaaaaaatcactatttctttttctctctacgttttagctccataatcctaggtcggctaacttccgttaaaaatagggataaacgtctatttcatttcagaaaagcaggggcaaaaacgaaaaccacaaaaaacaggggcaaaatcaatatttaaacatgaaagtgagggtaaaaacgaaattatcccataatataaagtaccttagattaaaagaaactacaaaatattatcttttcttctttttgtttttgaaaagactatatatcgtcacgatggtcgagttagagcatcatcacaacaccaacatgtctagtcggtcatcaacagatcgaacagaacgtccttatcagtacactattgagagagaaaagcacgtttcggcacatcgatcattcagcgtagacccctgagaaaggataaacgtgtggcatcagatcacatattgcaccgacgatcatcacacacctaatctctccatccccaactaacagaaatatactggagtagtatctattaatttttcaagtgaattaattagtccgttaccgatttgtttggtgagtagtgatttaatttagaagtacgtacacgcgatcgatctcggacatttcagctacaagtgcgtgccagcggtggtgtgaatataatgaaattagccgctccagccgatatatgtagacgtgtactaacacaaatactctatccgtcttataatataagtgattttaagtttttacttacactatttgatcactcgtgttattcaaaatattataaaattattcttttacttactttattatccaaagtactttaagcacaattttttaatttttatatttacataaatttttttgaataagacgatttatattatgggacggaggtacatgctagcactgggagagaaatggcgtgtcgtcctcgtacgcagacaaagccatccccactagcttactgtacgtacaggttcactgagaaccagtacatgtacgccgcgcgccattaatttttaaagagtaaggtatacgatcggtgaattttttttgaaaataatattattttaatggaaaatcacaaaactttaggtcggctagacgaaatcacaagtttagcgccctgtcgaactgggacagggtactgtcgaactgccctagttcgacaggctagttgtccaagaaaaaaaataaaaaagtacttgctacaatgcccgataaggacgtatcgaacagggggagttcgatagggcgcgtggcatggacgtatcgaacagcgggagttcgataggcagcgtcgctacagtgtcgctacagtgtcgctacgtctttgatagagaaaagactggactagcatttttgaatgatgcaacaacgcaatatatgatgttgttgttgtttctttgcttccaagtcgtaggccggtctcctcagtacgtgtggatagatatgccacaatgaagctttttggttaagacgtcacaacgaagctaacatcggtatctctgggtaggtttagcttgaaaacgagcccgttgcagtcttatggaatgaaacaaatgaaagaagaaaaaataatgtgcacaaggaaggcaagcccagctataaaggtgctggtcacctcacattcatatgcctcagcccaagtgtttctagcggtcgagcccgatcagatgcaacggcaaactttattgaggcccaagttcaagttagcaaaatggcttcttttaactttgttaagttttgaagcacaacgtaggcgagtagagataaaaatagagcggatagcagagaggatagcttccatccgctctaaagaaaaacaaatacgaatataactcggatatgaaaatgaatgcgggtaagtttttgctagatgcaaatatgtaatcatggtattcgacggaaacaaataatacgaatatccagtgaatagtgttatttggacatcgccaaatgcatgaaacatgtcccacatctttttaactcaccttcgatatactccctccatctcataaaaaaaccaaggatgagatgtgacacatctagttctatccagattcgtagtattaggatatgtcgcatctcatcctaggtttttttttatgggacggggtatatctttagagtttaataatagcacaccccactagcactagctcgcactattaattgagagaatatactctttgtctttgagtttatcttagttcaacgatttaccatagacattatcttttctataatataccggtaagtttatcaattctcctacaatataccattatccattgagttgggcatggttttaaaaataacactaacacacttatagatataaaaggttaacaattgttttatcctgtcataagtctcaaaaaaaattatgaatttttttagcctctttacacaatgtatatgttcaagatttttgtatttctactttttataaaatataatttatcagttatatgttatatagaatatgttttgtgttgttgtttttaatgtaaatcatatttcttaggctacacaaaaatatttttatgctattatttttgcataactaatttctctctcatatactccctccatctacttttgatgtgtatatttccaaatctgaaaattttacttttgataggcatatttcaatcaacaacctatcctcttaatgaatttttcggatttaatgcgtgactctctattcttccacacaagattggctacatgggcatcgagaaatataaatattaatgaatcgcctgtttacgggaaataactagtagcatgtttaaatggataataagtagaattacttatccttagtcattgtgccaagatgcaatatgactatcaaaagtagatggagggagtaccaaacaaaaataactatgttttttaaaaaatagaaataccagaaaaaacatgaaacttatatacacacttgagtaaggaggctaaaaacttcatatttttaaaaacttctaatgggataaatcatttttttaactttgtatgacttcaagggtatttttagtatttccaaaaaactgtcgacgggtgatacccgtagaccggatatagagggtattggggtacgttggtacaagtatctacgtaatacgacatcaagcaggcaaaggacaaagattatactggttcaggccccttgataggtaatagccctaatccagttgatgtgggattatatgatggaaaacacaggttacaaagggaacagtggaacttgacggatccggcaagattgtggtcaagttggttcgactagatccccggcgatttggctccttgcaggctccgacttcgtaggctgtgagggttgtgttggctctgagattcgatgccctaggtcttccccggggggtcccttttatatcacaggtcaggcggtttccaagtagaactcggaaacatcgaaccttacacgatacattgacgatccagtcttgtccgagtaggactccttccatttgtaaactccgtgaggggtttccttaatatatgcggagagtatccgtatacgcgtgggtataccataccgatatgcgacgtatatcaaagggtaaagggtatacctaacccgtaaccctgacaatgaccttgcctaacaacatatgcagaacaattgataaacttgccggtattttatagaaatagacagtgtcgatgacaaattattgaactgagataaactcagtggcataagctcctattaatattatttgaacttttaaataattttatgaattatattatatgttatctattataatattcgccagccgttgccgcctcaaatccgccacgtccggccacaatttctccctcccgagccaatataaaccctccccgtgctctcctcttccatttccccctctttcccgagcccggcactctctccctcgctctccccacgccgctcccgcgcaccgccactttctggcgagctccggccgcccgccaccgctgctccacccaccgccgcacaaatccgccaccaccgtcggcttcgcggcgccgtgctgcagcccggcccctactccatttcccctctccgcctccggaacatcgccgcctcgcgcaacacctctctccgccgccgccgtcacctccagccacgcgccatcgccactcccgccgccactgtgctgcgccgcctccactgccggcttcaccaccgcgcgggcaagctcggtctccgctccgtttccctgttccttcaccggaactccatcccctctgtcaacccaagccaccaccacctcgccgccgccgcgagcgacctccaacctcacgctctccttcgtcggcttcgcagcaatgatagggagcccgacatcccctcatccaagctctccgtcaccggaaatcctttccccgctgtgagaggtgagctccttccctcgtcgccggcttccggccgagttttcccgccgccttgcgcctcctccctattccctaactttccctccatgttccccagatccttccgatcgccgtccgccggttcccgctcgcggaacaccgctggaccgctattgccgtgccaccccgaggagcgccgccgccatctcgcctcccttcggtgccgttccgcttggtgagcatcccctctccgctttttccgccgctctccgcgtgccgacccgcgccgccggtgtcgtcgccggtggtcgccgtccggccgcgcgccgccgtcgtcgttcgccgccgctcggccgcgcctgtactttggccgcccgtggaccactcccgtggtctgggtccacggtgccgccaggctgcggtggaccgagtccaccgtgcgccctcccctagtcccgctgacgtgtgcggcccacctatcggcgcgcccttcccctttgatgacgtcagcggctgtgccttttcctttgaaaaattaaataataattgtgcaataaatcggtaataattctagaaattcatttaattggctcaaaatttctaaaattcatatctaattcattcgaactccgaattgggccattcaacttgcaaaattcatctaaaattgagctctacatgttttttttactttttatgtactgttttcttggtttttattagagttttcctcattttgcgtgccagcgtgtagttcccgtcgtttcggaagtccgcggtcgcgaggaaaagagctcggaagatcaaagtgaagaatcaaggcaagtcacacattccccttgagcattttgatcctaatttacaaatgttttatcgattgcaaataaaattgcatgtcttgctaattacatgggatcagggttttacctatctgctcacttgtgccatgtttacttgatatctgtcctttgtcaatattgggtaataaatcgactagctcatgttacttatgtgacctagctagaactatatgcttagccatgcttaattaccactagctcagttgatgggataactgcagtattagacctttttagtatcatgaggagctgcgtgctcaagacacccggccatgcttcatggtcataattgtccaactaaaatgcgactaaatggtgggctgtgggtgcatggttttgctagtcgcacccatggcaattaaggaccggtttgcgggatgccctggaagaacttatcgtacttaccataagccagcgtgggcaacggctgggcttgtagtgtagctttcctctagccgacgcatccaggcaagggtgggcgtgatggagtttagatgggccctgcgacggcctatgcggcttccggattcacctaggcacgagaggggactgcccgctgccttgcgaggagtgggggtgaaacctgaggtgtggtgtgcttggttagagggggttatgcgaagggtcctgtcacggcctctttccggtatgttgtggtggcatgtcggcgcacggaaacgtgtcgtggggctgtgtcttgtgggtacagttgtacacctctgatcagagtaaaactattcgaatagtcgtgcccgcggttatgggcggtcgaccagattcaccgtgattagtcccaccttaataaatcgactcaatgcactgtagttcaggtgggttggttgggcctgttcaacgtggtatagcgttgatcagtggagatttaatgttactttaattactcaacagttttactattttgctcaataaaatgttttacaaccacctttatgcaaatagccacaaatcgttcttgtgttccccttgcacgtctgcatcgttggtgtggcttgctaagtacggtggttgtactcagccttgctattattcccccttttcagaagtgtagtgcttctgagctgaagacaaagttagaagaccaaggctcagaccccagttgagttttgcctgtggagtggagctgaagccccgctaggatcgcctttttccgctgctgtcgttctctttcgttgtgaggactaagtgcctcttctgtaagtattttacgctttatttacatttggaactgtttattacttatcgttttgtgtaccctggctggtcctggacagggatttaatacacaaaatagtctggaaatttgggcaaaatttctgggcgtgacagcggctagcaacacgcgtaaggaggtgatggaagaagtcggtgatctgggggaatctgttctccccctttttgaagagtaggacctcttgtactcccaagacatgctgtgtaaaactgaatcttaaccgcctttggatgtgcacttattattctagcttactcttgcatgttgatcttgaaaacttttgtcccttgtagagatgttgatgacgaggatgtccagcagcgcgggcagcccgagtcaccggcgactattccggttctcgcgtttgaaccacatgcgttgcccgacaatgtagaccagacccttgctacggggacggagatggcgacgactttcttaggttagttgtccattcatccctttctgctcctccgactagatcaactatgttctcgaaagaggcgcgtagcttgacttagttgttcccacattgagcagatctcgagagtgctcttgctggccaagatcgtcgtatccaatattggaagacaaaatttgaagtagcggaactcgagagaaccatgcttgcagtgaagaaagagcaagctgtggaaacgctccgaggtcgtgaggtgtggttcaactcgtacttgaagagttgctgcacatccatggccagggtttgtagagaacttcgagtgccccgtggagatcccgaggagtcggcggccggatacatctcttggctgaatggagcctgtgctcaactcgacggcgtcggcaagcgtatcgacgaggtcttgaagcaggagtgtcgtcgatcgagccgatatgccgaaggacacgtgttggcttgcctacgagatcatcgcccgcgcctggacctcgattttctccgtgagggttttgctcgttctcggaggactccggcggagatagaccacctggcgaggtcgatggcgccgttggcggagaagatcttccagtctatagactggagttggccttcttggtagtcttcgtaacctgtgatagatatctcaggaaaaaggtgtaatatagctttggatttgtgtaaaaattgtaagaagtattttgtgaaatagaaaagaaatctatctttaacaaatctttcttactccggatgtcgtgtgtaagagtgtgttctcagttcacgactttagtcagtcatttgagtcgtacactctccctagcccccagccttgtcgtcggaggaattttcttggaggataaggctcttggacctttgacctgccttggttgaataagctctgatcctagcccccagccgtgaagttggaaagttaatttccgatttcgcggcttggttaatacgcacggcgagaactcttacacgaccagatcttacatggtctttcgtctctacaggatctgacaaggccttatcggctctgggcgtccccaaccgaagatcccttaggttcctcggaggccttgtcaagacggcgtaaagggacatgaggataggtttcaacgctaggtgtcatcagggtaagggatcattgggcggaaacactttgattgtaatatgggcctaagaataggctttattgatactgtaaggtgtcttacaggtacggattgtattgactcatacatagaatttacgtagttggtcaatgttccaagaatttgctaactcgcgaccatcgtcgtctgcaattttgaatgcgcatgaccgcaaaacttgtgtgatcgtgtagggtccttcccatttgggtgagagtttgtttcgccctgcttggctttgaacccgtcggaggacgtagtcgccaatcgaaagtatgctgctcggatgcgcttctcgtggtaacggcggagggcctgttgatagctggctgctcgaacggcaactcgttcgcgatgttcctcgagtagatttacatcgacgtttcgctgctcctcctggtcctcatcggagtgcttctgtactcgtgtactctgatgtcgtagctcgctggggagcatggcctcggagccgtacacgaggaagaaaggtgtttccttgttagacgttgtcggtgtggtgcgtacagcccatagttactgatgggagttcttcaacccattttttgtcatgtgacatgagcctgtcatagacgcgggttttgatcccttgtagtactatgccgtttgccctctcgacttgtacgttgctttgagggtgagagaccgaggcgaagcatatcttgactcccagcccgatgcagtaatcctagaaatcagcgctgatgaactgggagccgttgtcggttatgatgcggtgcagtagtccgtatctgcaaaatatccccttgatgaatttgatggcattgtcggccttgatttcccccatgggtactgcttcgatccatttagtgaatttgtcgatcgccacgaataggaacctatagccgccctgtcctcgtgggaatggcccgagtatatctagcccccagtacgagaacggccaagtaagagggatagtctggagcgcttgcgcgggtatctttgtgtgtttactatggaattgacaggcttcacatcgctggaccatgtcgcatgcatctttaagggcggttggccagaaaaacccctgtcgaaaagctttcccgaccaatatccgaccggcggcgtgtgacccacaaatgccttcatatatatcaaggaggaggtgtctgccatcgtcggacgagacgcatttgagaagtaccccgtttggcgctttcttgtatagatcgttgccgaccatacagtagatctttgctttacgggttattttcttggtctctgtatcgtcctcgggcaactcctcgctgttgatgaatttgattagtgggatgcgccagtcgtctgtggtctcgatatcggcaacggcttgttctgcctttgtggcctccgagctaatgtcgggggtgaccgggctaacttcgccgctaacctcttttactgatggctttgtcaggatgtccagaaaagtgccgggctcgagcggttctcgtctagacgcacgtcgtgctaggtcatctggctcgatgttgtctttgcggtagacgtgtcggacttcgatcccatcgaaccttttctctagcttcctgacttctgcgagatacttggataactcggagttagagcatttataatctttgtgtacctggttcgcgactagctcggagtcccctttcacgattagtcgcttgaccccaagtgcggctgcagctcttattggtcgccctaaagttgaggtggattgtgtgcttgaattgatctccggagggagacgtcaagataaatcctgccccaactccttggctgttgagtgcaccatcgaacgccattgtccacgtttcgttgtcgacttggttgtctgatttgttatcaggcatagtccaatcggctacgaagtcggcgagtacctgggatttgatggctgttcgtagcgcaaaattgacatcaaactggctcagctcgactacccatttcgcaatgcggccgacaacgtctttgtttctcacgacttcaccgagagggaaggaggagacaactgtgactctgtgggcttgaaagtagtggcgtagcttccttgatgtcatgatgaccgcgtaaagcagcttttggatctgtggatatcttgtctttgcgtcgtggagagcttcgctgacgtaatagactggtcgttgtaatttatctctctcgacaacgatgacggtgctaacggaatatggcgtggcggcgatatagaggaataattcttcattaggttggggggcaacaagtacaggggggttctataggtagcgcttgagtgcaacgaatgcctcttcggcttcctgtgtccatacaaatttttcttgcttcttcagcagagcgaagaaaggttgccctcgttctcccatcctagcgacgaacctgctcaatgctgccatccatccggttagtttctgtacttccttgagtcttgtgggcgacttcatgttctcaattgccttgatcttctcgggatttgcttctattcctctgccaaagacaaggaaaccgagcagcttgcccgacggtactccgaacgtgcacttctctggattgagcataaggcgatatcgtcggaggttgtcgaacatttcccgcagatcgtcaatcaatgagtcgcctgtcttggtcttgataatgatgtcgtcgacatatgcctcgacattgttgccgagctggtcgctaagtgcgccctggaccatgcgctggaaagtattccctgcagttatcagtccgaacggcattttaacatagcaaaataccccgaacggcgtgatgaatgctatcttctcttcgtcctcttttgccaagctgatttggtggtagccagagtaagcgtcgagaaagctcaacagctcacagccggctattgagtccaccagttgatctattcgaggaagagggaagtgatcctcggggcacgccttgttgaggtcggtgaagtcgacgcacattctccattttccgttggccttccgcaccatgactggattgactagccactctggatgaagtacttctctgatgaagccagctttgagaagtttgtcaagctcttctcgtatggcttattttcggtctagtgcaaatctccgcagtctttgctttactggcttggcatcgggtcgcaccatgagtttgtgctcaatcacctccctggggaccctcggcatgtcggacggctgccaagtgaacacgtcagcattgtcgcggaggaaggtgatgagcgcgagttcctatttctcgcttagtgttgccccgatcttgacggtcttgtcggggttggcactggagagtggaacgatcttgattgcgccgtccggtttcggcgtcttgtttgtcttgctcactttcttgggtggctcagtcgtggcgggtgggctgggcgtttgctcgaccatgtcgaggctccgtttgtcgcattgcaccgccagctttgcgttcccttgaatagtgattgttcccttcggtcccggcatcttgatcacttgatacgcgtagtgagatgcggccataaacttcgcaagtgcagttctcccgatgatggcattgtaagctgtatcgaattcagcgacatcaaaggtgatctgctctgttcggaagttgttggcttggccgaaagtcacaggcaacgtaatcttgccaaatggtctggatgaggattggggtgtaattccatgaaagggttgatcggttggtgtcaactcgctttgcggaattcccatcgcgtccaaagtgctggcgaaaagaaggttgattgagctgccaccgtcgatgaggacctgcgcgaccttgatgttccgaatagtgggttcaaccatgatcggatatcgtcctgggatgacggcggtcttggggtggtcttcttccgagaactctatcttctgttcagaccacttcatcttgggtgcagccccctaccatgttgaacagacttcgcgttccacttttttgtactctcgcttcgaggagtacgttgtggaacctccgaagatgtgtgaaacgtggaggtcagagtctgtcgacaggttggatctttcgacatggagtcgtcttggtttgtagccactgcgttcttgtttccggtcattggcggaccggttgagatcggcattgtggtgtaaaccgggaagacgatttcgccgacttgagtccacaccagcatcgttgaagcagggaatacttggccgaggttggtgttgacactgttgtcgacgaggccggataacatagtagtagaaccttgagtaccaagtccccctacctggcgcgccactgtcgacgggtgatacccgtagaccggatatagagggtattggggtacgttggtacaaggatctacgtaatacgacatcaagtaggcaaaagacaaagattatactggttcaggccccttgataggtaatagccctaatccagttgatgtgggattatatgatggaaaacacaggttacaaagggaacagtggaacttgacggatccggcgagattgtggtcgagttggttcgactagatccccggcgatttggctccttgcaggctccgacttcgtaggctgtgagggttgtgttggatctgagattcgatgccctaagtcctccctggggggtcccttttatatcacaagtcaggcggtttccaagtagaactcggaaacatcgaaccttacacgatacattgacgacccagtcttgtccgagtaggactccttccatttgtaaactccgtgaggggtttccttaatatatgcggagagtatccgtatacgcgtgggtataccataccgatatgcgacgtatatcaaagggtaaagggtatacctaacccgtaaccctgacaatgaccttgcctaacaacatatgcagaacaattgataaacttgccggtattttatagaaatagacagtgtcgatgacaaattattgaaatgagataaactcagtggcataagctcctattaatattatttgaacttttaaataattttatgaattatattatatgttatctattataatattagttaagcatgcatttgtgctgtaatgttatatgtgttgaactcaatattatgtatgatgatagttatttctattagatagaagtttgggttgttttggtgttacgagaaatgtttgttttcatattcatgtccgatcatattcgatccttatttatttttgagataatttttattactttatgtattcgattttgtcagggttatggataccacatacctaatagtagttgactaaatctcggcaagacccaccacataccatgtcctatacggaaacaaccttcggatataggaggagttccagataaggaaagacaatcaaagttctacatggaaacgacaaggactactcggattgtatccatattggtttctctagttctatttggacaaggggacacctatgggtataaatacaaggccccctaggaggagaggggggacaatacacacccaacacaatcaacatacacggaacaacagaagccacaacatacaagccaacataagccaagacaagacgccggatatcaacttcggagataggtatggctagtcctctacggtgtctccggatactgtcaggaaagacgaaagcgctatctctgatctcgccgggcatggattcgaggaggaagactaccctgttgtcgactacgagtcagaccttcagaccgccatgtcgacaacagttagataggctacccaaaatattgtactggtatgattatggtgaataagatcaacgaccggcttcagccaacaggatgtagggttattatctgacaattcaggggcccgaacctgtataaaaatccctgtctccatctcttttacctcagtctcgtgtataccctagtaccaacgatccctataccatgtaaataccagaattgcgacatcaaacgtcgacagatttattcatatttgttttcgtatccaactaaaaatatgaaacaaatatgatacgagtattatttgttaatatctgctttgtttgcatccctaagtaagtaagtaatgcaagtgtagaacactaaaacagtgtgctttgagttttcataaaagtaagtcttaagtttagaaattgttttacttcatcctcataaataaatttatttgatagcctcctaagagattggaatagaatctagaaatttgtagtctcattggccgtgctagttttgggatacaatgccttaaatctttagtctcacaataactccggtgttaaatttgtagttttatgaagcatcttttaaatatatagttttatgataatttgataaaattatcaatagttttgtaaaaatttgtaggtgataggtgatgtatgcccccaatttgtaagccgtcccgtcaaggcgtcaaccatcaatatccgatgtgggaataaatgaacaggtatacatttataaaaagctctcttctttaaaaaaaacgccttcaaagtttattcaaggtagaaaacaattggatatgtaataatgcaaactatatcatcatcatcatctgatcatgtaagttgcaaccaactatttgatcgatctcacctccatgattatctttgtgagaggcagccatggccatggccatgcttgcattgcatgcaggagaaggtgtggggaacatgtctttagggctggcaggccaaggccaaggcctaaacataaacaaagagaaagagaggaatcaagcgaccaagtcaaccattgcctccatattttcccttcaccacacacacacgcacacacagagaggaggacgtgcatggcatcatatcaatctctgcaactgcaatcgccttaaattatctctcctcctcgccgcgttcctctcgcgaaacgcagcgcattgtccgctcctcctccgatccctagcaaaagcttcctagctagcttgcctaccattgccatcctctcccctccaacctctccctccattcgcattaccgcgcaaaggaggaagaagaagaagaactcactcgcaggagcaccaatggtgatcgatctcctctttctttctctctctctctctctctctcgctacaaattaagcacaattgcaatttcagtttcttgcatggtcaatgatgaattgcaattaatagagtgatttcccccgcaaaaaaaaaattaatagagtgatttgatttgagaatggcaggcgaattctgcgtcagggctggcggtgaacgacgagtgcaagttcaagttccaggagctgaagacgaggagggggttcaggttcatcgtgttcaagatcgacgacaaggccatggagatcaaggtggagaggctcgggcagactgccgagggctacgaggacttcgccgccaccctccccgccgacgagtgccgctacgccgtctacgacctcgacttcgtcaccgacgagaactgccagaagagcaagatcttcttcttctcctggtatgggtacttaaaaatatatcctaatcttttgaggggacgtcctctcatttctcacgtctaaatagttaaaaaaaattaaaatattaataagatatattaatatgtgatatatcattaatttgaacctgacttcaacaaggtgcaaaagaaaaacaaatatgactgaatacacgcatcttagctagagtttaatttttttgctttttacaaatcgtaaaggttgaatttgaatagtatatttgtgtatataataatctatcttgataactttttttactaaatttttcattactaaaagggacaagatgcaagaaaagaacgacagagagttttagaattcattcccctatatagctataccatcgaaattaatatgcgtggctaagttcaatttcatttcgatgaggtatcatttctgttataccagtaaagatcacagaaagtgccatgcatgtatgtgtaggtcgcctgacacggcgaggacaaggagcaagatgctgtacgcgagctccaaggacaggttcaggagggagctggacggaatccagtgcgagattcaggccacagaccccagcgagatgagcctcgacatcatcagagccagagctcactgatgatcatatcatttcatcatccaacaccaccagattaattaattcattcccaacgtcgatcgccttattcaaccccagatccatgcatatatatatgcccatgggttaatatatcatcaattatggggtttatgtccgcttaaatttaccctacgtacgttttgatcctcgcaaaaaaaaacacatacatatatatatataccgttttgatcgactatttatacgttgttatacgacattgatgtcgtccaagtattattatcctattatatataattccttcatttcattctatttttcttctgcttatatcttcaacttttcatttttgtaatttgtaagttgtattgatgcaatttgttggcaacaagaatacactttttctattcatgtataatagaaacaacatattctcttattacgtgttatgagttgtgtgtgcataatggaatttactgtgtccaaacattaggtgcacggctagttctttacttttagattggttgggtgaaggcgaatactgatggggcgtttttgtgatggcacactagtttggagcagcggtggtagtcttgcgaaatgaccgcggagattttctgccccattcgaatgtcctgaaaaggtggattaaatttcggattaaagtggcgcgctttttaaactgctaaacggtatgttccgtgcaaaaactttttatatgaaagttgttctaaaatatcagattaatctatttttcaagtttgtaataattaaaactcagttaatcacacgttattaccacctcgttttgcgtgaaacacttaatctacatcttcatcttcatctttagaagattcaaacaccttaacaatatcatctaaggattaggatgctaccatggcgaaaattctaccttatcgcagagcgactaatattgtaagggagttaggagtatctaaactaattattgagactgattctttggaagtgaccgaccgagaatggtgggagtgtctagcaaacattcgaatgatttttgtcatccatttcacttagatttttcaacgtctatccggatgacacgttgccgagtgaacgactttactagttaatcgttctaaccgattgctcggtgaagaaaaaaaaaaagccaagacatcccttcattttgattgtctagaaaaaacccgagatgaatgaataaatattactaatacatctacttaaaaagttacatgcagttacattatagtcatattagctacagtataattacagtatagttacattgcaattacataatagttacactacaattacataaaagttatactgtaattttataatagttacactttaattatataaagttacactgtattttctagaattacataatagttacgatgtaagtttatcgttgtaactctaatcaatatttattgtatatatattttttgagggaactattttccagcattgcatgcttgctcggttggtcgtagtggttctagcgggaagcgcaggccgcgagatcgatctcacatgtgggcatctgttttatattttcccaccagtacagcacgaatcttgacacaaatcctacggccagaaaattgacagatgtgtaactaaaaaatctgtcgaaagatttatagcaaatccggagatgcttagaggaaagttaacagatagatttgtaggactttggcccaagacctgaagataaagctgagttatttcgaaagcgcaagggtcacagattagctcaaggagagtcttcgagtagttttaccacctggctttctatttttccaggttctattagttcgattctgactgatgattgtaagtataatagtctaagttaattaagtgcgagtagtgtactgtgtaattcttaaaaatgtagtgccttggtgtggttcctattttagcatatatcaggccttggtgtgaacatatcaatctttcttgcatttggtgcctaactgtggacacggttatgcatgaatgtatgatgagactccaggacggttgaaaacacttcaacaatatgatatcaatcttgttttaatcaagatcaacacgcatcagtttcataccaaaaaaaaagggggaagaaaccatgcaacatatctggcagactccgatattaaggagatattatgcaatttacaaaaccagtaacatattacaaaaaaaaaaacccactaggaggtagaaaacgaagattaaagacagtttatcagatgtccatcaaacagctgtcagcgtttcatatccaatgaaggaggcacacaagaacagcagcacacgtttagacgttttcactattcattggctctcatcgacaaataattttattgggatgacaaacacacttttatttggatgataacatcttctacacatgctatcctacgccatattgagcataatattatacagctgtgattactatacaaagccggggcattttagtacattgggaagaaataaactaaaaaaaacacttattacaagaaccaagaggtgcttggacacccaggttcgtctttaacttaactatacatcctttcatatatgaacttatagccggtaaacatcgtgcttatatgttgtattgctggtttatcttttattgcatcagcagaagattatttacagtagcgtttatattatttgttctcatcagatcctacaaattggtgaagaaaaaacatcagtgcataccagtgcgtaaggtaatagctaaaactagagttgagaggaaatagaagtgtacctcaataattagctcgtcagggatatggggtaaaacttctcgtactctatctaccatggagagaacctccgacatgctaccattcgcgggtcttgcagtgcctcggaaccgcaagccagcagctgaagcaccatcaggcctcgaggaagaggatggaacaaccgaagatcctgcaactggctcaggccatagactccaggtggcatctggatgcccataattatcagtcactgaagtcaactgcctcatcatcatctgaactccactaagccccactgatgtcacggcgctggaagaactgggattgtccatcccagggctcgaccatggtggtgcccagctagaatcaagaccagcacctctgcaccacccaacacctatgcatcagtgctgcagaatcgtatgcatagcagtacaactatagggttatggtgatcaacaaacaatttccaaaaacgaggattcactgatatagcaagtgtatgtgtgctaaattataatagcatctgagagataagtcatactgcatatacaatacaagtaggcacagaagagccatcaggcaaccataagaaataaaaggaatagacgagagatggaccagtttgacccatccaacccacctgcacgcatgagtgtatgcgtctctttcggccctttccagcccaaccaaccaaacctgcacagatgtgctctataaaacttagccccttatctctgactccatgtgtatgcaagacagtagcagcttcacctctttctccatctaggtttctctaccctcacaattactctccccactccccctgcccccctgctctctatcctcgacctacctcttctgcctcactgccacgaatcaaggtagaattctcccttgcatagttgcaatatggaagagctggtagcaagcggccaggagataatgcgtttttgatggtcaggaagttgggggagcgagaacaggagctaaacgcacactatatcaaaggtacaaaagtaccaggaaaatatcattacttattcaaattattttggaaattaaacaaatcaacaatacccgataccatatccccttgtaagttgtatcccaccacatccatgtattggatacgtatttgcacacaggatcagcattttgttgtataggtgattaataggaagataaaacatatatcttctggtaattttgagtgagcatgagttttagtcatctttggggatcccttctttgccaagttttcaaaattatgtttcctttggtaagtctttattactaccaggttacaatttcaatgttcaatcaagattcaatcctaaaaatatgctaaacctgccagtataaatcaatctgactggaacaaaatattcaaaataatgatggtaataggcaggtgagcaccatcagtttgacatactaaacctacttagtttcacctagaatgaataagattcgaaaagatgcattgaaagactttggttcatcattatgaacaaagataaagtccattaggaaatgaaactatggctattattcttcctttttctttagatcaactaggcctggtaaactcgctttcatacccatttaaaacttcaattgaaccacaaactaggaccaccattaagtgatacattacaacaaacaatagcttcatcggattaaagattatcacagtatctagatagaaaatgtgcatgccataaggctaacaaaatctttgcgagggtagtaacttgaaagagaacaggaaattaaaaatgccctcaaactataccattcatacactcaaataactgaggtagtctatcaaggcctagtttcaaataacgatataatgtcagacatttgcccaatcactttataaaatgagcttaagttgtgacaatgaacaccaggggcgaagaatagggaagacatgcatgagtggagcatcaacatggtagcacaatgctgatcttggttatgttcacggtcacggcagatgaatatgggctgggaaaaatatgttttgtgacaaatgagctgcagagatatggtgcttaggtgaggcaatggtagccagatatgagaaggggacaatgatgtttcctgagaacttcacatagaagtgatagtgctatgaatgtggccatgttggcgaagaatgaaaggaatgacaaatttaggattttccctcctgtgagtgcactctattgtgctgttctacaagccatcatcatcttccttctttcagcaaaaagagcatatcttcctcttccttctatctccgaaaagggcatatcttcctccttgtctgagcaggatgtgtgctcaattcagatctagcatgcataatggagtcgaccgctaggggtgaggtggaaggtgttcgtgcacatcagcctatggcacacacaagggattcacggtaaacagcgacagggacaattggacatgatctctgctgcactgtctttgccacgacagccaccacctacactacagtaatctggtaagcaatttggcactgcagcagaaagatagcctctcgcttctttaccctgtgtgagatcaccaccctccctaagacttataagctgcgagataacacttgttggcattgcccacgcataccaccaaggatcatccttgccaagtgccacagcccacaaccagtgccaggaacagtccaagatcctgatcatattatctctacatactccatcgttccaacagctaccagggtaaatcaggcggcttttgtgataaattatatttgcttaggcagttgtaaattaatgaattggcagttgaaatgagatagttgggaggaactctacaattatgtcaagttcaatctaccatacaacaactgatcaccaagaatgtagtggaattagctcggatgctggacaaaaggcattacaataggatgttcaaagataaaatttctgagaaagtttgatccagcacctcaggaatcaatgatggctccaatgtacaggggttttctagacagcaaaagttaaccttttcttttctcatattttttgttcattcccgtactcttgttgatgtagaaacacatgcaggaagcgcttatggaacacatagagcatgctggtgaggaggcaagaaactggtaaacgaagaggtcatagagtggcatactcactctgagtaagcaacagatgcagttggttgtttcttcattggcacaaactgcagagcagcctcctcagaggcacctgctgtttttgctcctctaagctcccatttagtctttgcactgctgatttccacattagctgccttctcttccatattatctctctctatatatagctaggcctgcctgaaggttgcaactggctatccagctagcattgagtaacaaatgatgggaggctgtcaggctgacttgtggatccacattgttagctaatatgtgggactgatgggatgtagtgatttcataaaatcgagcacaaaaactatcgtaagatgggtccttaaaggtgtaggtttgtgatagttttgaagttttgacaagacatgaataggttcattgaatttaccccaaatcacatcaataatttgacaagacattgttataacatgaatatgatgagcaatgtgaagaataagaaaatagatcattccaagtttgttatacacacctccaaacagcatctgcaggattctgatgttcaataggatgttcatgaccaggaaccctctgctgattcaaccccgcattaagttgttctgcaattaactggacgtttcctacctctgctgtagatcttgtgtgaccttgagatgacagaaagagaggtcttcgacaagttggacatgagtaaccatccattaatccttggtccaacctacacatagcaacaatacttaagggaaaaatcaaacatagaatgcaatttgatgtggtcacatttgatggtaagatgtgaagctatacacaattgctaagcatatctacttttgtgggtgtagaagtgttgcatatttttgtactaagtgagaagcagaggtcagtacagttgtacgaaagagcaacaaagggagctgaacaacagtctaagctgaaatacaagtaatactatgatctgttactaatgactaacaactgcaacttcttcacatcagcttgctggcaagcttcaatctcgtcaaagatatttgtgagaatctgactaataatttgctaagaaggttaacagaaggaccatccaccatgctcagcaatatcaattttccttatgcagagattccatgacagaaaaatttaagtcaaccgtaaaataggaatgttggtcccgtattttaataagtaaatttggaatgcataagatcaaatggacagttatgacggcatatggagtctgttcataactacagcctgcagtccttatgcaaatagtgggagcacaatttccagaaaatgaaaatgaatctacttaaagttttttttttggtaggacattatgagctataataaaattgaaccacagaccatcaattgcaaaatagtaaaaggaactcatcgcgtaccatgatcgcaagcaagctagatgaaatagatggttgcaggataactttttagctcgagccattggtccctaggagttgcagatttcaaaagaaaatcagatacacaagcactcaaaacactacagatcctgtgaaaatctagaaattgtttaccctacagatggcacactcatcgtcgtatgcacagatttcatcatatgtagcatctggaagtgctccgtcgagtgaactaagtgcctttcgtaacttggcataagtttttatccgcttccaaaatgaagctataagagcctgcaaacattttcaaagaattccagtcagtacatcatacatatttatttaaagtttatcgaagttaacaagtgaatgtcacactcacgcgcaagttcaataggagaacagcgtcaaccagatgaaacgccataccacggagccagaagatcattgagtaatgaccaagtgacatcaataagcttatcaagtcaatgacaaaaccaaaatttctgactagtctgcctctccactcagaaaaagatcctgcagttacaaagcatgattggaccctggtggtaaagttgagataattcaagagacgcatgtacaagaaatgagacatggactgctcaacctgaactaaattaatgttccaacagatcatagagcaaaatttacagtattacaaacagaccagaccaacataacaaatgtcagatgagtgaatgaaacctctgttatatactccggcctgtcaggaaaaaaaaaaggttctgttttttaccattggcatggccttggaaaaaaaagatcagcaatttatataaaaccgattattgagatcaatatacatgttttttctttgtgaccaatctaaatattcatagatatgttaccagtgaaagataaaatagtttactgtatgcgttctaggattttttttttcattcactgaatctggtgtttgcattcttgtctaggttagtaataaccggttaaccacgaaactcatacagcattatcctgcatgctcagccctagagggtttactaaactgaattaaatgagtctctgagcagcgaagacacgcttatcacctgctgcttgcttataagttttttggaaatcaagatagtccacaccactgtccatttgatgtcgttgccatatgtcaaacaactgaaatccatgcaccatgattgactgctaggaaaatactatgtgagaaaaggttgaagatattcagaagtaataactgcatgcaggtaaatgctcataatatttttaacatctctagttggcatttataagcaccacctcctttgaacattaaatgcaatgcagatttctttgataatgcaagatcgttataaattaagaaaagataaggaggagaaacttcccacaatctgggttgaagtacctgcagtgtctcaaagccaatactaagtggctcaaaaaacataagccaaaatagttgagaattacacgacttgcagaacccaacacaaagctttatcctggagaagatagacaatcaattaagtgtgagcttttaaaagtattacatgctacagttgtgtcaaggacaccataacaaaaggaaatgtggtaaactcaagcatcaatacaactcattccattatactccctctggtcaaaaatatttgtcgttttaggaccagatttggacaaacttttaaaattccgaatacaattttatgtgaataaatttataaagtctaataagttcatgatattatgaaagtactttttgaggcaaatctatgtatatcatttgttttcttttttaaactaagcatttaagaaattattgatggtcagaattttaaaagtttgaccaaatcttgtcctaaatgacaaatattttttttagaacacgcaggagatctgcatatcatttcattaagaaaaaggagaaaaggtggacggtgttagagaaagactccgacacccgccaccaagggtacaatagaacaccacacacccaaaggaagtaaaacaaactagtgcattagcagcacagccctagtaaagagatcacgaagcctagcagctcctgctaggcaccaaagagcaccctcattagcgatggcttggaggacatcaaccaagcatggggtggcaccattaaaaacacaattgttcctgtgcttccaaatttcccaagcaaccaagatgattaacgtaggattctgataggattgcaggattgagaaaacgtaggaataggaaaaacgtaggattctgataggaatgtaagtgtaaaacagaggattgcaaaacttaggaaaaacacaggaatgaccgtttgattgaaccacaggaaaaacgcaggaattggatgagagagatagactcaaagaaagttaccaagaggttgaagctcttgctaaatttcctccaaaatctctataggattgtccattccataggaattttaaaggattggatatgattcaatcctttgtttcaaagggcttcataggagattttcctataggattgaaatcctccaaaattcctatgtttttcctccaattcaaaggggccctaaagagtttagcccttccttctcattatcaggtaaaccccttactgttcttgaccaccaattggcaaacctagcagtatcttgggttggaaagctagagtagccaagccgttgcaggaccaaataaacgagatttggagtgagagatgtccctccaaactttttttaagaagaaattgtgagagtgttggggattgaacaagggatcttagggttgaaaccacacaccccttgccactgcactatcaagtgcatctctaaatgacaaataatttgaccggacagagtaagtttataacagaagttgcaagttgcaagaaattgtaagggacaataatttcatgttggaagtgagtaagtgacatcatgcatctctgacatctacaaaatcaaaataaatttaagtgtacccaacacctaagcaaagaaaaaattatgtgtaaataatatttctaaacaaaaaacagtaaaatgcagactaaccagggaatattaccatagtacatcagccgatagaaccagcaatagtgcagaatatacacgaaagtattttgatggagtcgctgatggtgaagcattgagctgttcaaggcgttctctagccaatgattgaaacatctggatgtacgagaaattttagttaatgtaagggtataatcttaactagttgaagacttgaagttctaaaacattaccttcagggaacaaagaaggcccaaccaacttgaccaaaggattatttgttgagaattaggaggcacaaccagtgggagaaaagttccctggaatacgagagagatcattggcatttcttcacatggcaggcaacaacaagaacataaataaataactgtaaattgatcatacatcctcccttagggcttgttcggtttggaaggggttgaaggggattggaggggtttgaggtgtaataattccacaccacaataggtgtggaataaatcccctccaatccctccctcctggggattaaccgaacatggccttaagattgaaattgaggatgtaccctcctggcccacaagttaggttgatgaccccacatgtcaatggcataggaggctaaatcctcaacttttgatttaaaggagggtatacgatcaaatctcccggtttacttttccaacttgtaaatcgtagtcttcacttctacaaaagggcatggaaacttctactccctccatcccaa

SEQ ID NO: 6269 - DNA, 19472 bp, Oryza sativa
catccctccaaaaacccttatatctatgaaagatcagagtatccacgtattggacttgtgctaagattctcaaggagataggattagatctaaattagattgtacatgtattatggctgatagttattgaacaaagtgtaagactgcatattatctaatttaaaagaactcactatcaagctgctttaaattcactaaagcatatattgcaaacatcattttagagcaagtctcttgtgttgaagactacgagcttatcagcagaaagtcaggagaaaaggggagcgcatgcgcacacagagagagagatggatagagcgcttaccttgtaaagcacatagttaatgatgtgttccaacacctttctagtctcagaagaggttaattgaacaaaaaatagtgtctgcataaaagaaaaaacaacattaacgccactattgctaatatgatatgcatacgttaaatataagctaagctgcaacatcctctttactaaaaatcattaaaagaaatctggatgctcaggtaaaatggtttccgctaaatcatggattggaacaatggaggaagaacaatgccctgccttgtgccttcaaaaaggtcacctggacacctggctttgtaatagtatgaaccatcctttctctcatatataagtcactaagaatctaaactaggatagcagactagaagtttagcttcctctatgaaatagtgtttttatataacatagttatcatgtttgcaatgcaaactgtatgcatacatggaggacgagcttttccaacagacaaaatgctttgattgaactacaaaattgggtcaaactctaatgctccttttaaagattcctatggaagtaaaaataattaagtacagccagtttacgacatgaatcaagaagtggatgtatcaatacaagttcttacatgaatattaaaccacatgcacaaaaatgagtctagaaggaaatcgcaacgaaccaagtcacacactgtcagcttagctcttgctctatcaaagccatataacagccattcagagacgtaacagaaatcctctagcatcgaacaacaaaagtaccacatacaaatatccagttcagatttcagaaccgcttaacgtaacaaaaatcctctagcatcgagcaacaaaaataccacataacagaaatcctctagcatcgagcaacaaaaatactacgtacaaatatccagttcagacttcagaatcgcggtgttcaagcctgtattcaagcatgttgttgtatagttgctattggcattgctacttccccatatgttccaactaccatagtttagataagcatctactcaactgaaatgcaactcctgagaacatgtggttcttcgcaatcagctaaagcacaatattcctactaaatcactccattatctcacacacttgatgattccaaaaacaacatggaaacaaaatgtcattagctgatttaatgaaggaaaacacgtccattctaactaaacaaattaagtttatttctacctaaacatcaaacatatcttcagcacgcaaattaaaccaacaaattgggcagcaaatttgaatcaacaaatttgggcagaaaaaacacctccatcttcccaactatcagcttgcatatattattattgcttatattattattactgacaagtggtcaaccgacaaaagtttttttttccccaaacagcacaatctaagcgaatgaccgcgtggccctgagcagcaacaatcccaacccccatcccattcccgatcgaccgattgctcaccttgagggagaggatgaggacgaggaacacgtgcgccgccagattcgccaggagcgcgacggtcacgtgcgagcccagcaccgtgccgagccagtcccctcctcctcctcctcctcccccgcccgccgcgtcggcatccccgtcgaggagggaccccgcccaccactgcagcgccgcggcgctggccgcggtggatgccgcggcgacgtagaggctgttcaccgccgccatgcgccgcgcatcgaagacaggtcccccacccctcctccacaaccctatggcctcctcgtcgtcctcgtcgtcgccgccgccgattcgccggcgatgcgggggaatcgcggggttgcttgcggctcgggggaggtgtcgacgacggctttatttcgggggggccgcgacgccgtgagaaaaggggggattgaggggaggaagaggaaggtgggggggggagccagggggacaaaattattgacgacgggatggatagattggaattaattatgttaattaaagtctagatatttgacgggtttaatacgggagaattgtgcgtttcagtcctaagggttatctgtaatattgtttctttcctaaaatagattagtactctctctttgtcctaaatgtgaaagccatataccagattagatattttatagtaatatgaatatgaacaggaaacctctgatcatattcgtctgatgctagtttctatatattggaatgaatggagtaataaattttagctatcaatttagacaaagtgcatgtatagattcgtagctaaaagttactaaaagtgcattatacattttatagtactacgaatataaatatgaaacatgattagattcgtagtattttaaaatatcaaatctgatactatatttctatatattgggatgaagggagtaataacttttagctatgaatttggacaagtgcatgtctagattcgtactaaaagttattatattttgggatggagttagtatgatgttagtattatttcttttcggagggagaactatgttatggttggatgatgccttcaacttgccaaatcccaactttaggtggttgttttgcagttgtttagttgatgccattgttatgggtagctatatttttcatcggcctatttcaaagacacaattttttgcaacactttgcctaaagcttcaccttatgtaatatgaggtttggcaatgttaatcatcaatcgaacatatctttatctatctattgacatgtttggtattgctccagcctagagaaaactcaaagctgtagagtttggacttgagctatgtttgatttggattattaggcagattactgctactgattatatacttaattatatgaataaattgaatactttaagaaacaaacttaacaaatatgcgtcctttgagtgtattttccaaagcttagagtaaataatccatttcaataatctgaaacgaaccataaaattgtttaaatatgacaatacacgcatacttaaatgtatatatttcctatgaatatagaagttggatttctagcaactattgtatttctctaaatttccctgtcaaacttacaaaccttctccatttaactgttattaccatttactgtgcacatgtctcctccctacgattgttgggggctaaaatattttttttatctctctacattaatattgtaataatccttttccagttataatagcgaagaaatttattgcaaaaagatagcggtggtgacagtgaacccgccaacccatttatcctatcgtaaattttgcaaattactcattcaaagatttaatgttaaaaatagagaaatatcgtggacaatcacatatgaaatcaagtgaatgtttccctataaaagataaggtagtaacatatttcatgaattatatagttttacttgtatttgataatagtatgatatagttcttttatcatagtaaagcataaacatttagctagtatttcgaaaaaggatgtggtgcacacacaaaagaaaaagaaaagaaaaaatggttcatccacggaatattgcaatatgctgcgaaggtaggtgcgtttgtgcaaaacggggtacgggccgcgtgcgacgcctgcctgcgcacaccaccagcagcgagagcgagagagggggcgtggggcggttggcgcgccaaggcaggtgggtcccgtgcgtcggtgagtaccggaaaagcgagagctcggtaggtgacgcgtagagcagcaagccgcgccacgagcgagtgaccgcgcgacacgaccccgacccggcccggtcggtgcggcgcggcggaggtcgcccgggtcagccgctcgccgccacgcgagacgagacgatcagacgagggctaaaataaaaaaaaatcttctttttttttccctgggcttgctaattccacgctgcccctctttaggggtggaaacgagccgagctgagctcgcaacaaactaatttggtttggcttggcttggttagggaaacaagttaaaactttagctcggctcggctcatttcttggctcgagccagttcgagctggcttgcaagcctttctattgaaacgactcttcatatatattttataaatattaaaaaaagtaaaaacaaatcattaacatgtaaaatttaaataagtttatatattcaattcttcaaaatcttaatgataaattttaagttgacaaataataacgccatataaagtaaaataatcgatataaacacacgatgcctaaggctcgcgagccaaaacaagcggctcgcaagctagctcggctcggctcatttcagcaacgagctaaaaagatggcttgggcttggctcgtttgacttacgagccgagcctagccaaccaaactcaagccaagcccgagccaagctcacgagcacgagttttttttccacccctacccctcttatccgtttgtggacacagcgaggggcattattgactttgcagaaatggagggagaaaaaaaaaagatgcactgctaaaaaattaaaattatactactcgcttcgttttcaaatactccagtagtactgccactagactgccaacattgactaggagacattcgtttttttcttgaccactaattattcctcaatagtttgattagactatgaggatggaagtgtgcttattccttaaccctaacactatgtaaagagaggattaaattttggacgtggcacgcttttcaaactgctaaacggtgtgttttgtgtgaaaattttctatatgaaagttgctctaaaatatcagattaatctattttttaagtttgtaataattaaaactcaattaatcacatattattacaacattgttttgcgtgaaacacttaatcttcatcttcatcttcatcttcaggagatttaaacaccacataagagaatggaagttttattctttgttgaacatggtcttttagttcaaaaaattccaacttattttttcaaactatttcaatattcgatcactttattcccttaagtattttttaagcttagtttatcctgaatttaattaaaatggttcactttattggttaattgcatttctcttctttgtttatctttatatgagtcatactttaagcttaaattttatagagccatagatggcatcattatcaaatttataaaaatttaataactacttgcttgaaagttaaaaccttcatgttaaaattagtttcggtgtttccaacctatgtaaacagcgataacaaaaaaaatgttgagaggtaagttataatacatatattaatgctatcaaattttatttcaaaatatgatttatacaggcataaacgaaaagcccaaatattatcatggagtaaggtgaactattgttaagagttgggtataaaatgagacgaaaagttgtctaagggttaagtgctctggtgaaaaagtttggggagtaaaattgacattttgcttttaagttactcaaaaaatggcctttttttgctttttttataaaatataaaagtttgaggatgaatgatttctattgccagctatttaaaaatgggggagtaactattttgctatgacgcagtatactaaagtgttgattgtttgcgctactttgcagctgcaggctgcatcaacagtagcagctactcaaaaattaaccgcggcagcagcagcagcagcaaggctgtgctgccacagctagcataaatgaacaacccttaattattctattcggtaattacatatttaacactgaaataagatattgtcaaacatttgaaactttgacaatcaataactctaaaattagttaatttcaaaatgcaaaagtggtatgggcaatctgcttagaaatgtactaatgtacttcataatatcttaaacttattaggttaataaacttgttctaatataaacttatgaccaaagttacacaccaaagaccttaaataacaaatatcgtattttttttactatagaaagcactgtcagacctctagcagcaggtattatacaataaaacaattaccagactgcaataaaaattaatggtttgcctcacaaagtaaatgggcacccaattaatgcacaatacaacaagaatagtacactacaattaatcttgtatattataacaattgaccccatgtagtataattattgcttgatccaactatcacaacaacaaagcaaagtgttagtctgtctactagcagagaaaacacacccttaacttgcatctattttgtagcatttttgtcatgttcctgcagcagcaagtgggttttccatatatatttcatacattgagctaaacacaaaccaggtttatcggttccgttccaatatgtgccattatattccaccacctaaagctatgaagcgagcgagcggcatattgttccaatcaaaatatcgttaatttcagttattctgattaaattctggtcggtattgatcagaattaacataccacttgtttcagtatattttaaacatgagtgatctttccgttgaatttggcttggtcgattcataaggatacatgataaattttgtaaaatatgatagtaacatgatgaataactttgaatcactctatttatattttgtaaattgcaagttctattctggagtgatctttatttcagtccaaagtggctcttgccatgcactggactttgctcgtgcaatgttcatgtattcttaataacgcggattcacctaaaggcttttttatagcattaactgcactaaaagtcagtgggtcacaattacattcaaagaaaggattatgtctagctataaactcaatcatccatgttatattgctctcattgctatcatttttagtataattatgggcacaaatttgataaaatattgcataatattccctccatcccatcataatatgagggattaaattatttaaatttgtcccaaaatataagggagtctagagcactacctgtgcaccaattgaccctcattcaattttcttcccactaaacaaccttccaaccctaatattgcctaatctagtagggaaaacatatattacaaacttcatatgtagtgtaaatctggaaactgtcgtacgatgtacaagtgaacgtttgagatttgtctatatcatcataagcaattttttttactaccagaacaaaaaattacttatgattaaatctaggagaaaaatactcaaggtgatatggatgaatctcggatgtccattcgtgtatcctacagtagtttctaggtatgcattacacacttcctcaatctattgaggggtatttgatctttttttcattttccttaatctctcaaatgcatactaaaatcacttctagtatatgatggagttagtaacatatttatactctctccatttcaaaatgtttgacaccgttgactttttagcacgtgtttgaccattcgtcttattcaaaaaatttaagtaattatttattcttttcatatcatttgattcattgttaaatatactttcatatacacatatagttttacatatttcacaaatttttttgaataagacgaacggtcaaacacgtgctaaaaagtcaacggtgtcaaacattttgaaacggagggagtattatcttattaaaccctgaaacggtacatctgtatcggttggtatgagaacttcctttctaagagccaaattggaatggcctctcgaatgaaattgacaatcttgatgcatatagggtagaaaaaaagctcgcttgcccggcttgatggctcagtccaaaattgttgcgattcatctagtttttcttttgagatacaaatttcaatctgaaaccagaagacgaagcatactaaaaaccgattggtatcttcgaaaaatagataagaaaaccaaatttgttttcgtcgaaaaatatagaaaaaaaatgttagataattggaaaaaaattgtgaaaatgccatttcctataaatttagtaatctcccattgacatacacacaatatgtaatacatattcataaaagacaatacatatcactcaccagtcaccaaccattggccaaatagaatgcctgtcacctaaatattaaagtccattacgtacatagtttagagtccaatacatatattgaagtccatttcattactacatggaatttggcccatgaaagggcttccctttttctaaataattattcttttctttcctactggacaattcaagaaatgcatggaatgcaacatttttttgaaaaaaaaaatatcctagtaggctctatgaacatcaaactatttataggatttgatttgatttttttcgttttttatcattttaaatttaaatttgaatgaaacccattgaaattctagacgactactacttttgagtcacgccaaaacttcagtgttcatcgaaattgtgaaccctctgttcactccctttagctttgtagacatacatagatcaatccaaagggcatgcttggtcactttcacacattatcacatgtgcgtttaaagcatctaggcccccgtcgttgattttggtaattaatgacaagcgctatttgtgaactaactattatcttgagttatacattttgagataggttcatatgatgtgtatgccatggatgactatcgaggattaaaatcgatggcgcaaagtaaaaggaatgaagacagtaaactagtggttttattttaattgatcgaggagtttgggcgatcaaaatttgctatatttatttatagctttgtcatactatcaaaaggggtaatgacctaaacaaaaagatgatcaaaatgctacattaggtcatttgtatttagacttggttctctgttagaattgaattgcatcttcggtccagggccggtctgaccgaggacattatgccggtctgaccgatgatcccaagtcggcctgaccagcgggttgaatgcctatggttggcctcgcgattggcgacccagagccgccagagccgcagccatggccggtctgtccggccaccctatggcggtctgaccgacccccgtgtgttaatacattaaatgcactgtaacggctagttttccaaccgttacaatgtagtccggtctgatcggccaccccatggcagtctgaccagtagagcacggagttggggatttcgaccctcaatggctagtctttgtgtgtgtgtgggggggtataaatactcccccaccaacaacagggggactctcttggcacttgcttcacttgcatataccccttgcaactactctcacactctctagtgtttgtgttcatccattttgtgtgattgagggttgattagtcaagagtcaagtgtattgcttcattgtagagctagtgcggcacttgatcatcttcgagccgggtcatcgcttgttactcttagaggttgccatctcctagatggcttgtggaggtgtttccctgtgacctctccaaggagattatgaagaaggcccgacgccagttgtgagtggtttggagtttaccacctttggagttaaggaagaactacctttagtgatcgaggctttgacatcctggccgagggcttaataggattaatactcatatcaacaagttgcaacttcttttccggaagccgatctctaaagaactctgaggttaagcgtacttggcatgcagtaatttagggatgggtgaccgatcgggaaactcttcccgagtgcgcacgggtgaggacaaagtgttcagaaaagactctatgagggcagtctataacctatgaaagctgcaagatgtaagtgggctcggcctgggaaaggcgggacgttacaaaatggtattagagccgactctcgcggtttcacgggcgcgcgtcgcagttgcataggcatgtgcgcatggctggtgtggactcttgcggtttcacgggcgcgtgtgtcgcagttgcgtaggcatggtgcgcatggctggtgtgtacttggagtggtcacacagcatggcacatgcgctggcattggacacacggacgtggccaagagggaacgttcctagcttgacaagttgcaacttcttttccagaagccgagctctaaagaactccgaggtctcgcggttttacgggcgcgtgtgtcgcagttgcgcagacatggtgtgcatggcttgtgtggatatggagtggtcaaacagcatggcacatgcgctggcattggacacatggacgtggccaagagggaacgttcatggcttgacaagttgcaacttcttttccagaagccaatctctaaagaactctgaggttaagcatgcttagcctggagcaatttagggatggatgactgatcgagaaattcttcccgagtgcgcacgagtaaggacaaagtgtgcagaaaagactaattttggtctatgagggcagtatatgacctatgaaagctgccagatgtaagtgggcctggcctgggagaggcgggacgcttgacgaagggggcatgcggtggatagaaagctgccagatgtaagtgggcctggcctgggagaggcgggacgcttgacgaagggggcttgcggtggatagaaagctgccagatgtaagtgggcctggcctgggagaggcgggatagtccacttcgtgggccggctcccacctcgcccaccccttgacgaagggggcttgcggtggatagaaagctgccagatgtaagtgggcctggcctgggagaggcgggatagtccacttcatgggccggctcccaccttgcccaccctatgacgaagggggtttgcggtggatagaaagctgccagatgtaagtgggcctggcctgggagaggcgggatgttacagaggcttgggtagtccacttcgtgggccggctcccaccttgccaccccttgatgaagggggcttgcggtggcttcgtggttttgagcggtgaagttgggttcgcctcaacggggattaggaaccggcgagtttccgaacctcgggtgaaaaattccttgtctcttgcctcatttacttattgcattttcatctgtgcaatttactttcatagagacatatctgagcccatatcaccctaggatttcaaaacataacttagttgcaatttactttcatagagacatattttaagcccacatcactctaggattgtaaaatataacttagttgcttagttaagtttatccctcaccaagcctagcaacttaggttagttttgattaggtgtgatttaattttaatcgcctatatattcaccccttgtaatcgacatctcgatcctacaacgtctaataatttgctagtcactggtgcatgggaagcgtgggaagaggggaagggcaatttcccttttactgtagtaaagatatgcttcctccgttttcaaaataaataaacctagtatgtgatgtgacatgttttactgctatgagattattaatactaactcatagtactaggatgtgtcacattccgtattagatttgtttattttgagacatgaataatatgggattgtggtgggaagagaacgtcgtggttttttataaataggattggggcgagaagaaaagggaagaaagacgattgtgctacatagtactagcaaattagccatgctatgccatgggatacaaaatgaaaccatttttccgtgtttgtagtaggaaattttagttttgtttctattcattttctaattggctggttttatggaaaaccattctttcttctttttttttggtggggatggggtgcaacatcgattttctccagtggtttttttagatttgttgaaagcgtgggtagagaggaggacgacttcctttttaatgtagtagagatagttgcctattttttaggagaaaccgttgtttttatagagcattagatcacatcattggttttctccgctaatttttgtagatacatgggaagcatggggtagagaagaggtgggcgacttgggctgcactcatttatgatggttaggaacttctcacatgggcttaaaaaacaagataactcatttgcacatgattaatttagtactccctatacagtatgcaacatatcttaaagactacaaatctggatatacagctatccaaatttataatcctaggtcatatcctatcctagatacatttatattgggactgtggagattatgggtaccccatacacacacggcatggttatccgactagttataggggataacttatatctatgaaatatgtaacagatcatgacttgggtattacgtttccttgtatattatggaacggcctaaggtcctggtttaatgatattgtaaagtagatttaggaaactgataccgtattggttaaggtttctattttgtaatcctgccctccatcctatataaggtgggcagtaggccctctagggggcagatgagacaactagatcgtcagatctataatacactcggcggattcaaatccccaaacagaagtagggtattacctctcattgagagggcttgaacctgtctaaatcattgtctccgcatccatccacttttaggtctcgtgcgctaccccttttattattgccgaattcttgtttcgacaaggacatagggaatattaacggatttcggtgattttttttgagagagagcattagagcaagtttaatagaagtatagccaactgttaggtataaaagctattccgttcatctaatttaatagcctaccatacaatagtttcatataaatatataatacactattaatacttagcccatctatcacgaaacctctaatgggcgatcgatcgcccagccgatggggtagcgatcgggtagcctcccccctccctccacctagtttccttttttgacaccgtattactttcctattttagtaagtttatacacagtttacacatctaaagtttagagaccaaaagtttataagtcaaaagtttatatatccgattcaaatttgaatttgaattcaaatattttttatatatagtatttctatacatctaaagtttatacacctaaagtttatagacccaaagtttataagtcaaaagtttatatacccgtttcaaatttgaattttaattatatccgatttgaatttgaattcaaatattttttatatatagtatttctatacatctaaagtttatacacctaaagttcatacacccaaagtttataagtcaaaagtttatatacccatttcaaatttgaatttgaattatatccgatttaaatttgaatttgaattcaaatatcttctatatatagtatttctatacctctaaagtttacacacctaaagtttagatccaaagtttataagttaaaagtttacatagccgattcaaatttgaatttgaattcaaattttttatatatagtatttctatacataaatttttttaacttttgttttttttttaaaaaaaaatttgtggtgtagaaggaggggaggaggaagggggagaggagggaggagtgtattgagtataggggagggggaggacgggacccgcccattaggcgtgccccatctatcacacacacgtactcctccgttaaaaaaaaactcaccatcgaagacaataaatctgaacaatctcatgtctagattcgttgtcaagttattctttgttttagtggagggattaatatcttaaaactcgtgctgcagttcaacataaatctgtactccgtttttcttttatctccttttctctttcttcgcatatgttttttatgggtgaggattctctaccataatgtcactattacgtgaatcccacccttctattatttcacatgtcagtgtctgtaatggtagtgtaattatggtagaagatgtgaacccgttttttactaccttgtcttatagtattagatgtgaacctgttttttactacctatcttatagtaatggtctactgtatccgtcctataatatagcaatctaggatatgatgggatgtttcatagtgcaactaatctggatagaccttctgtctagatctattaaactataaaatgtctcggctgattctaagttgttatattatgggatggagggagtacttgctattacaacaactgatcaagcaagcaaatcaccgaaaccgctcccgaaaattcaaatatccaacgctccatttcgcttccccacccaaattcccaatcccaccccgccgccgccgccgccgagcgataccggggccgccgctccccatggacgccggcgacgcgagccgcttgggggagtcgctggacgccgtctccgccgccttccagtcccgcgtcatggagctccaggagctcgtcctcgcccgcaacagtaagctccctctctccacaacctcacccctcctcattcccatctctctctctctctcctcccatcaccgaaaccctccgatcccctgaccccgcctgcctcccccacacgttcgcagtgtacccggctacggcgataccggacctcgccgccgtcgacgtgtcgctcacggccatggaagcgcagttgcaggcggtccgccgccgcctccaggaggagcgcgaagccttccccaaggccaaggtatcgtcctctttctaagatttaatcaatgcactgttaaattggcagtacaggttgttccttggttgctgatttgacgaacatggggaggggatcgacacaacatattttgattaggacctaaacaatcaaagggatttgatacccactaatcccttgttaatccaatcctcctgtggcgtgatgggttgtgtagaaatggttggattaatcttgcctgttcctgcggcgtgatggggttgcagtgagtgtctgggtatgggggtaaatggatatatcagttaccgtagtttgagtatttggagaattgaacaaaaacaaggtctttgtctttctgggaaaaaaaagtattatatctttcgataattttgctattgctcctaaatccaatcttaattttgttcaatctacccgtgaaatgaaatatttctaactagtgatttcctcaaatactgatgtagaaactagtacaacagtccttgaagcaacagcggaggctgcagcttatgcttgcaaacatgccaactgggatgcgcgaggatgtctttgctacacctctggaacataattcatcaatgtatttgtgaatattaggaaaatacattggctgtttctaccttcatttgtgatatcaagttttgtgcgttacaggatgtttcctgagtcgctcaatttcagctcggctgttccagaagtcagagaccatgatttaaagattaaggaggagccaactgcaccacccaaggtaaagatatacaatcttatgtaacttttactcattgtctacaattcttttcagatagaaattataattgtgtcatcatctaatttattcttttattactgagaagaagggaagaggacctgcacctcgttggtacatatccactgaggagcttgattcgttgtcatcgtgagttctcaattgcaatgatagcttcatttcatttacttgtctttatataccaaccacattcctttatctgcatccaatatgtggttaagtgtttttttttggtgtttacatctgtccgtttgagataatgcgatgtataccatatgaatgtgctacttctttctacaccattcttcttttctgcatacttagattttcttttctgaacaaatggtaagaaatgctaggtgaatgttttgtgatttacctagggcctgttcagattgtagccaaaataaatcttaccaaattttggcattgtcaaaattttgccaatttggcaatattgccaagttttggcaagatttcttatttatttattagagtttggtacgaaactaaatggatgcacatatttggcaactttgccaaaaaaatggtatggtttgaaatggcatcaatctgaacaagcccctagaattgagcctagacatgacttgcagtcaaaacatctgccttctttgcctttgcatcatctttttgctatgtgggtctcacaggcaatgaaggttgtcatgaggtttatattatcaatccagcactactgagtatggagataagtgcctatttacctatgttcctataagttgaagctgttaaagtgctgcctattggttttgtaacccatctatttcattatacaccaagttcaatcagtagagaacctgaaatatcaaaactcaagagacaaacaatgcaatatagctggtatggtcaacttctttgagtttcttataaatctaggttctttgctaacttgtctttaagaaatggttatacactatagaatagacgaaatcacatggaagttggaacaatatttttactcaggaaggttgctatttcattttcccattgtgtagaactatataagacatgcaaactggtgccatgccttcaaactaaaaatggcatcccattttgttactacagatacatgagagggaggctcactctggagaaggttaacattgccatcaatgaagtggcttcatatgcggacggcaatgctcatcttgttgcatgtccaaagaaaaaggttgatcatttcaataactttactccaccttttatttataaaaaaaaatcaagattattgaaaaaacagtgggaactagctggttcctgcacataaaccaaatttacccccaaaatcagatgtttcattttctgtttttactaataagcatcatttgataaactgtagaaatttccattcttatgtggagactttggagagaacttgaatataatataagtactaaccgttaaggaaacaattgaactttcccgatagcagaaaccagcacatcttttgtcacagttttcaaatcaatggaagtttaacctgtaaacagccattgcccagttgtatggtaggattggttgttgaccatccttaatgttcttgcagttatcagaagacacatgggagaaggcactggtaagttctggaaggatgttgattcgatttactcatttttgtgcggaatcagcatttttttttctttttaggaattaagggacattgcagcaagagagtcagttaaggggaggcatttcttcttggaaactgatataaagggaccgggcttaaaacttgataccacagggaaagcaatccttactgtaagtatatgcagctttgaccacttgtgtacaaatgattttttttcttctatatctctaagatgattttaatgatatacatatttggtagacaaaaatgctattcaaatttttccctttgtagttggcaccctttcaaagaaatttggtagcataatttgtatttgtcaaacttgaacggggtagagaaagaacatggtacgctaaattaaacattaactgtggtattgaagttaagcagttaaacaattccattcatatgttttgccctgtttaacaaaattgatttaacatttcataactcatgcgacgcaccatacttacactgcattcctgtctgtttatttgtataacagccagtattaacgagactactagtaaagccatttacttggcaccattaatgatgaatatttgcttgaatgaaaataggatgctacacactaatttcttgaagatgtgaaacaaaaactactactgatttgctcttgccaattggaattttccttttctgccgcattaatcttctcgtgttttttcaggtccttcgtcatctcggccgcttccaggagacccggattgggcatcatcgcgttttcatactttcaaaacaacagtgaatgaagggtctcctccaagctttatttaggtgctggagaatataaagtttaatttggtgttaggctggagatagatacgcatgcattgagcttgtttactaattgctatgctgtagtttgttgtatacaggtcagggcaagtactataatgctctatatgctacccctaaaattgccatattggattgagtgatgaggtggaggagataagtgaggagagagatgatgaaccacccctaaatcaagaggcaacctccacacaaatctattatctatctatctatctatctatttctattatataataaaagtctattaaattttctacaaattttctcaagctgccacgtggcattctacgaacgcttctaagctgtcacgtggcacttttagaaattagaaaatttcttaaaaatctataaaaaaaaggaaaacattttactgttgatttttattaaatttagtggtcccattattttaagcgtttagatttatccgaatcaacctacaggtaggaacgtacgcacccctctttctatgttatggttgttaagatttaatccataatttgttacagattaatctatctatactaatataaaaaggagttgtctccttgcaatcttacaggtgaaatccacatacttaatccccaccgtccatccgacatctcatctaatctgatccgtcgtctcatctcatcatcatcgctgtgctaatcccaccgattactccgcccccgagcgcgcgactccgccgctccaatccccgccccatcctcgctcctcttcacatcctccctgctcttctcatctcagccgcacgaatccccgccgcctcgatcactcgctccgctcgattccccgttgccgccgttggaccagccaccctcctcctcgctctgtgtgcatcctccctctctcagcagcacgaggaatccccgccgcctcacctgccccggctgattccccgcggccgacgcagtccaccgccggaccagccgccccctcctcgctccgtgcgcatcctccctcctctcagccgtacgaattcccgccgcggtccactgccggaccacctcattcgctggtgcgcctcctcgcgactccccgccgcacgccaccgcatcgtgcccctgcaggcgacgtggtggttcccccttccgccagagccccatccgagatggccgcatgcagtcggcgtcaatccagggcctccatcgcgagctcgatctgcagcccttggtcgctggcgttcgaagctggccccggtgtggagcacgccgttccgcctctgttcaaagccctccaactcctccagccgtaatccccaaccagacttgctccatctatcgccaacactcgatctg

SEQ ID NO: 6270 - DNA, 59193 bp, Oryza sativa
tcctcgctctgtgtgcatcctccctctctcagcagcacgaggaatccccgccgcctcacctgccccgcctgattccccgcggccgacgcagtccaccgccggaccagccgccccctcctcgctccgtgcgcatcctccctcctctcagccgtacgaattcccgccgcggtccactgccggaccacctcattcgctggtgcgcctcctcgcgactccccgccgcacgccaccgcatcgtgcccctgcaggcgacgtggtggttcccccttccgccagagccccatccgagatggccgcatgcagtcggcgtcaatccagggccttccatcgccgagctcgatctgcagcccttggtcgctggcgttcgaagctggcctcggtgtggagcacgccgttccgcctctgttcaaagcccaccaactcctccaaccgtaatccccaaccagacttgctccatctatcgccaacactcgatctgtatctgactatctgttggctactgccctggaaggacaaggggcatttgatgttggcagtagttcctcaccatcatctcctttcccagcgtgcactcctgcatccccagccatgccaagcctggcgccgacctccggcaaggacgacctcaactttgtgttgttcagcgtccaatacccattcaaaatattccagttggtcaggtaattagttactatcttggctaattgaccttcttttgtctattttctcctatacttaaattgaaccattgaactttgctctttgttaactatttcatcttgtgtaagttggaattccagtaattaaaaatgttgattaggtttcttatttgtcaaaattttaatcatattcgatttggtgtatttaccttctcatttctagatagcacaaattttgattaaaaattggctgcaatagtgttctctgaattgaagaggcagctattaaaaccaattgagccttagattgttaatcaggttgttgatattgctcgcggtcactgtcgttcctaggtctgtaacacctccattactatgctaccaacatacacaactttttagcctatatatgttttcttttgttgttcctttaatttatttaaaccttttcaggatggatagggaattcaggatggtagttggtaatctcctgcaggtagaatccattactttttactgtctttttctcaatcatcgcaagcattttctttgcttagggtctgatttatgacctagcttccatgaatctggttatggcagtcttcttggtagatgtggcgttaggattgtgctcccactcacactcacactcagaggcatattgcctaggtctacagtctactccaaaccacatagttcaattcctccgcgttttaggtaaatcactgatctatctctgtatttgtgagaaaatttttgatttggtatatatgacgaccttgagaagtaatgatatgctttcttctggattctgtatatacttttgtgcagaactggagtcaaatgtttccgtttgttttgtggcttgattagtcctgtgcccatgcatctcttgctcccttactaatttctctggtgtgtagaattgcagatcaatgatgcatggcaaggtcagagcgccaatgaagtactaaaatggtaaaagaagctcctgctcctgtaatttcttagtatctctatgcaacaatggatgccctgatatactttgatacaggatgatctgttgattaccatatccgaaccatttgttctgactgtttatatatattgtagatcaagcaactactgatcatgccatttgtagagtttatgtgcttatcgttgcaaggtcaacaaaggctacaaacaacctacaaaccttttgctccttggggctactaaagcgctcttcttttggtgaaatggcaagactctgtttcgaagagtatatttggttgcttctagaagtaatactttttgcatatagttttgttcctttaaccttttaggatcaactaattttgttctccagcactgatttgatcttaatgactcattgcttccaattccataaggcacatgctagatggttattgacagccacaacaccggcgccgaggcggtctgccctttcgccattgacgcggcccaacagtcacgctgctcgactgcgccggtgtgcccccaacctcttgtccttgaagccacgtcttgctgaaacgttgccccaggcacgattagggcgcttgtggcactaattcggaaagatggaaggtaattacaatcttcgacccgcgattccctccccctctacctcatcgtgatcctctcatgttccctttcgctattcgcgctccggcgaactactcagatcggtcaatccctgaaatagcagataggctggtggaccttagctgtggacgactgggatcttgatggcaccgatccaagcctccgaggagagggatggctgtggaagggcacatcactgacaaggtagtaatttaccaacatcttagtgagcataattccacactaatgagcataaaagttcttttttttgcttttaatacatacagagattcagttcatctgcctcggattgctataaaaatactaattgtctattgcagcactatatcatgtccatttaacaaccaattcttgcacagctaagaaaatgtgtgtgcactgtgcagccacaattgcagatatagttaggtacaataagtgaagttgaggggaataatttggtgatgactataagattttctgcttgtgcttctcaatattttttagatatgttatcctctaatgtaatggggagaaagtctgatatattgtgatacttttcctgctgtaaagaagtatatatggattctagacccttatgctaaatattttcagtgttatgacgttagctgccatgtttaaattgttcatttatacaggtgatatttttttcctgcatttattaattcaaattctaaaactatatatgctgtagaatttcagtgttatgatgttggcagccaaatacattgtttaatagggaatatatttcttgtatgcatagtgaattcaaattctgaaactatgtcaggttgttgacacactatcatatatggctcactgcctcatttaaattcttgaatctgtgttgacttgcatctcccatgtggtactcaaatggactcagaagctccccatgttgatattgctaatcatgagcattctacaatcatcacctataaacttggttgatggactttacaaatgcatcttgtctaaggaatccctgaagtaagcctgtttccatacgattaatagaacatggcattatgttattgtttaatttatattaatgatgtgcgttttaggaaagagtgtattgtgatctcaaaggcttatccaattcgattgagtctaaaaacaaaatcatgaatcacttcgtatgaatcatcacctgggcattgagtgtttcaacatgattgtacagaggcttgcacacaacaaaattcctacatttaatgggtccaaaagttctgttataaagcacttcatggacatgtgattttgtataatatctctgattattacatttggtttcataggatacttacatcactctgaattttctatcatttttatttttttcggcaaaaattgagcaattttggacatcatccattatgctgcaaggttattgatgttaaatcatttgcaagatccatagatgtttggccatggatggattacgatctcgcgttctccaatgtggcaaagttcgctcacttttgcaatgtggaagttgcttacccttgactaaatcaggttttcactctccctaattctcgagctcgcatactatgtttagcacattatgcttttcatttcatgtgttctgtaatatgagagcttccatataattccctcatctgattggcagttggcaacagcctgccgtgtttgttacaattctgaatagaaaactttgcccatgtcggtcatgtgtttgacaaaatgctccagacacttgatcaaatgaatgtatttgtattttctcacttcctcagtatagcaacaaaaatattactggtttgctttttcaatctgaatcactaggtgttgttaggtttggagaagtttggactgaatcaatgcaatggacaattcatagaagatttcaagcagtggaaaaaggagacttctacaactgccacaggtacaatactctgacattgaaatagaagctgaccaatgcgctcacattgaaatagatatatgtttaagtacagcctgaattttccttaataaggaagaccatttaaccatttgtgcaggattaaaatttggtctaagatacagatcttgatggcatggtggtgctgagtgtatgccataattctggtgagagttggatgtaatttgcttgccttcaggataaattggatgtattttttgctgaccaactggatgtatgctttcttaaccggttttatttatatataactttagtcagcttgtgaaattatgtaaaattcagttcctgaagtactggtacttactgttgatttatttgtgcgtgcacttactgatataagatcatttgttattctctttacttacaatttcacttccagctggcaatgatttatacttcaatcataattgtttgcttaggaagtactctctccgcttcatattagatgtttgttttcttttcttagtcaaacttcttttaagtttgatcaaatttatagaaaatatattattattttcaaaagaaaacaaacatattatgaaaatatattcaatgttatatttaattatactaattttatattttagatgttaaatttttttataaacttggtcaaacttaataaagtttgactagaaaaaaaatcttataatataaaacggagggagtagcaacattgcaatgtataaatcatgccgggctaccttgtacgttatggatatattcaccaaaaaggattttatagaaataatccaaatagggtttttactatgatgtatgaaactttatttttaccttaacaatttttatggtctgcactgccttaaaaaaagtcactattgttctactccctctatttcacaatgtaagtcatttagcatttcctacattcatattgatattaatgaatctagagacatatatatttatctagattcattaacattaatatgaatgtgaaaaatgctagaatgatttacattatgaaacggaggaagtacctacatacatacattgccaaaacgtgcaagtgcacgattacgagtgctaatataaaaaaggagttcaccccctagcaatcctacgtgtgaaatcaaccactcttatcccatccgtccatccaccctctcatccaatctgagccgtccgctgtacaccgtagatctatatccacaagcgatttcgcccgatgtcatcccaccacgcggtaactgcgacgcgcaaatccccggtgcgatgacgactccgcctgctcgctccgcgcctctctctccccgctcgcgtcctcgctctgcgcctcctctcctcgcgacggtccaccgccggaccagcgacctcgcctcctcgctccgcctcaatgccggaccagcgccgaggcactaccgcactgctgcccacggccaggcacggtccagccgcctctgaccggcaccacagcgcctccgctgctcgcagggacgccgccgctacccgcccggctacctccgttgccgccgccaacacgctagtctcctcctccctgatcgagatcgagtcgacacatacaccaccaaccaccggccggccgccgcgcaccggcgagcaggatggggaggccgccgtgctgcgacaaggttgggtgaagaaggggccatggacgccggaggaggacctgatgctggcctcctacatccaggagcacggctccggcaactggcgcgccgtgccgaccaacaccggtgcgtgttcttgtgtgttcttgatcgatcgatctgcgttgggttgcgagatctgagatttttgcatgtttgatctgtgcgtgtgtgcaggggtgatgcgttgcagcaagagctgccggctccggtggacgaactacctccggccggggatcaagcgggggaacttcactgagcaggaggagaagctcatcgtccacctccaggctctcctcggcaaccggtgatttttcttttcttggttttatggttgctttgattgctttgtccatggcgtccatggctgagtgggttgctggctggctctggctgtctacgatgggcgtccatggcataagaggattctgaactgatgcataagagtgtcttgcatttgcagttctctaccataatcgtggtccacaacatagccgtgctttctgaatactttcaatggatagtcaacgaagctctacactacaaatttctgcaataacatgtactattattttttgtctgaattttgctttgcttgctacctttattttacctggagacaatttatatttggcctgtgataatactctattgtagtgtatgtactaaaatgtgtttttattctatttaggagggatcatatggaggttagttaactattgtttatcactgattctcttccatgcccaataggtgatttcaccaatgaaagatggaacatttattgattgggatattgttgacaatatatggaatcatgctttcaggtgagttgctttatctatttgatgcagatctgagtaattttgtgccaaaagtgcacgcccaaaaagctggccacacttgtggcaaaacttgtctgaaaaataaatctatgacatgagaggcactggagtaaccaggtttggcacgctgcttatgtggttcgccaaacacttgcccgttgccgcaaaaggccgaacgtgcctaacttgtttctggggaagtttgggatgaaccaaactctatctttaacatagtttctttagaatcagcaacaaagttaatcttctatgcctctatggaatcttttggatgtcagcatggttactgctttatgcccaccatcttttcaccttacatatttatttatgctcttcaaatatactaatagtgaaatcccttcttatgtgtacaaccggataaagttgattaaatactaggatttcctttgtatggcatggagatgcaactactgaagttttttgctttgttagcttttatcctgaggagcatcctatgttgatagttgaaccatctacaaacacagggcagcaaagagagaagtatgtccatatgttctgtatttaaattaattgtgttgcttatgtggtcctatatctaaatttaacaattctcaaaacctttttatcttttttgtatcgtgggttgtcaaaataagcaactatagtatttctacgtaaaacacccataaagggtatttcaatcgaaatcccaaaacaggatattggttctttcgcttgctcttgatgatactgtaatggaatggcaaacctatttcttcgcattttggctaacaaatctgaattattttgaagaatagaaggatagacaaaattccaatgaccattggacatgattcgatctggcgttgaataatcaagaatttccctatcttttttaacaaaagtatccattaaggtgtttcttttatcatgccatttttgttatttatcagtttttttggaacaaaaacaatgtattttcttagttgatgctttatgcaggtatctattgactttaaagatcatgaaggcataatgcatatatcaaggctttgacatggtcttcgtgcaagaataaaatgccattttgtgttcgtcaacaagtgttatttatttttaatcaacaattgtttgtcttacttcaggttcactgatctaatgttttagtcttgcacctgtcacttgctaataatgttgtaaccttgctcctgtcacttgatagtatttcaaataatttccaatattatttgtgcagattatataaggtcgctttaagattaccatgttcagattcttctgccggccctgttatttacattatgcattggactattgagcctggttgtttttggaggaccagggagcatggctggagtatcatctagaggataacctgatgtggattatgcacttggctttgtcttgacaaataatatatgcggtattgcttgtaagagaggtcttgttttctgatcttatcctggattgtattaaggacaattcatgtggattaaggagaattcagaaacaaaatttggaacatttgctatagtattttctgatcttatcctgggatgtacctgaacttaatattctcggttgtaccggttcatttctgagttcattccctgaacttgttgactaatttcaatctgtgatgtggctcaattttttaatatatatctaccaaagtttggtttgtttatgttattggtgcactgagataattttaattattttggctgttacgttggtaaattatgcagttatgacattttatcacacttcctaatttttatatgtagtttacattttatacttatttttttatacacgtgcacgattcctagtatatctaatggtcaacttaattccttgacttctctcatggaggcaaaaccggttgtggacgaaattctgatgcatgtcccatgtaccttgatacatatgaggttcattggtggtcttaggttcgttctttaataaactgtctttacaacgatgaccttttaaacttaacatccaatttatgataagattaaaccattgtatttcttttagttaaattaactgtttgagctccataattagatatttaatgacttttttaaactgccacgtggcgctctaataaatccttaaaattctattaaaaaagcaaaacatctaatcgttggtttttatttaatcgggtgaacccatagttatcaccattagatctatatcttaaaagtcaccaattaaatctatccccaaaaccgccacgtttatgccattgatcgctactacctccgtcttaaaatatagtaacttttagttacgaatctgaacatacaattgtccagatttatagctaaaaatgcttatattttgggacagagggagtaagtaggaaggaaaaaaaagtacggtacgtttacgcccagccccacgtcttttttttcttttcttcttctctcacttagattagatgaaaaataaaactaataatttaagctcatatgcaaaaatatatgttatttggagttgtattataacaagctgtatgctgtcggatcatccataaaaaatataaacaaattgaaaatatagattatataactgtatatcacttgagaaattagacttgcatttccaaaaataaaaataacattcaaacattcccaaaagttaaatactgatataactaaataacattactaattttttcatatattatgtgtttttcttttgatagtattgatgtgctttatgtcctaggcttcattcgctctagctaattggctgagcttatcaggacgtgcaaaacaacgtaggtcattggcattgaatattatgattaattaagaattaaatattaaaactttaaaagtatatttatttaatttttagaatacttttatatagaaaccatttccaaaacacacacaatgttcggtaagcatgcttacagtaaacaaggggtggccaatcctataagtacttcggtactcaaccttaatcattacttcctctctttcgtaatgtaagccattctagcatttctcacatttatattgatgttaatgtatctaaatagatatatatgtctagattcattaatatcaatatgaatatgaaaaatgctataatgacttacattgtgaaacggagggagtacttaggtactaaaattcttaatatgtagtatataatttactttgtcaattagtagtagccaaatatatcaattatatgtccctactattcaccgtatatataagttctatatagaaaccactgtctatcaatcttcgagtctgtcgacggtgggtacccgtagaccgaatatagagggtattggggtacgttggtacgaggatctatgtaatacgacatcaaggaaacaagagacaaagattatactggttcaggtcccttaataggtaatagccctaatccagttgatatgggattatacggggatgaccacaaattacaaagagaataacaaaactcgacgataccgacgagatcgtagtcgagttgattcgactagatcacccagcgacttggctcctgtaggctccggcttcgtaggctgtggtcgttgtgttggctatgagatttgatgccttaggtcttcccggggggtcccttttatatcgcaggtcaggtggtctccaggtaggactcggagacatcggaccctgcacgatatagtgacgacccagtcctatacgggtaggaacctttccattgatggacttcgagatgaatttccttagcgtatacagagaacgtccatacacgcgcagatgtaccgtattgccatatcgcgtacatctaagggtaaagggtatatcttatccgtagccctgacagagtcataccctacacaatgcacctaataattatctcatatccaatgagcacgtgtaccatctagcattgaggatgaaggacgatactaactgggaaatcataaaaagatgacagataagtagatgatgccaccaagtgacagtcaaacaatagttgactacaattagattgtgactatgagtaataatattcctactctcctacaaccacttctaggatgttacatgatgctctaataaattaagtaaatgtaagaaaaataataagaaaaaataaagcatctacccaccgttttacacttaaaccggtggattcattattttcaaccattagattagatctattaaagtaattgctcgctcttaaaaaccagttaatccctccctatgtacacatgtacacgaaaagaaaaaaagaagagtacgtacgtatacaatcctcttgttcggtagttctctttctttctttctttctttctttctttctatgtagctctacgattttcctcacgttatatatatatatatatatatatatatatatatatgtatatatatatatatatgtatatatatatatatatatgtagtgaccactcctggtgaggttatcgaagaaggcacaccgtgccactgcacgccatcccatctatttacttgaaagtatttttttattaactatgaagtaaaagacaattgtagatgctcatataaacacgtgcacacccacccaatgaatgcacatacatatactctacccctaggagagaaaaaatatttgtttgttgaaaacccaagaaaaaaagtacataagtacgagactactaatcgccggaaaaaaatattcatgcgtatgtacactcctaaatgtcaatgaaaccacattataaacctttttttattatgtcagtctcttctaaatagtgttaacaattagtaaaaataattttgacaatatagatcattccattgtatattgcctcctgaacatgcataagtggatcgatgtataataaaaggagaaaaaaagccaaaacccatatttactcgaatgtttgggaaggatggtaatatgcgagtttacgtataatcgggataaagtttttttaatatgatagacattatcatttagtatatcaaagtctttggtctatttcacggtatacttatttagtttttatggttataaggtaatctatgattttttataatgaatatagtgtgatataacttcttttttagtattctcattacaaatagcaaaataaattgcccgcgcatctgcgtgggcttcctttatagtttcaagaaaggtgtaagagtactagagatattagagatgacattgtatattagaggtgacatattatatggtttgcctcttaatttatgagtgaatgatatgaatgagtttggatgtggtagtcacgtctacatagcacttgccctcaatgcttcaaatggtttgtagacgcaattgaagtgaacttttgaggtctcacttttaccatgttcgttctgctgcgtgatgtaagattgtttgctactacatagacttgttcggccttttccgtgatggaagatcacgttcgcgtgatctcgatgaacaaaacattacccagtgcccctcgtttgatctaatttcttgtacatctccttctatatattgcataacctccttttttccagtatgcgcattttgatggtctaaaactgggccttgacagtaaatttttattctacaatgttttgttaatcaaagatcacaatcgaaagaaagtacttttgaacaagaacccaattgatgcaatatcaaatctgttctcagtaactcgtacactatcaggttattactattgttggtgaaaagcttgaatttagacaaccaaattataattatatgtattcatttacgaaaaggagaatgtttcaggggaaaaaaaatcagcctctgccattggtggagggagggaatcagggaaatggacactatattatcctttagagcatccccagcagttcatccatatttgattttccatatgctcatatggatggccatctaaaaagattcctcatccatattccttctcactcccatagatcatctatattgcatcttccaatatcactccctcctatattttactaatatttttcaactaaccatacatttgtattattttttatggactatattttaaacaactaaattttaacagtgttatttatcccgataatctaaatgagtttattttaatggatgtatttttaatattcccaactattttttctcctcttctctttactccttttctctcatcttccctattcctcttcttctctcctcttctattcctcttcttcttctctccgctcagcgtggaggcggaggctagcggctggtggccgcggcggcgcaacgggcgcggggcacggcggcacgacgggcacaggggcgcggcggcgtgatgggcacggcggccgacgggggctgcggcgtggcggcacgacgggcgcgatggccgacgggggctgcggcgcggcggtgcgacgggcgcggaggcgtggcggcgcgacggccggcgtgggctgcgggttccagatctggtatgtctctccctctccaccctcactccttgggaaaaaatgcacatctggccggcgatgacgacgacattgggggggtcgcgacggaggggaggtcgatctggactttggatgggggcgggggacgctggcggttacaggatgtggaggatggcgtgaggagagagaaacgccaaatttgatgtttctctctccccggatggaggatagctaaatttggatgctgggatggagtatctgttggagctcacttttcttctcccaacctctattttgtggatagaggcctgaatggagtatctgctggggatgctcttaccaaatgctctggataataaggtttactgctggtgggccagcccattaacgtatttttaagctcctgatgcacacgcaccgcatacttgcaaacggctcatcgtttcgcttattcgtggcatatttgtaaacaaatagtaatttgtgaataaattttttatatacatgttcttagagatctaaaagcaatgggtgaaaaaataaacttcgatgaaaaacctaaaatcagctctaaattaagggctaaaattcaaattttggctgataagcataagcataagcgaaaacatgaggccgaaaagtatccatacattaagcgaaggggacgaaccctagttagaagatagggtccaccatccatgcttttgaaggggaaacggattcgaatacgatgcgtggcccggagcatccagtgtcgacgttagagaggccttgatcggccgctgtcggtgggaggagattagttccggtacttccatctgcattgatctcccaagacaatggtggacgtccactcgttctacctctacgacgacgacgaccgatacaagtcgcatcttgtatatggtccgatacgcatgtacggattactatattttttctccttgtgttggggatcgggttgccgggcgatctatgtatcgggattttgttcacacaacggtttttttgtgtgactagttaagtgcccgtgctctgtaacaggttctatgtatatataacctttatgtattgtataaacaggcaaaatgaattaatggattgtatgatatacaaactaaggacgagaagctgttaatattgaataagaacattgctaatatatactccctctgtactcgtaaaggaagtcgttttggataatttttaagtcaaatcttaggaatataaattatgaataactcttaaggttattgagtttgaaaatataaaaaaaattatatgaatagatttttcttgaaaaatactttcataaaagtatacatatatcacttttcaataaatgtttttctagaaacaagaagtcaaagttgtgttttcgagaccgtgtcgctgttcaaaatgacttccattacaagtacgtagagagtacatctcatatataaaatagactaacgatgcactccctctgtcccaataaaacttaaaccctagcactctagtaaggatttaaggaaaacgacaaaaaaacaaaatactcttagctaataaagaaattgtattggtgaatggatggatggggattagtgaaggaataacatttctcgatttgtgaactgatagtaggtaagaagatagaagttggtttattatttaggacaaaattcaaactttagaactgatttattttggatggagggagtaggagtcccgacacaattactgcttttaatacaatacataaaaaaataatcataaagaaatagatagatttgaagttaatgttagaaagtttgatattctatctcataaatcacaatttgttgtaaatgcacaccctcctacgtagttttgttgtaaaaatcatcccattacgcatgtgcttaatgaaatcaactcactatcgctgatgtagagccatcacatgctaagctagcgagtcaatcttgtccaagtacttgcattagacttatttcttcatgtttcattgaattcttttatgcatatagcgaaactaagtacgacaacgtttaaactctcatcaacaattctctttattgaatcttcaaggaaagtgttaaggctataattctagaagtatttaattttgatagagactatattgatggctcataatttataaaaacacattgattatagcctattacttatgagatgtaatcttaaacgtgttttataaagtgagtaggggtggacatttgcaaccaaattacttatgaggtggaatcgtaaactttaagtgatttatggggtggtttattcaaatttcataattttcaattgtagaataaagattagcgcttggcagccgagcacgtggcagtgagcctaaatctaactgcaagagcggagtctagagtagagctgtcgagtggtccgaaccctgctccatacttctagtttagttttttatatcactccagaccgcttcgttgctattttgggtagagttgaaatcatttgtttgaatttcaacttcaaaagaggtaaagctgaagctgtagccctgtcaaataggccctagatatcacaagaaatttgaggtgataccaaagtgaagaatggaaaggacacacctaaagcgattgaaataaaaaaaacgaatccacggaagaaagatgttactacacccacaccgcgatcagcagagttgccatccattagagttgtacacttacacactgagtgctgaattttaagcagacacaaaattaaactacacatggacagaatagtggaatgcaccaagaagaagaattaaattctgcagctagagtggtatatatgtagctaagctaggagtgagactccaccagaacgtacagtggcttcccattgagcctctcacgaccctgccaaaagaaaaaagaaagagaaaatttcagccccaaattaatcagtcatcggcgacagcttcaatttctctcgttttcttgacgggaactgatgcagagtcctatatatgtatataactggagagagactcagcagcagcaagccagcaaccagcgatgaagtgacagtttgttgaacgacaaatacgcgaatattagaaaataacataatatcaaataattagaaggggtgaggcttctaacccgggcagggttggaaatttcggtcatttcggtgacccccgatacgatattaatttggccaaaatttttgattttttcaattttttcatgaatttggataatatttgttcaaattcaactaaattttgttcaaaatttcggactgaaatttccgaaattttgagatttcggtgacctctgatataaacccctgaaccgatagagtgaaccctgaacccgggtcgtctagcccaccaccttgtggagctagccggaagaccctggacatttctcgcgatgacgtgacagtgacattgtggacaattaaagctgaaaatgcgacattcagcgatccatttggagactggtgatactcatattttccttttaatttgagacaactattagtttaatggaatagttaattcattactcgatgcagtctacggcgattcatcactagtcaagataaactccggttattgcaataatacaacatattgtatttattctactatcatcgatgtatttacaatattcaccccaatcaatatatcccaatgttttaatcaaaataatactagctacaacactttatataattcatgcatcttttcttttgctagtactatcttgcgtatctatccatctttttgtttcatgaaaagtacataaatgtgtcaatgttcaatcactctcggttaacgccggcaatattgaatttggatgaagaacgggatatatactgaattgaaagtaggagcgccacctgccaattcttctctaccaaagtacgcaagttatttaatttgggttaactagttcatttattttatctcaaaatatatatactccgtatctaaattcatagctaagagttactatattttagaataaaaatagtataacatgacctcaaaacaaagtgtagaatataagtgaaataaagatgaaggacatgttcagataacatccacactttacaacacactaccacaaaactccttatgggttgtactaagtcataatttgatggatataggtcttgtcacacatgagtcatttctaacccatcagggatgactggatctgaactagctggtgacactttcttgtcaaactttaccataattcatactcgtggcaaggttggatgaagaaattaatcgcaccatagcagatggagtagaaatgtgttaagccatagttttagttactatagcttgcctaaattttgatatgatataaagtgtgccattcaaccaaacaggtataaggcacttattgtacatgcatgaacttattaccttggtgtacttacgatgcacaccaactaaaaaattatgaaaaacaaacgaaaaaaaatctgcatgtaattgtaatcttaccctatctacatatacaattgtaaatttaaatttattatattttatgataaaaccaatgaattttgtagttttaaaagcatcattttgcttaattaatcagaattgttctatttcgactactctatctgtaatcagtcttaaccggcatatgcatcaacaccaactattaaaaatccgccaatccacatgtggtgtgtgaaggacaaaaatttacgtggatggtaattagaagtataagggtgtgttctttaccccatctcttcacaacttctattttctcctctttttttttttatgtacgcgttccaaattgctaaacgggacttttttttcaaaaatatataaaaaattaatttaaaaattatactaataatatattttttcaactttatttttgctaatgtttaattcactttgttttatgtgcggtgtggggaggtggagttcccaacctccacctccaaatgcagccttattagtagacttttttttaaaaaaaaaattggtgacaattatggttactatgtgaaaaattggtgacggtatatgtttaggagtgcgtgatgcatgtaggggttgtttggttcttaactaacatcgtcataactcactttaggtaatgttagacaagtgtggcttgccacactttctgtggcctacaaattgtaagccacatttgtggcaaagttaggcaaatgattaagtctataacatatggagtaagatggtaagaaaatgtggcttaccataactatggcaatgaatcaaacacaaagctaacgaggtgtggcagtttaaagtatggtctggcaagttgaagcattgaatcaaacagccccgtagtatcccgataatgtggggctagctgtcgctgtccggccggacactgccaatatccctgtcgccgtgtgcaaattattcgtggagaaggatggccggaatcactcgacatcaacactgtcggggggacgcatgaagcaagcaaattagctggtagaaaacatgaattatccttgtaccaatatattatatatttcttcttgtttgtatttctcatgttctcatcgaacttggaaatgagctcactacctgccagccgttaagctagcttcaaatagcttgtgacagggtcccctcctatatatggtatcccatctatatcctaccatgaatgaggtcatagcttgagccaaactgtggtttaatttatcaagtggaatttggtctagagtgaaacaatgcttaaaaattaagggagcaatgtgagacacgcatagcgcagatgcaagatcggtccaatgcggcatgaggggatgaggagacagaggcacgaccaccacagcgcagatgcgacatgttttttggccacgtgtggactcaccaagatcgaagaactcgtctccctgtgcggaggcgagaggctcagcagaggcacgggtttagtcgacacgtacgtaaaaatttaagctggtgatccaaagcaactcgatacgttctcgcactgtaaaggccctaatagtctctggacaattagctttatataatttggaacattgtgttcaatttttctttgataaatcacactctatttcatccaaatagaattcatgtaatcacggaggaattttaattttttatatctatatatattaccccttcgaccttgaccaccacattatatatttatcttaaaagggaaattcaacaacttacaaactgtacattatttatctctcaacatgtattactgttcacagctttatccctgaattagggtggtttccacagttcgatcagtaaaaaaaaataggtcccgtatgtatcaatttttctccccctcttctatcttcctcataagcatcataactgtgatagttgaggaatggggaggggatgttaatatggatttattccatttttcttgaattgttatacacaatttttaaaaattccaaattagctatctttaagccatggccacatccccaacactactctaaagagtctaaacccaaatcaaattaatgtgtgcttaattccatatttaatagtacctgaattattttttaagcatacggtatgttcttaattaagttttaagctagaatgattatagattatttcttaaaagtaaaagtgcctctagttaaattggaaggaagaactcaccttcagttccgggagctcaatcacacatgcacactccaccacttctgcaccagcacgctctgcatgcatgcacattcaaatgtcatatatgatcagaaacagaaaatgctcctatatagtacacattgtactgcgttaacatgttgtatataatattgagctcccccaaacagggtgatagtcacatttgagtcactattgcaccatataattcctccattccagaataaatatcattttttccttccttttatcccaaaataaatccattttaagcaattattgcatcacaatttgtaaaagtatgtgatatatgcatttccagtagataaaaagagaattaattgtaatggaatttgataaactgaggatattttagattttttggttttgtattggtatgtgtgggatggatgaaaaattattttattttggaacggacgggtatactataatacatgtaatagtaatacacacatatatatctcctgagaattcaacaattttgtgatattagcactaattcttcgatctgaatttaaacatatatcatgagtgttatcttattaagcccggctagctggtgaacgatcgatcgatttccaatctggcatatgcatccatatatatgctcattaatttaattacagatatgatataattaatactccattcaattcgtgcaaaaatatataaacctagtattaaataagatacatcatagtattacgaatcccaatactaaagtgtatctcatactatgtttttatattttgggataaaacgagtacgtaccaagcaagacgatggcggcacagagcgtgccgccggtggcgacgaggtcgtcgacgacgagtgctcgctcgccgggctgtaccgcgccgacgtgcatttccaagcagtcggcgccatactccagctcgtactcctttgacatcacctcacctgcgcacatgtatatatatacgcaatttatcaaattcccattcacatacaaaattctatgcaagtttcatttcagtctcttggtcaggtttatttcactactagaattcaatagcttccctagagtttaaattagaactcaagggataataagaatccctagggtgactatggagaactcaagggaagatttatgtcccctagagttacaatatgcaacctagggaacttatgccacatcagctctattatgaaattattggcaccacagtggcaaccaaagtgagtcccacagaaaattttggaggcaaagctcccagcagcgaaattttttgcgggaaggcaatatactgtagtagactaaaatatattctcccccccccccgctccaactcccctaaacaacatcagaagggtgtttctcctccggtcctccccaactttgctgcttctccaatctcccccaaatccctctccaaatccctatctttgttctggatgctatccaaatcggagctccctgctgattagaagacctcagatagagcattatggagctctattgctgtagatcgatgttggaagtgcatcgtcctctctaacccattgccttccctcgaatattgttagtaccttgcatatcagtaccttgcatattgttagttttgttgtttgccctatatatacaagccttatcaaacaaattggttgttcactaaatttgtttaataaaattgtaacaattgtttttttataggatgactcccaagtatcaggtgttagagaggaaactggagatgacagggtaaatgttatagctgaaggaatgtttggtggctacttgaccaattcatctgctaatggtgccaccacctttctcccagctttagatgaacttgatccattttaatttcaactggctgtggtcatagggccaacttttgggaaaacttggtagttatagcgcctaacttttgggtaaagctgattcttaccgaaacatgtgtaatgaagtggaattatgccattttgagggcaagatgattataatgcatcttttgaatgctatatatggtgctggtggatttaaacaatattttgttcctgtgtttaatcatattatgtgtggtggtggtctttgtgcaatattacttaccttcagtgcaatttattttacataaatcctaatgaattgattaacatcataaattgtaataattatattaaaaaatgctcaacataataagtaattcctagggaatgcatgtttttgttccctggggtttcaaaaggaatctaacaactctagggacagtaactttacacgtcacttgacacccaccagctgggcatttttccctaggtcaaacaaccctagggagcattcctttccctaggtttctcttgcaaaaaccctagggagctctttgtttcccgtagaccgtttccctagagggcattccctagggttcactctagggaaacctcttccctagagtttttcaccattcccttgggtttttggctctagggatgccattgaattctagtagtgtttgtagtttatttgtgccacgctttcatagtatgattttccaagaacttttcacattatgttagcattgtttatagaacttgttttaagctatttgttatatatatttatgacatataatatttaagtgactctaaaaaaggccattagtttgtttagtgaaaaactttcaaaatataatgtatagtataattgtactttaactatattataaattttatgtaacttgtatataagtattaaaaattacacgtaacttctcatacataagttatatataagctacaatatacgtagttttaatataattacaattataatatagttatattatagttacacacaaattgtactgtatttttttactaaaagtcttatgacaatttttagcaatctctatatttaactatttcctataaacgaatcaaccatctatcagcctttctttccatttcttctctaaaagtccatcccacagctgatggatgcatggctagaggcatgtttggttgaggattaatattgttacacattttttactaagatgactaagcttagtcttgtcacacttttgtgacaaacaaaataacaaactaaactcaggcaaagttaggcaagaaaataaagtgtatgacatgtggacaaagtggttaagggtttaggtaaagtagatttatagtatgaactaaacagtacctagtaaaattgtgtcttacctaagataaaatatggcaaatttagttgtcaactaaacaaaccctggatctttcgattctctcatggttatacatttatatagtctttgatgcgcatttcatattatggataatctttccaataagatataaacaaaaatagtaaaaatacagacaaaagtgacttaattttatgaggaatatactaaaatcatgtattaaatcttagtatttgttacatgtgaattgcctgtacgtactttctaggaagtcgcctgttaagaacagacagatcatagtttttacttagagagttaagcagccatacaattttctgtacctggaagtttgttaggttttcttagtgggataaattttgcaccaatagcgagcgctatgggaggaccgaaaataaaccctctagcttcgacccctgcaccagaaagaaaaagtgaaattaaaaaatctactggaatttactactccaaccaaagaaaatcaaacttaataaacatgcatgagctcaaaatggcctgccaggctacttgtacatataaatatcatggcagctcgatataccagcgaacatatataatggcatggatggttatatacaagtagacaaggcatgcacctaattagaccaattaacatcagaactgaaatactacatccaattttacttatacgacattgttaactcttaaacaccatgtttgatcatttgtcttatttaaaatttacaaatttagtaaaagaattgatacagatatgcaaatataagtaatgtttaaagtacttttaaagatgaaataagtcataataaaataaatgatgcttgcgtacttttttaataaaataaatgatcaaatgtgatataaaaataaacaatgccatatatttcaaacagagagagtagtatttttcatatgtgaatatatatatcatacatgatcacagataaaaggacaagattgtgtgtacacaaagaaaaaaaaaccaaacaaataatagatcgaggagttggcccacaccgacagaaatcgtactcaactacatacgtgcagccatggaacagtacgatatatgtgcactggatcttgtgatagctctcactcattgactagcttgatacatactatcatcatgaaagggagagaaagatctaggaaagcatggacaccagctagtagcttatatataaatggctattgctggcccggagagacagatcttgtggtgatcgatcatttgcatcatgccatgcatgtgaacgtcaaagatttaatgcccactggtaattaacatcgatcggaaccatcgttttgcttattcgcggaataagagaaacgatatagttgtaaacgaaaaataatttgtgaataaaacttttatatacgtgttcttagcgatctaaaagcaaaggctgataaataaagttcgatgaaaaaaacctcaaaatccgctccaaatataaggttgaaaatttaaattttggttgataagcataagtataagcgaaaagatgaggcccgatatatataactatttaattggaagtacacattatatatgccacctcagtttctcaaagtttaaactttgaaaacgcttcttctttttttagcaataattaaatttataaattcttcaaaaatatgttactatatatatatatatatatatatatatatatatatatatatatatatatatatatatatagagcgtgcaacacatgccactagtaaatagagatgatgttcacccaatgcaagtttactctaatatgattcattagacaatattgtggaatcatgttgctcatacaaacaccgagaaatagaagtaattaagatatatttgatgacctcgaaaatataattcatggtgaattagttaagttaggaggaacttgggggcaaggatctaactctaaatccgagtcatgacatggaatcaaagtgaaggtcaggattaattgtatcaaccctatatttatagcattaattaaaaactcatgcattttatattggtatagattattgaagtatgtattgttataaatataacacaacatgagatggtaataatcaaccataaaaattattcgagaatagacagtatagttaataagccacacatgtattttggcataaataaagtgcctgggatgatattggcccgagaaataaaccgagggttcctttgagatgcaagatatatagaaacaccatactagaaataggaaaatcacaggagcagtgttggaattgcacaaagtagttgtttgatactctctctgtccctaaatataagatattttggttggatatgacgtatcctagtactataaatctagacaaatatgaccagatctgtagtactagaattcatcccatccatccaaattttcagaatattttgggacggagggagaacctgataagaaaattacaataaatttaaaagtatgtatctagatttattagggagaaagaaaattaagaaggtgcctatgaattttaatcaaaggtatttgtgaacattatgttagaccttaattatgctaaaatttctccaaatcatggaggaattttatatcctatgaaattactttgaagcaatgctacatctgaaaactttaatttcataggaatgttttccaatggattgaattcctcctctttagattgccacctatcaccctgtgaaaatcacatgtggagacatatgagtcaataaatgatgtgtgaggaaaaccataaaatctccaatctaaagagtggtaagacatcaaatccccatttttttttctaaattaaattgtggtcacatttcaatagccatcagctatcctctccccatctcaaaatttggtagcatcacaattacccgtgatacgccatagtgcagtgacgtaggctatgttagtgacaaccaagagaatatattagtatgacctagtgagctgacatgagagatcgaatatgtgtatggcatggtgggcgccttagaataaagatgtctatttccacactatataggtcaattgaggcgtacatagagaaaggaaagtacacctcaattaacttatgcgcatgtgcatatgttgtcatgggtgaagtgataaggaaagagagcatacccaaaagttttgacatacacaattgatcatatacacggatgcacacaaaagggatggtggactaaagcaacatatgtgcacggcctacctacctaaatggtttctattatcgacctaaacttcaacaattgacgcaaagtattttttttaactgactattagtttttttttctttgtgagtactgactattgaagtttgtaaagaacaagataggtaggggtatgacagtgccaggtgtataaagtgaactcctacaggctatgggtaatagtggaatgaaatgaccactcctaaatgaattgacatatgtgtattagttgttggaggtgtgtattatagagttatgttccatggtttagttttgttgatgtgcatatctaattaccttttggttctagttgaagcttttttatgtggtggaggatccaatccaatgaacatgacaggaccatgaatatttgataagtcacctaatcaaatccaatttatgtatatttttcatagttagtgcctcaaacttccatatatgcctatataccaatctatactggtagctgactcaaatgtccaattgtcatgcacatatatatgatctcaaaatatttgtccaacaggcacaaacaagtggagggaaaggcaaatatttttgtcatatcatctggaagccttcgaactttacaaaagggtcagacagagaggccaaacctcctgttttgtagtcaattactactgctgcattattcttcatttctctgtacatttgactgtgacactcctcatacgaataatctctctcgctctgatcttacacactctctctctctctctctaatttatttgtcattttagaattattttcgttaatcttataaattaaattgacttagcattttttttggaatcgacaaatgaaaatcatgtcattagatttttccatgaaattacttcgatactactgaactttaccgattttctacagtaataagtaggtaattaacggttaggagtatgtattattggaggccgggtcagtataaaaaacgacaagtaaaagatattgtactgtacaacttggctagattttcaatcgacccatcgtgtgcctgtcaaagtcacgcttttaattaactatatttggatcttcataaataataactctgacttagtattaaaaaaataaattatatatttcaatggatttgataagatctgatatttttttgagataaagatcagattagttactactccctccgtcccttaatataagagattttgacattttacttgtactgtttgaacattcgtcttattaaaaaaattaaaactattatttattttatttgtgacttactttattactcaaagtactttaaacacaacttttcgtttttatatttgcacaattttttttaataagacgagtgatcaaaacagtgcaagcaaaatatcaaaatcccttatattaattaagggacggatggagtacttgaataaacaaagcgcacaagttcaaataaatcttgattttttcaattttttgagataaaaaacaaaacaattatatgttaccagcaacaacggagatgcctttgccagtgtaccgttcaacgaacaagtcgatggtgtccttgaacacagggggatttagaagtagggtcgtgatatcttggaacattattcctgcacatttcatcaagaaaaacaaatattatgaaagaacctgaaaaaaaaaggtattgcatagaccttttcttctgcagggatgtgtcattgatttaattcgcagatctagtcaatcgattttttttctagaaaaaaataattgccacaaaactcttccaaagtatttgtgggaattctataaattaaatttgggcgggcaagggaagatgagatgtgtgttgagaaaaatgcagagagagagcgcgcgcgcacgcgtgctcaaattaaactgataccaaccaatatatatatatatatatatatatatatatatatagagtgggaaaagacttctaaagggaaaatcataatgtctcgaatacacaacattttgctcacaccaccttcatcatcacgatggatgcgcttatcgaaatatccacataattagccttttgaatagagtgagagtttcacctcaataggaagattaaatatgtcttcatgacataatatagcaggaaaaataattttaaaaataaaggaagatcagttcgcagcaacaatattttgtggtaaatgtgcatgctcaaaccatgcatgtgcatgcctataaattgtagtaatgtgagaaatttggttataggttacaagctgcaaaaagctcatgataaagtcacacaagaaacaagctatattcatgaaagtttttgggttcagaaccaataaacaaaaaaaggaaggaaagaaccaacgaggcaaggatcaatagtaccagtggggacctttgcaaggaaacacagattttggcacttgaaattaaaggcaacccccaaggtcaatattctttacagaattgcagcccctattgcacatgtatatatgagattatgagcacatatatgctgaaaaaaaggatcagaaagaagaagccaaccagttgatacataatacttctgaaaaatatttatactcaaaagaaataacatcgttcggtttcaaaacaagaagacagagctagaaaaccacatgaattaactagcgagacatgcaagaactaagctcgaaatcacagtaaagcaagagaggatgcaagaataattaagctaaaaaacaacaagcaagagaggagagagaacctggcttagggaagttgggcacaactctaatggtggatgctatggcctgtgtcctggggtcttgcatctccttcttctcctcagaccctgccattgctcctcccctctcttcttttcttccctctctctacaaatataattgggagagagagagagagagatgcaagtggaggcctgtgagaggggtgtgtgtataaatagaggaggaagctagccagcagcctccttgcagtttcagatatatggatgaatgaattatagatgatgtagctacttgcaattgtattttggttctgtacaacagtgcatgtttgggctctctcactccaattccaatatatacctggaagatcatatcatagctaggacctgatctagagatgttgctacatagattaatattatatacttatagcacacataactatacaaaatagcacatatgcatgcatgatgaaggtgtgttagagcctctagggatgtaaacggccgtcccgtcgacccgtctgatcagttaattaatcagatcaactctcacttaattggttcttcaggttgtatgcctgtcactgaatattttttttgcattgatccaggaaaagacaaaattggttgatcaatggctcagcagctagcctgcagatccattttgtgttatcactctctgaagagtcagtatatcaatatgtgtgcaaggaacaaaatcctcgattgattgcaggcatgcaactccagtaatgagactgactgttataatatattcaaaattcagttttgcgatgcgtaaaagcaacaatttccattcgaaggatttttttgacctaggtttttctttggaatttgctacaatcttttcattcatagatcacttgagattctttgggtaaccatgacatttaattcaaactagtaagattctgtgctttccaatgggtcatctcatataattagggattggctgggtggatggattgagaataaaacatagactaacctatataattagggataggctaggtgggtggattgagggaaaagtattgaattctatattgattacgtacacataaagggacgcacaacctctggtgcatggtgagaagggaacggaaggcagacgattacacttttaaagtagtagagatatgttcgcttaccatattttgtttaacattttagctaagagtatgaatagcgagcaaataaatatctcaagtgtggagtattccacaaaaccttattgtaaagagaaaatcaagactatgttattaacaaacaagtatgatagaaaggtgaacacaataatagagtccatgctaggtacaataatatgcaagtctagggtaaggccacatttgtaatgcatgaaaattccctactaggattaatgttgtaaaaaccagtgttcggtatccaaccacggaaaatcactggataagacccaaacttggtgacgacaaagagagattcatgatatatatttcttagcgaggttcagctgaacttatatctgtttaaatctgtactgaatttatacgtatattctacacaagttataacaattaatcgttcctgtcatcgtgttccgaacgaggtctaattaaatctcaatggtacttggcttgataagaaagtgaaaatgtgggtaccattaacccaataacacaagtgctaatcatagtctgggagatgttggagctttacctaactataaactctagcagacggcacaacgaaaagccgagatttttcagtgccaatttggattttggagggccgggccacataaaacgaaatctcaaaagctatatatacatagttcgaagaaaacgaaaccgaaaagtttgacgactcacgaagaatcccaaggaggatttgccaaatctcccaacttgcaataaaaccaacgtcttaatttacttgtctctggttcttctgatctgcctatagcaatagcaccattcttttctatcatgtgcacacgtatatgcatactaacccatgcaaattaatagcttattttacatgcaacccaaggtttatttaactgctaatcttgttgattagtcagtggggtcctgtgcctttttgtactggagaagagaggttgagatagagcagcacatatgatccatgccgtgcatcttccgggcacggattccgatgcgtggtcccagccgtggatcgaatttgttgaaaaatataccctaccctatgttgtggagtacagattaattaattagttaacagggggtgctttagaaaacattgttaattatcatggtactatggtagctagagggattagatgtgtagatccactggtgttaacaatcattgatccaaataatttggagggtactgagctagacatttgcctaaccacaaactcccctacaaattagagccattggatttgctttcaatttgttgggctctactgcgagagagaaacaaacatgcatcatatatctcttctaaaatcctatgaaatttcttttatgtagcaatcctcagaaagtgcaacactcatactccctctgttttctgttataagatgtttatttgaccaagtttatagaaaaaaatagtaatattttgaccaaagataaatttattataaaaatatatttaattattaatttaataaaactaatttggtaaacttagtcaaacttgaaatggtttgactttcactaaagtcaaaacatcttataacctgaaacggaaggagtatgttttaaagatacaatatacacaataatatattctaagatgcaacaaatcctaatgtaagcatgcagtatccaccttctccaacaaaaagtcctattacaagtccacttgtttttctatttcccccttaatttaggccccctcagctagctcttaaattttgagataagaacatgaatacatatactcccatatgtcccataaaaaaatcaattcttggatatgaatctgaagtacataacctatatccagattcatctatagaagctaatttattttgggatatggatggagtatacaagaggcaagtagtatatgtgaatggcacatgaagacaatatatacgaacaagctagccgtgtgcatgcatcattgctagcaagatggaaccatccatttctgtggggtcccggggtttgaagatttgggctatctgcctgtgaatattggggagaacagaatgaggcaaaactaaagctcctttttttttatggatttaagccagtggaggcaaacaggagacaccaccaccactcttttttttttttttttgcgatcagtggaagttagtattatgtatagtttctctaaaaatatatatgtttgagattgtgtggtagagcgttcgacgatgtctatgaccatccgtgtttattctgctagtgctatatataggatgtacattatgcatgagaaagaaaagccaaatgaacggtataccttatctcttatatcaattatttctctcgtaatattttttgttacgtacattatgatcgtctccttggatatgaaaaggaccagtgtaaccggctcaaaaacaaattaaagacgaaagagtctatgtaggaatacataatgcatgggtaagggaaacttttttcccccgctatatcatctctagttaatacggagtcgtgtagactgcttgagagacaatcctttgtaactctttcaagtcataaaagtatgttatttttcagaggcaagtataggaatatgcaataatgcatgggctaagggaaactttttttttttctcttgtatcatctctagggaaccggatcctctgatgtaaggaaaccaacgtcagagggcagtagtttcttcatccaccatccctaaagcatccaacgcctctcttgcttttgcttcattgtggggtgccgcaacctctgttctctcgcgcgcgaaggtgatcgattcattgagacggctatcaaggaagcggtcactgtcgccgagtcaaattttcgtccttcacatccaaaccggattaacgcagcctacgaggacgacaacagcccgatcttgtacgatttgccattgttaagtcaagtgtactccctccgtcctataatataagggattttaagtttttacttgcaacgtttgaccactcgtcttattcaaaattttttaaaattattatttattttatttgtgacttactttattatctatagtattttaagcacaactttttgatttttatatttacaaaaaaaatttaaataaaacgagtggtcaaaatttacaaacaaaaactcaaaatcccttattatgggacggaggaagtatatatttgtgtgcaggtctccgtgtggcgatcaagtgcaagaacagcgctgacggcgagtacgagatgaagcggccgggaagctcgacggcgccggcgcattcagcgtgccgctcgccgccgacctccgcggcgccgacagcgtggctcagctccacagcgcggcgaaacataacgcggcatgccccggtcaggagccgtcgaggatcatgcagctgtcggagagaaccttcgttgccgtcgccggcaagacccactgcacgtcgccggtgtgcgcgtcggcgaccatctgcaagcccatctgccagccgcgtcgtcgaccaagccggcgcccaagccgcaccctggccagccgccgcacccaacgccgatgctgacgccgtcgtacggaacgccgagcccgtaccactcgccggcgaggaactaattaattaatgccgtcgagctcacacattattatgattttttttctgctctgcactagcttaatgccatttatgatttattgttgtcaaggttggagtagcgcagatagcttatgtattcgttgatcttgagtttcttgggtcgatcgaataaagttccaggttgatttgtgaggtttgagtcaatacaggttgatttgtctcaggattcgtttgcttggcgcttcctcgctcgccgcctcgatgaatcaatccccttcacgcgccagagaacagagattgtggcaccctacaatgaagcaaaagcaagagaggcgttggatgctccagggacggtggatgaaggatgaagaaactactgccttctgacgttggtttcctaacatcagaggatccggttcccatctctagctagttaacatggagttcgtgtagactgctctcgagacaatccttcataactctttcaagtcaaaaaaaaaatatatcgttctagatgtaagtacatgatcaagctaacaatgaaaagattagttttttcaaaacttcaattccaattataatatagtgaaattctgttaaagacagagaaagctatatattgtactccctacttctgatctcaatgttaatatagtgcaattgaagactagtagctgtccggtcatgcttaatttctgtcttaattacggcgcgtgttgcttgtcgtccatggacgcccacatgattggactgatgaataattgacacaaagcgatcgatgttgcacgcaacatatgcactgatctatgaacacacacacataattagggcatgtataaaagtcactgatgtcatgttaggttgttgcaaacatgcacagatgcacatatagagttgagaaaatatagctccatgtttagaagcaaatgaaccatatgcctatataatggctaccaatggttctctctttctatggatctagaccatatggaaagaaaactacgtacagaagatggtactacattatatatataactatatatcattatctagctatttgacctcaaaactttggaaaagtaatggctaccactaataagtttttacactatttttattgtcatagctctgaaaaatacacattgaaaggaatgtatttattttttctttttgctagccgtccaaaccgtgttctcttttccgccttaaaagttttgtatttctctctcttttaccactattctgttagcactcacttctcttttaccattatcattgatcaatgttagttgaccattagatttgcccccaaaggcctattattcccttatgaaactaaaagtcataacaaatttcaaacaaaaaataaggagatatagttttaatgttgttagttttaaaggttgtatgaaaatgtatatattgtaagaaaattttcagttagttttaaaggtttttatgtgaaactttaaaataaaatatggaaaatagttttcacatataaatattaagtagttgctaatattgtaaaaaatatatatattaaacatgcaatgcagttaattccctactataaattatttaatgaaacatttgagaaccgaatgattccatggtgcattgtttttgaaaaaaataagaaaaataacatgttcaccaatttaatgtttttaaaatcaatatactttaggtagacaaaatttaattatcctttttttttgtactcgttaaaaattttcaaaggaatgtttaatgttggaatatgcacaagggcataatggtctattaagataaagttaactgtgctcatcagaataaggcatgcgtatgtacgtttataggggtgagtgtgcgcgcgttatggttgcttgtgttagtaatgtgttactaagaaaaagaagttaaatgtcaactactccctctgtttcatactccctccgtcccataatataagagattttgagtttttgcttgcaacgtttgaccacttgtcttatttaaaattttttgaaattattatttattttatttgtgacttactttattatctacagtaatttaagcacaacttttcattttttatatttgcaaaaaaaattgaataagacgagtggtcaaacgttgcaaacaaaaactcaaaataacttacgttggacagagggagtatgaaacagatgaagaatcattggcttagattgagttcgggagtgggttggaaccctcactcccaacacatagagcggcggttagtgcatgatttattaagtattaaccaaaataaacttgagaaatggattaatataatttttaaagcaacttttctataaaattttaggactgaggtagtacgtgtgttataaaaattttcttatagcaaagttgagtaaaaagatcttattaatctaattttcaatgtttttaactaatacttaattaatgatgcactaatgaactacctcgtgctcgttgtcatggggggaagttatgaaccagtggattcgatgtcagccttaatagggatggcaaaacaaaagggtctgttgggctacttggctgcagcgctgctgcagcgctgtttcacacaagccaagcaagcagccggctacagctgtggctgccacagcctggctacggaacacacccaaaaatgcacactaacgggagaatggtgaaatgaataagtgcaaattaaatttcacccaaaaaaaagaatattgtgtgttcccttatgtgagctgaagaccgcatcgatcatcatccctagttattatatattaacgcacgcaagcatgcatattgtgtaagacaaaagggaagctggatagcatatccatgcgcgcatgcaaccacagcctatagctagctactcccttcgtttcataatataagtcattctagcattgtccacattcaaatagatgttaataaatttagacatatgcatatgtatatattcattaacatttatatgaatatagacaatgctagaatgatttgcattatgaaacggaggaagtagattagaatcatctttactagattttcaccgtatgccctaacagtggtttcactggcgcgatcaatcatgcaagatgcatatggacatgtgccaacactcgttgtttcactcctagtgcttcatcatgtgtacgggggtcaatattttccaccataagagccaacagctctcgacttcggcgtgcaccatggtcgaccatgactgggtttacaactttacataccaaggaaaactggccggtttctgcgaaaaatatattttctaggacggctaaaagcataaagcgttgggtttttttattaagtttgaagtggattttaattttttttcttttacgaaattcggtcagattaatttcaccgcttgtcaatggtttcataaaaaccaatgttctaaacctctggctatagcggcaaagatggagaggggaacaactaggatacttcaattttgatgctaagatttatcggccgctaatagttgtacttagcctctaaattaagtatgaattaggaactatgaactccacgtatgaagtatgaattatgaattggtgatgaacttgatgtgcaaatcaagtgagtgatcgatatgctaacttttagcctaaattctgtcaaatttttgaactttttcctaatattttcgacaacagctaatgtcttagctgttggagagctcaaccgctaagaggcttagccggagatttagaacttgataaaaactagaaaaagccccttgactaagtttttgtgaatggttaggtgttagctagtagaggttgtcctttgtccttgttccatggttgttagaaagcttcctaagattttgtgaaaatccgtttagtttgagataatagatcatatatatgagttgaccgtagtaaaattatggcaaatatcacctttgatcttgatgttcgagttacatgtacatgaatttacatccactgaagtttaaatcctaacgtctatacttaaatagttatgtatccaatctctcgagttacatgtacatgaatttacatccacttaagtttaaatcctaacatctatacttaaatagttatgtatccaatcttttacagatgataaataaagctcttaaaaatatgtttgatagatagagtagacatagccacccatccaatctaagggagacttctcaagaataagaggaacatgataactataagctactgtaatatattaaaaatggtattagtattaaaataaagtttctcttgacaatcgatgacttgactgaacccaacgtgccattcattaaacctactatctacacaaccacttcttttctggtttcatttattagaggagcctagctagataggcacaaatgttagcaacgaccccgatgattcatttctaaactagctagaattaagcatggtaacgacatgtaaagggaagacatgtgcacacactcacgatgtatggtgtggcgtgccctttacacgctcaagacaggccaaccgtaaatctataaacctcacaaaatccccattaagagcacatccacgtgtgcgtaattatatatatgtatatgtttttttaattgtgtgcgtaattatagatatcagaatttaaactctactgagtatacagggttgaacgaaaacaggacaaaaaaaactgactaaccgacgcgggacaaaagctatgttgctgaggactaaatcggtccatttcatccaaattcaaatttgaattttattttttcgaagaactcatataaattcctaaacaaattaagaaaatatgaatctaaatgacttgtttaccgggacagaatggaaagcgtgagaaaataaagaacatgttctgatgggctgtgccgtaaggccactactgaactgcaaattgcaatatgtaagcccatttatgtattggtaatagctctgcaggaccccatttatgttttgaactgcaataagatcgagtataagaccacgcgcttgaaccttataagaagaaattatgggtgtgttggggattgaacataagacttcagggttaaaaccacataccacttatcgatgaatctctacaagattaacctaacgaattaaccaacgctggagccgatgttaaacttgccttctccgttcagtttggactaatcttgccgtttatttccgttaggaaaatcgtttattccgatcggttttctatcgatagccaacaagcagaacgagaaaattcaaactcgaattcggttttctgtcgatagccaacaagcagaacgagaaaattcaaattcgaattcgaattttagtttgcgaaaattgatccaagtcggaggtttttgttcggttttcacgaaaacaacatttaaggagctgagtgaatagccaatatggtcctaaagtttcgcttcgggctcaatttagtcatcgatgtttcaaattgtccaaacaagtcctctaaaataattatttgggttaatatagcctttggacccaaaaaacgccacgtgagcatgccaaatcatcctcacatgcagcggtataaatgaaatatcattctacccttatatatcataattaaaaaaaaagacacaaacagaaaaaataacaagccagcctaggcccaacattgttgcagagggtgaacgacaaaaggaatttatacaatccgtggttggctgcagcaatcgtaagtgacaattctaaaacgatcatacacgtgcgaaatatttaccttctttttttttctttcttttctatatggtatataagggtagaccgctgcatgcgaggatgacttggcatacgcacgtgtcactttttatgggtccaaggattatattaacccaaataattaatttggaggacttgtctggacgatttaaaacctcaatgactaaactaagcccgaagcgaaacttcagggcccatattagctattcaccctaaggagctttattaagtcctggtggttaacctattgacctggcaaaatatattcccttaaaaaaactgggaaaatatataaaagaaactgcggcctgctgggctattttcttaggcccacgttaacagcattcacggcccatgcatctccgaattggaacatgactaattgtaacaatgataaaaataattcagaagcattcatagaaatatggttgatagcccctccgtcccattttaactgcagccataattttccatgcacaactttgatcgtccgttttatttaaaaagtttttaaaaaaagtaaaaaacaaaagtcacgtgtaagtactattcatgttttatcatctcacaataaaaatactaattataaaaaaaatcaaataagacagataatcaaagttggatacggaaacttatggttgcacttaaaatgggacggagagagtatttaagagattaggagcgcacgatcggcccccacaggcttctatattgtgaaatgtaaattgttgtaagagtaaattgcattagcagtgttatgaaaatatatgcacaacggagacacgaatttttacgtggaaaacccttgcgggaaaaaaccatgggcgccgaccggcaatgatcactatagaggaattggatacaaacgcaggggatacattgggctatcgcaccctccccgtgcggcttacaagggatatatatagcagaaatctaggagtcctaataggaaactaatcctataaagtagagtcatattagataactaatccgaatatattgtgggcccgaaattcggatcacatatttaacaatctcctccttgagacgaatttcccttgtagcataaaaatcttcaatctccaaagaacctcgtgatgataaaatcaatgtgcgccaaatagtcacttggactataatccataacacccttaatccagaagaggtagaccatacttcaaactcgccattgggaacaaatcctaaatttgctggtatgacattgtggaacccagcagagacgcgaaactgatgtacaaacttcaaactcgccatgggaataaaatcctaaatctgctggcattaatttctggaatccaaacagaaacgcgaaaaattcttgtgcacaaaaacaaagtacttagatcccctgataacctcctggtatgttgggtacaatggtagcagaattcgccggacaatttgatcaccttgtgatcttgacaggagcgaggctccctctcgacgacttgaatgtacttttttttaatctcaggtgcatgacttatcctccttgaaacatgcgccaacttgcatcttcacttgccataacgagattgcatctcaatccaggagtggtagatcaaacttctaactcgccttgggaataaaatcctgaatctgctggtacaatttgtcaaaccctaacagaaatgcgaaacactctaggtgcataaaacgaagtatttgatctccgtaaaaaacctcctggtagacttggctttgtgaacatagcaatttggaacgtgaatttgtgttcccctgaacagaaccaaaacaatgcaaggcttaaatccctggtacgatggatatgtgcacgcaggaaaaatccaacgtgaaatttaattcacatgaacagggcaggaacggtggcttccgcttcctgactttcttttctcccgacgtgggcgtgcgctggtagattgatctcctgagtcccgacgtgtgtatgacgccggtagattggtaggtggacgccggctgctcggagtcgacagatgaccccgctttaaatcggcgagacgacgcgacgacacgcgcctgctgccgccgatcagatgagatcgatttcttcgatcgtggaatcacgccagtgaccaggacatcatatagatcgatctgatggatggccacgaacccaacaacgaagcgactatagatcgaatctccaatgctctgataccacttgttatgaaaatagatgcacaacggagatacgaatttttacgtggaaaatccttgcgggaaaaaaccacgggcgccgaccggcaatgatcactatagaggaattggatacaaacacaggggatacattggactgtcgcaccctccccgtgcggtttacaagggatatatatagcagaaatctaggagccctaataggaaactaatcctataaagtagtgtcctattagataactaatccgaatatattatgggcccaaaattcggatcacatatttaacaagcagtacatatatcaagtaggtataatttagtactcaaacttgtaaaacacttattttagtgtatgtacatgtttgatgtgtgcgaaccaagatgaaaaaacacaaaatggccaagcttaccaagttagaagttggttaggacacgatgtatacaggcatgagacatgctatatttgtaaacttgattttcgctttattattgtcagttctacctcttgcataatttctttttttttatttttctccgtgcactcttaggccttattaaacatttttctgaacaatgtatgtctatgcggctctctcctcacttacatgttaatgtaacatcctaatcaacacttaaattagcaggattagtcttgtttgtgtgttctttggccttggttcacatggacctggcaagttcatgtaccaaaatgagtgttttactagttcatgtactacattacatccatctaaagtttgtgtaccgctagtgtaatttactcttgatgcaaatcatgggtagggatgaaacgaagcggataatttccatctgctatgggggaaaagaatactgataccgttcagagtggataattatcggatagtccggatacagatatgaatacagatatattttcctggatatgaatacgaatatggtgtcgaggctttcgatggatacagatatccactgaaaccatgagacatactcatttctttataactctaggacctttaatctacctttttagattttaatagtagccaatctcataacattagtccacactattaatattatttaagcttttaaatatttttataaattataatatattcaatgtaaaatgagctaattatgtatgatggtattgtttctattagaagttgaggtagttttcgtgttccaagaaaaaagtgtttccgccaatcatattcaacccttattcatattcgagataagctgtatttgtttccgtatctgagctattcatattcattttcatatccggtgaaaagaatagtaaaatgaatatggtatgagcattatccgaccatatccactctgtttttattcctaatcatgagtatatatgacatgtctaattgagggtgtctaacgtaacttcccacctgacgtggttactaacatgtgagcctgagggtggtatgactcacatgaaagcaaccacatctctctgattttatgtgaaagaaaccaatccccgacaaggataaataggttgtgtcactactacatggaggcaaatagagatcagcactgtagatgccgaaagtggtatagccggcaactatagtgcttttcccgcccactcacccgcccacgcggctgccagcctaccaaatcacctttctccctaaataggtgccagtttttaaatataaccagcaactattagcctgtcagagaaaggtgtcgagtttatgcatatattataggtgccggttttataccgatgatcaaagtcatttgtgcccgcacctatctagtgttctgtagtagtgtgtgcacatgtgcagaggtcgaaaatgtaaactttttccttgccattatcttaaaattgcatgtctcatgtcatgtagatatgaaattctctatgggcgcatcgcatgcatgcaagctgtcttgcttcctcatcacaacatcttccctgaacgcccgccttctacgtccctccccctcttctcgctccctccattccgacgtctcattctctctccacatttccttttgatcccttctcttttctctctctctccggccggttgatcgaggtgagcgtttcctgacctacttgctcggattaattacaaattgatttgatcacgtagataattacatcatcatcatattgatggatggatgcttgcacatatatgcatgcgttttgaatctggtgatgtaatgatatccaattaataatcttgctgcaacacgaaagctcagccagtttaattgatttgatttagttaatgccatcgatctcaggcttgattatcgattggctgttgaatgcacggattaatcaaataggttgaaggcacgcaatgcaaaattccaaattgattgtggacctcttcggtttctccttgtataagaccttgaatttagaaattattagtgagctatcgaaagttttcagtggcatcacatattatctgcttacttggaacatatagaaaaatagaattattaattaataaattaattgtattgagcattatacttccttagtctgagagtatatagcattgggcataaagttagtattaactattcaccatgtaactagcttcttagtaaaggtacaaattaaggactgaagagaaactccagacttttaatcttcaaactgaaggcaagtaatacattttcagcccttccatttagttccttggaggatcaaattcaaatgttgcgacggatgaagacgcacgaaatttgatgcttttatcgcacgttcatgtagtatttggtcaatcgatctctgcatcatgccttgaccaagatgcatatttagtttgatgatctctgttgcttccaattgcactccattaattgtttgaactaatagtcgttttgcttcatgtaatcgaatgcttcctgcgttcgattggtgagagaagtgcactccaatgctgtaccaacagtactcttgggtttttctcttaggagagctttatttagagtgaaagggacttcctaattaagatttctttattttgaaagaagctagtaattaagatttcttaacatatgcacacgtgaagttataaaacatgactcaaatctgatgttgatgtgtgttcgaccaagtccctaatcagtttttgcactttttcttctgatttctcacgccaactgatcaattaaggcaagtaggattttagttgtgttcttttcttattgttttcctttctcttgcttttcgctttctcacctcctacctccttggagacagtccacaattgtgaattttcaacattagaaaaataatcacaattttgtggaaatgattgaaaaactaattaataggttgcatttcacatgaacatagttaattagagaacaaaatgcatacactaggtgttagagcagtacaaaagttatagaagatgtcactgcttactgcatgagtatctttcttcacaatcccattccatcataaatattgcctaaacaattccactcaaccttgttgcttgttcaactttaattctttcataacttgatatgaaggtcaggacaattactgtagactagtttcttcatggttgcacgctgaataatcgtacacagatgcccttgctgtctctgaattctcaaacactgaacatatattgtagaacattttacacctattcctgtctgatctcttgctgtgtgtgtacggagcatgctgccgttcttcccaagactttgtgtctcaattggttatttttgacttgaagcgatccgtttcggtagtccctgaggcagctagcgtaagcctcttttgacttccaagcacacaagttacttgctgcctcagattcatcagcaagtcactagtacttttcggtatctagatgaagcatatatataaaccacaagaaaagcggctgcccatttgtgttctgatcatgaggagattcaggtggtttcttgaaagtatgtattgccattgcttccttttgcccttttgatttttcattatatgatgtagagagaaaattatatatcttatcgcatcgatgctttatttttcgttgtgaaagggatgtgaatctgtggttgcaagatactgaagaaagtaataaggtggttcttcaatcttcataggcttcagagttcagagttgagttaatgtttttgcaaacaaggtgtctgctgacagtttgacagtaaaaagatctgtatatatgggttcctgcggtaacggtagaagctctgaatatgatgatcctgcatcattagagaagatggaggaactggttttacctctgaaattgatgcccttacacaccaatggccggttgtatgacatgaggttgtcctcacctactgctacctgtgtgatcaatagttcatctggttcattcgacccgatctaccgagcttggacggtgagtttactaccatactagttgctgaatttttgtggtagcagtgtttgatcttgtaagagtggcgcaattttgcatttgttgttgttgcagaagaagtatccttcagctctaaatgcctttgaccacattgttgcctatggcaaagggaagaagatagcgctgtttttggactacgacggtacactgtcgccaattgtcgatgaacctgacaatgctatcatgtctgaccaggtggttttcattgcaatatctagctctgttgagtctcctcttgtcaagttgtattgactaaaacttctgcacaatatcgtgtatacagatgcgcgaggtggtgaggaatgctgccttgcatctacccactgcgattatcagtggaaggtctcgtgataaggtgcatatgttatttaaaaggtttcgacgtaatcattgtgctgatataatagtaaattgatatgttatctgtcattctgatactaactgtacctttttgtatcaattttaggtgtttgattttgttaaactaacagaattgtactatgctggtagccatggaatggacatcatgggtccagttggggaacatgattcagttactaaccataggagctccattaactcaaatagaaagcaggtgtggagagctctttacagttcagccaagcataatatttgtttccaaattttagtgcaaaatatgatacagtatttgttttttgaattgaattgatcttttcaaacggtttttagggcaagggagtgaagatcttccaggctggtactgaattcttaccaatgatcaatgaggtagaaaaatgtcaggctttacaactccatattttagctcagtgttcatcttaatgtaatggaatgcaggtttttagattgctcatcgataagacaaaggcaatcgacggtgtgaaaattgagaacaacaagttctgtgtatcggtgcactaccgcaatgttgaggagaaggtgaagatttatcttctcaaaatcatttcatgggggagaaactattcataaattatattttcaggcatatgggcaattccttgcttctgattaatctgactttcagaattggcaacttgtttctcaatgcacaaatgatgtcctaaaagtctaccctcgcctccgattgactcatggacgaaaagtaattatctgaaaactgaaattggctcctgaagatgactgtcagctgtatctgatcattgaaatgcaggttttggaaattcgtccagtgatagactggaacaaggggaaggctgtggagttcttgctggactccctagatctagctagctgtaaaaatgttctccctatttacatcggggatgattgtaccgacgaggatgcttttaaggtgcggaattctgctttcattcagaaggtttatgtctttcatggacaaaattcattttatggttcaattttcaggttcttcgattttaaggcgcataatctgctttcctgcagaaggattaatgctttttcatggacaaaattcattttgtggctcaattttcaggttcttcgtgacgataaaaggggtttcgggattctggtgtcatctgtaccaaaggattctcatgccctatattctctgattgatccatctgaggtaggttcatgatttgtgttccatgtaaggcactgtttgatgacagttctcataattgttttttatgttcattcatgatatatagagctatttcaattgcaggttatggaattcttgaaaagactagtgatgtggaagaacgaagaagcatcacataataagtagattataaatatatctgatgtttactctagggtagatttctgaattctgacaaagagaataagcagaagggcaacagaattaacttggacatagtggacagttgtacatcatatagttaatccattttcttagcctagcaagtggcaaaataaaagtaattgccatgttgtacaagaatgcgaagcattctgcacaagtccagttctttgaataatggtctcagttgtagaatggtgtaacttgttaatgaactgtgatataaatttttgggctaaatcattaatatggcatattgtttggtgtgcattatctttacagatcatacataccttgcaaatttacagcagaaagcaaaatgagtatcaatgtttccaactccaagtaaaaggcaatttgaggtaaacatgtatacaaatttttctttacatacgaaaattgaaaaaagaaatcgattccccaatggcagattttgaagagttccctcaaactgaatgctctaaatgtgtaagttccagaattgagtgctctcctttggcaccaagtttctcaccattacgcactcttattgatcaaggggtcaacaatgacttgaggtttaaaatctggcttcaagtactctgaaagcaaggaagcatacgtgtcataacgggcagtcatgcggaagccccacttgtctttgatctggcgacataagttgaggtccatatcagatatcatcaagccatctcggtagcgagatagtgatggggtgcaagaagcatcaggtgctgagaaatggctggatccatagaaatgaccaaagtcggcatgctgaggtttcccgtcaccagaagtgaatgggtttgggaagacctctgtgccaacccggttaattgacccgacaaagtagctatttgcaattgcagcatttctggcctgaaagagtacaacttaagcatcagtgctgttctaccgcaaataagatcaaaaaacgaataaaattattcaaacttctgaaaatttcagaacgcaacaactggaagtaagtgctataaaacagaatggaatgtaagaatatatctgacctcaatgggccacattggttcactgagttcaccaacagttgcggatgggttgaatactatttcagctccattgaggccaaaagcaagccaattaaggggatgatgccttccataacaaatgtttactccgattttcccatatgctgtttcaaacactggatgcccagtgttaccctccatatagtatgtgctctcattgaaatcaccgactcttgggatgtgattctaaagtagcattttgttagaccggaaatgcttagagatatccagaggaaataaatatgtactgattgcacatacctttcgatgtataccaattatgttcccatgattacctatgacaacagctgtattccatacaatctctccgtggtttacatctctttcgaggattgggctcacaattaccatgttatatttcttagcaagttgttgaagaaattgagtagattctccatcaacaggctcagcaaactcacaccaccttttctcacgtgtgcagaaggcaaaaggcattgtccaagcttcctgaattttgggtatcaaccattagaatgatatgcacctttggaaatttaagccaatgtgtctagaacataacattgccagaaaattgagaaggaatattctgagcaacaaggatcagaaatgaattaatcaaatattcactattaacatggagaataagtattctgagaaacacattaggttggaaatgaagatatacatactaacaagttgcatgggaactctagagtaattcatcaaatgccaaaaggaagttgtacaaaccgataattgactcacctgtaaacacaaaatattaacaccagcatcaccagctgcatcaatcataggcttgactttctccatgatagccttcttctgatctgcaaaatgactggtggtaggaatagcaattgagttctgaatcaggccaactcgaataacccgtggttgcctgagatactctttatctgcatcaaaacggaaggcctgcagcacaaaagagcactacttaaaaattgagacaacaagagtgcagggaattatcagtttaatttgctagatgctgaaggattgaaaagcgcaaccagtagacaagctgctactaccactaccaaagaagagtttgacatgatgctttatttgtcttagtgaatcctgattcaaacattaaaattgtacatgattatttaccaatagacaaagacatttttttctgtagatagtgtgtgtttgattccatccataaatcaatgaaagaatataccaactatcaggaaataacctgcacatcaaagttatgagcttttgcaagagcagatgtggcttcgggcaatgagatggcctctagagcacgcccacaattcagtcccaatagcagccggcttgcttcctgttaacaaatatagaaactaagttagcaacagctcaggctcagcatataaacaagttgatatcttcaacacatccttaccataaagcttaacataaaaaactagtacggttccccaaataatcgaaccataatctattgttctgtattggcagtgatatactttagcatcttctaatgaaaccatatcataattaaacttcatagcgactgacagatcttgtcaattaactagcagtactgtaccaattttttgcctaaggagaacactgaacacaacgaattcccatcaacagatggatggacaaccgtagcgcattaacgttaacactacaggatgttttcttcaacagaattactcactgacaagtgacaacagtcaagtcactatctgacgcacaaaattgtgttagagagcaacccgacatcatcaattacaatccgtacatatagtcttagccgccataatggcaaagacatcaggatcaagtgatcaacacagccatctatctcatcaccaagaacccgattaactcacgacataccaatcgacaacgccagcgccgccgccgcgagctcgcccacccggaaaccaaccaagaaacaggcggccccggaggggggatgacccagacgcatccgaccaaccaaccaaccaaccagcgggccgccgttcggggggaggaggagagggaagttttaccttgaagagctccggggagaggttggactggaggagcctgtgcagggactcgtaccctccgatcgaccccgccgccgccgccggcgcatcctctccctgcggcggccgctcgccgttgctgctgtccatcctctcgactgccggctgccggtggtgcggttagtgtgatgcgatgcggttgccgcacttgcccgccctcctcgtgattgggctcgtgttagagaggcgagtagggctctctctcttttctttttttaactatggtttccttgtcatcttgtatacttgtattcctcgcatatgcatgtgaggtttgattggcattattgtttgtttgtttgtttggataggatggattagattggatttagataggtgtaatagttggcgaattttctacatcaacgttggtagataaatcaattattatacgctagtattagtatagcttttattatatagtaatattgtaatcttgtaattttttcctgttctatcaatataacttcacaccgtcttgtgcaaatcgttcaaaataaattatatagtaatattttaattgattcctataagtaattattcctaatccattaagtcatccatgaagaacacctctagctgcgtttgtttctcgcttctcccctcctctagtcccccgttttgcacgtgtatgtttcccaaactctaaacggtgtgttttttaaaaaaaaaaattctatagaaaagttatttttttaaaaaaaatcatattaatcattttaagataaactaatacttaattaatcatgcactaatgagttgttccattttacgtgcgtgagagggtagttccctacccaaattgccgaacagcctaaagagtgttcggaacccagttttaagcttacttaaaatgtggcgactctatgttttttagttaagtttggtctacccccaaattatttcaaaagtacaatttatccccctcaactgcaaaactagacaatgatggaggatgtaatttgcaattaatgtgcggatcaaatagttggggatgtacacattaatcccctccccttttcaagtggtctcgacttcccatgtggtactctaacataatgaaggatgtgcctcgccaatcaaatccctctccctctctcaatgggacccacctaccaatggcatgcattggaggtctcaacaagttagccgttgtcttaaggtcacaagagtgttgaaggtcaacaccttaactggaacagagaacgatgcttgtcgagatgcggtcaaaggcagtgaaaaggtcctagtggcggagtagggagtcgatgggaacctagcaaggttccaagctcctactcacaaggggttggggttcggctagtaacagcgagggagcctatgccatcctcgaatatgaactgggtaaggtggtgatgctgctataggatgcatggagaggacgtgacgctcatgcatttggctctcttccatccctcggtggcatggatagctttggtggtgaccaattgttgcttggcagaggttcggtctctagatcgataaccgctaatatgttgtcctccatgagctttgcatagggagggagaggagtggggagggcaccatcactactgaggaaggagaggaagggaagacaaaacgccgacgtcgagctcctctcactagtgccgtaagagcgagcacgtcccttttcctctctctcaacatcaatgactatcatggaggtaagggcaggaaggaataggcagggagaagagaatttagcggttgagcacactatggccagatctagcaagccaagctcaccagaagatgagcgaaacatgaggaggcatgacgcctccttgagtatttcaccatgtagggttccaccactgcctcctcttgggatcatcaagggagaaagagagagagagagagagaggggagcacatctacaagtggtggggggttcctagggagtgccatgacgacggtttctcacaatgagcacggagaaatcggcggctctcatggagcataggcggtgttggcatgtgacgagcacgtggcaagggaggtctagcaactgtgcaggtccatgtcttatgagagtgagagtgagagagagatagagagagagatgggagaatggggggaagacaataactaggtgctgacatacggagccaacatgatatttaaaaaatgatagttttgttaactgggttgccacatagtcaaattagtgccacgtgtatatcacatagtacaaaacaacccttgattatgttggggtggggttgggggtaattcatatggtttcaaaagtttaaggtcttaaatatcttcttccgtagttgagggtaaattgtattataaaactattttctgcatgatgaatggccgattagtttccaccaatgttcacttatacacggtagtttttaatgttcccttccatcctataatatagctaccttagcagttcaaaatataattattctttttctttgaaggaaaaaaaatataacaagatttaagaccttgtatatattcctctttattgtataccagcagaaattcattgcattgagtttttccatggagtgaatagagaaataggaaaaaaaaactctttcgaatgaaaatggaaaaacaaatgcgtcatatatcccacttggacaaagcaaattagaagaatttttctcttattctcatttgttccttcctttagaactacaaaaatatctatatattttagggcgaagggagtagacaagttgtgacgaaccaaaaattttatctagccgagacaaatatacttcctatcaaattacttattattacaacttgtcctaagtcaagaccatcagttctagaaactcgtataatttaacaaaatgcaaattattttaaaaatatttctcattgcgaatcattggtttatgtgttgatataaatatttgcctcaagagaaaactaaaacggcaatatgaaacagggagcataaatgcacacctatattctagtctcacaatcctagtttcccaccgaaatattctaaaattgaaacttaggcaagaaaaaggttaattggatccatgccattacaattgtgtcgaattagagaagtgccattataaatcgcctatttcgaagcatgccatccgtattgatgttaattttggtccatcccataatttggtcgtctcccgtgtttgtacacgtagtatcggatacatatttgtgtatggacggaaatgcccctttcagacgcgctctaaaactgacctggttcagctcaaccgtatgcttgctccatccattccctactccattccttcctattcgagctccagatctagccggcggtggaggcgaggattcgagcgagagagatgcgccgctagcaggtgatggtgctggaaatgtgatggcgacaacccccctccccgcggacccctgggcgagacggcgaggagatggatctaggcgaatccaatccgaccatctgttcaaggccatgagtatccctaaccctaaatcaattgaaacctgtaatgttaagaggcaaagcatcttttttctgcatcatacatctttggctggcattgttcttcatgtgtggtgatttgtttggtaggcacaggttttcggtagacgttagggttcaaggctatgtgacaatagatgctgttggtaggaaaacttacacaaaagggtcaactcggtaatgggttgtggaatcagatagctttaacgttgagtttgtgttgagtagccttgttgagttaacttggggcccaaaccaatctcctaccatatggtatttttgtaagtcaattagtgaggacgtgagactattggagaatggccagattccagagttgtttgaaatatatgcagaagagagccactttgagcttattgtatccatcctggatgctgcaaagggtgtgccatttgctataaatgctttaaatcctatatgtgtggcgcctcctgaattccctgctgaaatccatcctgaaatccctcctgacatccctcatgaaatccttgctgacatccccgctagtattgttggaggttttgaccagcttacaacagaggaagcagaagttagagaggcagatatctttgacaatgaggagtatgttggtgttgatgatgagtgcctatatgttcctgcatctaaatagcaaggtcaacctggatctgaacctcagggggctgcagccactggtcagagtggagagattggttctagtgctagtgctgtggcaggctggcagctcctgaggcacagattacagatgattatcctcagatttataacatcattcatgaccttgagaatccaaacattgtgaaagatgctttgttcccccatgataactctcagaaaagttgtaaggcattatgccatcttgaaaggttttgaatttgctaaaggtatgaagacagatcctacaaggtttattgcaaaaggtgcagctgatggttgcccttggtgtataaatgcatctctgattgaggataagaagactgtaaaggtaaactcttcccaaatttcttttgttttgttgttcaaatgatgtttacttatgtgttgcattactcatgcagattatggtccttccatttgagcacacttgttcttctacaaagctacataaagggaagatggctactcaaggctggtgtgcagatagactctctgattggattaagaagaatcctagcaagggaccaactgatgccaggaagaagcttgaagaaagatatgagatcaagttgaaatactccaaagcatggtctggtatgaagaaggctatggagcagatccatggtacatatgaagaaagcttccagcttcttttcaactggaaggttgcactgcagaacaagtcaccaggtacaattgtagagatagagttgcagaaagtaggcaagaagatgtgctttaagagaatttttgttgcattgaaaccttgcatagatggatttttggctggatgtagaccttacttaggtgtagatgcaactaggttaactggtaaatatactggacagctagcttcagccactgctatagatggacataactggttgtattatgtagcatatgttgtgtttgactcgacaatagatgataaccgactctggttcatgcaacaactaaataaggccataggagacccagatggtttagttatttctacatatgcatgtaaaggtttagagaatgcatgaggcatctctattctaatttcatgaagaagtaccaagggctaatcttcactaatcatctgtacctagctgctagatgctataccgaggataggtttcagtggcacttgaagcatatatgggatgtcaggcctgatgcaatagagtacctagagaagcaccactcaaggatttggtatagatgtggattttcagaacttagcaagtgtgattacctgacaaataatgtttcagagagtttcaacaaccagatcaagggcctaaacggtttgctcatacatgagttggttgattccattagagaaatagtcatggtgaaatttgcacttagaagagattgtgctagcaagatggatgatggaatcctaccaggtgtcatgaaggagctgaacattgcaactagtaatctgaaggttgttaaggtggctagaagtgaccatggatttgctgaagtcacaatggttgagagtgataatagcacctagagggacactgtggacttggacaaccgaaattgttcttgtagggtatggcaggtgacaggaaagccttgcaagcatgcagtggcttggatatgcaccaacaggggaaagattcaggactttgtgcatccatattacagtgtctaatactttagagcagcttatgcagggaggattcaacccatgactgataggttacaatggccttcagttgatcttgggttcaaagtgcatcctccaagactgagaagaggagctggcaggcctagagtgcgaaggataaggggttgtcttgagcctgggagaaagaaggtgaaatacaagagatgcaaacagtttgggcactttgagaaaacttgcaaattggctgagccactagatgaagatgacatggctgccgaagaaacacccaggaaaaggtatgtactgaacccttccattttgatccatgacttcttactgttgttgaattatgtgtcttcttttcacttgcaggaggaggccagcaaatgtggatgttgaagctagctcatctgcaccaaacaaaaagaaaaaaaaactccaaagaagaaaagaacaccacagaagatgagagatcttgcttcttccagtgctccaccaacaactactcctagaaggctatcagattggtttggtgtgtctcaaccatccaacccagcttgatgttgagctagctgattactgggttctcttttgtaatatatgatggcccaagaactgcttattttgtgatgtaatgcatgtgtaagctagctgattagtgggttcccttttgtaattattatgtgatgtaatgcctaagacacacctatgttgtgatggctggcagacctgcttattttgtgatgtagcagtgaagtaatggcactaagaccttcttattatgtattctaaagttggctgtgctatgcaaactatcatatgtggcatagatgaatgaaattgctccatacatgtgacattctcacatttgtgttggtttgcttgaaatacctgcttgaaataccaaaaatttatgtggcacttgacatttgctccatatatgtgatatttatatgaccttatatgaatgaacttgctccatatattgtaacatcctcagatttgtgttggtctgctgaaaataccagcaaatttgttggtctgctgcaaattgtaatgttgctaacattctcacattgccaaattttgacagttttagtgcaactaacatttagtgtagctgaaatttacaaatgaaaatcaagtttgctcacatatgttgctgaaatttgtcacataagtcacatttcctcagctttgctcacatttggtaaatctgcaactagaaatgcacagcccaattacagatttcacaattgctcacatttaactaaaaatgaaactaggattaattccacaagtcatttacagattgcatattacatattgcacactcacagcaattactaactacctaaggtagttcttccctacaactactggcacacaaagaacacacatcaacattagcatgtgcataacccattggagcatgtccttctctgattctattttgtccttcatctctgcaagctccctcttagactgattcagctcatctctacacagctgcaattgctcctctttttcttctaagatactagacaactcgatgttgtgaccctgcgcatctaccaattgccaccgcaactggttgcgtctcccgtaggctattatactcgccggcatggtagtatgccatcatatcctcgacatactcctgaggagacctcccatatccataaatagcatcgtacaccttgcatgaaaaggaaggaaagggaattgggaaagaaatcgaggagatgcaactcaaaatttctcgtggccaaagattcacctctcccccacattgcagccatcgccgggcaggatttctgatagtggacgacgtgcgtggagctgccggccacccacaagcacacttgagctcggggatgccgcacgcttctacctgggaccgctcctcgctacacctgctcaaccaagaaagggttctcgattcgtccatcgcagccgctcccgcggtcccctagagatgcggagggacttgctgccacccgccagctagggtttctaccgccgtcgatagccgccacataatggtttggggacagggaaggagcggtttctcgtggtcgagacgaaccaactcgccgatgtatccatgtatgcaggggcattagcgaccatatgaaactacacactggtcaaattaagtcaacgcgagcctacgtcgtacggcatggcatggaaactattctgcccatattcagatggcacgctttgaaatactacctccgtttcataatgtaagactttctaacattgcccacattcatatagatgctaatgaatctagacatatatgtgtgcctagattcattagcatatatatgaatatgggcaatgctagaaagtcttacattatg

SEQ ID NO: 6271 - DNA, 8703 bp, Oryza sativa
cgggcaatttgtttccctccggaagaatgttcttgacgagtttcaataaatcgccaaatgccttgtcactaacattattttttgccttccattgcatgaactcgagagtggtatccaactttttgtgcccctgctcggaacctgggtacaacgacgttctgtggtcctctaacatacgcttcaatttatgggcctccttttcactttcacagtcctccttggcatcctacaacatctgaccaagatcatccgcagcgtcgttattattagcatccctgtccacctcgcccgtttgatttccttcaaatccagcgtattgagcccagtccggaatgttctcgtcttccacttcatcttcttccatctcaaccccttgctcaccgtgggatgtccaacaattatagcttggcatgaaccccgactgaaacaagtggaaatgagtagtcctggatacataatacttcttctagttcttacacttattgcatggacaaccaataaaacccttatgcttgttagcttcggccactctcaaaaaataatgcaccccgtcgataaactatttggaccaccggtcagcgtacatccattgccgatccacctacatgtaatgaaaaaaagtcatacataaataaatattcataaaataatgacagtcatacaataatgatcaaataattaaaaactctttcaatagtcatacaataatgacatatcattattcatacaataattataaaataatccaacaaacaattcttatttattatttttgaatttttaaactaatattaatgttgtacttcttttaattttcaatttagtttgttttctattttccatgattaattttcattatattttaaactatgagaataaaacttttttaaataaacaaacaaaattcctatatattattcttccccacacaatttgtttctctcatcaacttacaacaaagttttggagacaaaaaatgtgtgaaacatagctccaaaagtaatataacaacaaaaaacattggaggatgaagttactaaccttttagacacctccgatttgtatataatcaccaaaaaaaaaattcacaagaaattttggcatgacctcccctcttttttggagaaaatttgaagcttgctcgggctggaggaggaagaagacatatataaagagggagataattagtcccggttgatgttatcaaccaggctaaagatcgccgagatctttagtccctgggggtctgacaaggcctaacatctttagaaccgagactaaagatgatcttaccaaccgggactaaagatcatatatgcccgctgtagccaccaaccgggtttttagtggaaccgggactattgtggatttcggaactatgataagatctcttgtagtgacggcttgtttggctattagagaggcagtttgagacatacggcacacagtttcataccgtgtgcgtgccaagttggcaattggatcctagtagcagcaaattttgaaacactcaacccaacccaatccttcttctcttaatcttctcttcctactcttgtgtttgtgtgtgtgtaagaggctagtagagttagctagcctaattttttttgcacgttgcagctactagctgtgctgctggcttgtcgtcctctgcttcaactttaaagagagagctaatagatcggtgatccgcttgggtttctggtgatcatatgcaacatggactagctacttggatttgttcaaaggatctgcttcttggatgctgtccggccacgtcgccatgcatgcgaattttgtggatggagtcaaaagctgcatgcacggagctgatttaattaagggcatgttcacattgtagtcaaaataaaccttaccaagtttttagcaatgccaaaattttggcaggatttcttatgtattaaccagatttgccaacaactaaacgtagatattttttggtaactttggcaaaaaatgatatggttgaaaatggcatcaaagtgaacatgccctaattaatttgttgacagctactccctccattccaaaatataaagtataactacccttaactcaaagaccaagaaaaaaatattatcatcttgtagtttgaatcatcctaataaatataatgcatgcatccaataggattagataacatgagagtaaaggatttaaaaaagtaataacttaatgaagaagatgtcatagttaattgcatgcttgcatgcatgccttatattatggaacatctaagaaaagtggttgtgccttatattatggaatagagggagtagtacctaattaagcacgtgtgttaatttattattaactagtaatctgcccgtgctaatgctacggcgacattcagaaatacaaattaagatcgatggatatagttattatgttgttaattaaattgccacatgcataaaataacatagttattatcctggttcaaatggagtcattagtgacaacataccatggtaaaagcaaaagtaattaaactttggaacttggcaccttgaagcatcaaatccttgtctaccttgctgtctccctgtcaccccggccccacttaattctaaattaaatggatgagagaaagagattaatatagtttagtgtgatagtgccaacacatggaaaatttagagcttctagttctctccttctacatctctcttaaatgtgggaccaagtccttatggggcccactcatcatacaaccatagccaacacatcatctgctcttctctcatttaaatcttcttttatttctcaaaaggtgagagaagggtttaaattgaatttccacccaaaatgccactctaccactccaagccttctaggaaacatctatatatgggcctatttgtcgtccaaatacctgcaaacaaccttggtgaatcatctctttgatcctaaattatattttcaaagagagaaagaaagagagagagggagtgaaagtccaatttacacccaaacttcaccatacctctcatcttctcataggaaacatctacatggggccactagacagccactcatacttggttgagtgaagtacaagtgggatcacagcctcaaaccactgccaactcctttaaatcgtttctacccctcatgttgacaactagctctcactttgcacctttacttttaccattcactactacaaccaagatttttgtgtgagggctaaaacgatttttccgcgcgggtaggcggcccgcacgcacctaggggtctgggaaaatgatgatttttgcgtgcgggtggtgcacccccacgggaaaacaaaaatccgaaataacatatttttttttaaaaaaaacgaaaccctagaatctggcggtgggcttccgcccgacggccatagtgccgcctgcctcccgccggcctccccgccacccgccgtgggatccgcgctcccctccggccgcaacgccgccgtcgcccctcccctccgccggatctagggagggaaggaaggggagaggaggggagctggatcccacgtggggagaaggaggctggctaccggatccgtgcggggacggctaccaccgcaggattcttgcattgacggccaccgccgccggatccacgccctccaccgccgccacgtggaggaggccggcacgctcctactcccaccgccgccgcgccgctgctgtcgccgcgcgccgccgccgctgacgtcgtcggcgttcccggtgtccagagtgccaccatcgccccactttgccattccagtcgactcgaatcatctcctgctgtaccattgcgccactgacgtcgccttggtccctggagaacgacgcccacatatgatcaagccaatacgccgccacgaacgctgtcggtcgccgttgctctcctgctgcctctgcttctcttgccgccgagtcaccgacatgtgggcccggttgtttagccacttcattaggtgctaaggactttaattagtagaaattgaaatcttgtaatgttctttttgtaaaattgctttgtttgccatgtgggcttatggacctaaatgcaattcaactaatgcctagggacctttttgtatagggtttagggtttaccaactcgacccgaacaaagcctaatcctcctgatcatcaccttcactgaagcactcctcctctgaagaatgaatattgcaagaatgagcatatgacatactcaacaagccacacagcaaatatgcaagtgcacaggataacaaaggatggcataattaagctcatttgcataaacagcatttaataaacatttgagagaatagtaaaacagttaagtaattaagcaatattaaataaacactatacaacacacccattttgcataggcccaaccttatctgaacaaccaacccctgattgtacaaatcaaacctccaaaccaggaatataccattccaaaccaggagtcaatttagttatcacagtattttcattaatagtgagtaatgtgagactaatcacgaaaaatattgttagacccacccataaccgcgggcacggctattcgaatagttttacactgatcagagatgtaccactgtacccacaagacacaactccacaacatgtcaccatgcgcctcagtaccaccacggtaccttggaaaagaactgtgacaatacctctcacacaacacaactcaccacagtgcactgttccgggatcatagtctccccctcataaccagaggcaatggagtccccagcgacccccacggacttctcgctgcttcacagtctggcacccccgtaatgaatcatgctatacaaaaggtaaagccgttgctcacgctggcttgtcgttggcacggtaaatgtttcacaacagtagctcgtgaaccggtccttaattgttatgagcacgaccatcaaaacgatgtactcacaacccacctttcatcaggtttatgtatcaattaattatcataacacgattaaccatcgtaagctaccactaaatataaccataagtaatatcgtaatatgattaaccccattggtgagctaatgtttctaagcatggctaagcaattatacctatatagcacttagctgaaccaaaccaatacataaggtccaagctattcaatttattacccataggaaaataaagtgattgtcggccattaattaactgggaatggctcaccacccgacgacattcgaaaataatgcataagttgaaataaaacattagctttaaacgggttcaacatgctcaaagggttgtttcggatctgtgtgacttgccttgagcttcttcaaacacttctgaaccttcctcaacgtaaacgctctcctccggaacatcggaaactaaagcaaataaacaaaatcaacaaaacagtacaaaaacaagaataaacagtacatgtggatatttttaacatgtagatcttgattttagatgaatttagcaacttgaaccactcgaatccgagttacgatgatttagttatgaatttccagagtttaatcgattttcaactaataaaaaaactaataaaaatgatttatgacgtcatcgatgacatcatcgccgggcatggcacggctccacgtgaccaccggcgatagagagctcggttgggctatccgaggacacctacgcgaagaggacgacgacgcgaactcaccggtgcaagaaactacgacggacgacgacgtacggcgaccggcgacgaggaccaacagcggcacggcttggcttgacgacggcggcggcgttccagtggcttgcgacgacggcgaaggggcagccaaggtactcctccaccgtgcgaacccggcggcggcgacggacagcgacggaggtgacgctagcggcagcgcggcgtgactggagagtcgccagcgacgacggcggcttgagctacgcggcggcggcgctacgagcaacggcgagacacgggacttggggcaaatggaagaggacaactaggggatgctttatataggcttggattagagagatcggactccaaccgagaggaatcgagctgggaaaaactagggttagttaggagagataaactcaaaacgaattcgatttggtttatccgggcaaaattgatctccgaaactctaggggaaagggagaggataaggaggagatgatttcccctcaagcaatcggactcgggggcgaccggttgaggaggaatcgaaggagaggcggcggtgctcgggctcggctcggcccagccggaggtaggggatgaccccgacatgtgggcccccatgtcgatggctagaggagaggagggacggctgggcttggattgggccggcgtggctgcacggccacgcgcgagggagagggatgttgcgccggaaacggccaaacggcctaggggaggattttaaagactttttcaattaaaataattcgtgaaatgatgtttcatttattaaaaatacttcccttgctcaaataattcccagaaaaatctagaaaaatagataaccaagcaaagtatttaataaatttttatctagctcaattttatgttgaaatttttcctagattattagagtttaacttgtaggtttttaaaataatttcaaaaaatgcattaaaaattgaattattaaattaggcgattttcagggcgtgacaaacctaccccccttaaacggaatctcgtcctcgagattcagaagaactggcaaaaagatgaggatgagttgacttcaattcatcctcccgctcccaagtggcttcttcttctgaatgattgctccactaaaacttacagaaccgtatgacgcgattctgggtgtttctctcactcacctccaaaattctgactggcttctcaacataagttaaatcttcttgaatctctaaacgctcaggatctgcttcctcggtaggtacactcaaacatttctttaactgcgacacatggaaaacgatcatgtattccctccattgacagaggcaactctagttgataagctacttcacttcttcgactcacaatcttaaaaggtcccacaaaacgcggtgccaatttctctttggtctgaaaacgatgaactccccgcagcggcgtaacccgtaggtatacataatccccttcttcgaaagtcaaatccctacaacgattgtctgcatagctcttctgacgcgactgagcaactcgcaacctttcttggataatcttcactttttcttctgcctctcgcaatacatctatcccaaaaacttgacgctcaccaatttgatcccaaaggagcggtgtacgacacttacgaccatacaatgctttgtatggagccatttgaagactagcttgataactgttgttatacgagaattcagcatacgacagattcttatcccaacttccaccgatatctagaacacaggctctcaacatgtctcctagaatttaatttactctttctgtctgaccgtcagtttgagggtgataggcagtactgaaattcaaacgagtacccatcccttcttgtaagttctgccaaaacttcgaagtaaactgactacctctgtctgacactattttcttgggaacgccatgtaaacatacaactcttgccatatatagctctgcgagcttatttcccgtgtaggttgttttgacgggtatgaaatgagcaactttagtacgcctgtcaaccactacccaaatagaatcatgtcctgccgacgttctgggtagaccggtgataaaatccattcctatttcctcccatttccactctggaatcttcaacggttgcagcagaccggctggcttctgatgctccgccttgactcattgacacacatcgcatagagccacatattctgctatctctcgtcgcatgctggcccaccagaattgttgcttcaggtcttgatacatcttagtgctcccgggatgaatggaatacaaagtttcatgggcttctttcatgatagtatcctttagctccttattatcgggcacgcaaattctttctcctagccacacagttccttgctcatcctctatataaccgatggctttacctcttctcatgttctttttgatttcttggatatcaggatcattcacttgagcctctctaacttgatcaaaaagagtaggctgagcttctaaagcggcaacaaaacctttgttgactattcccaagttcaacttttcaaattcctcgcataactcccaaggtaggtgtcgaccttctgacatattacagtagcttttcttgctgagagcatctgctacaacatttgctttacctagatgataatccttgatcaactctaaccaccgtcgttgacgcatgttcagatcaggttgagtgaaaatgtacttcaaacttttgtgatccatatacatctccgtacggttaccaaaaaggtaatgacgccaaatcttcaatgcatgaaccacagctgccaactctaggtcatgcgttggatagttattctcgtgggggcgtaactgtctaggcgcataggcaatcaccttcccatcttgcatcaaaacacaacccaaaccatgtctagaagcatcacaatacacctgaaaacctttccttggatcaggcaagactaacactggcgcagtcactagccttttcttcaattcttggaaactttgttcacactcttccgttcacttatacttcacatccttctaaagcag

SEQ ID NO: 6272 - DNA, 2855 bp, Oryza sativa
acatgattattattatttgtgtgtgcatgttctttacttaatttattcttagcggatttctgatgtttttgtgagttttagactatgggagataattaagattgtcatgccaaagagtattccgaatcctactaggaaagcaaagggaggggggaggaaacatggtcaatttctcggctgctatcacattccttgtattcttagtcttgggagacatatagccacgctaaaggcaatacagccgaggaatggcaaccttactcacaaggacaaatagtcattaaaaaattatgacagcactaaccatatctaatttcagttcaccaaacatacatttaaatttaggcagtattacggagatctaaatcaacaaacaacaaaccatacttcattgtcaaaacaaatggccttctatgtactttacaaattctcacaagatcatatttgcaatttttcctaaactaattaaccaagagaaaatatgcagtggaggattccacatataatttcatagcataagtacataatacaatatggtataatacacatatgcgcagtactttgaaatatgcataccaggacatatgctttagttcactccattcattcttgcattcttgcacattcaacatcagtcagatctaccaagcatccttgtacattcaaccacaagcagatctaccaatgaatcactaacttatgtagcaatgggggaaatcggaggagaattaaaaccattcctcgtcagacaacggaaggacaggaggcggcagaagattcaccggctgcacaccacggcgcgcgaatccctgaggtgtgggcatcgcatctatcagcaccaacgacatcggcagaggcaggggtggactggggctctttcgtagaccgatgtaaactagacttgttggcttcgttttagggaggggagggaaaagagatagactttacccggctggcctttgggcctgcgtggagagggataggagttggcttggtttcagccatggtttcagccaaaaggtaggaagaggattttaaataggttgcatatgcatgctttgtctaaagaaaattcctaaaaataaatgaagcaacaataaatcccaccaaaattctcataaatactaaacaacaccctaagctcccagcaattttagtttgaatttatcacatcaattgataacccaaataaatccttcaacacagctaaaaatctggaaacagcataccaattagcctagtttgcaccttcaccaaaattaaaccataactcctctagcaaaatctcaaggtcagaatgttaaacatactttaccatctggtgcaatggcttagtctaattcaaaatgtaaccacatgaaatgtgagccataaattacgtaaactttggaacttggcaccttgaaccatcaaatccttgtctaccttgccgtctccctgtcccccaccccccccccacccacccccctaattctaaattaaatgtatgagagaaagagagtaatatagtttagtgtgataatgccaacacatggaaaatttagagcttctagttctctccttctacatctctcttaaatgtgggaccaagtccttgtggggcccactcatcatacaaccatagccaacacatcatctgctcttctctcatttaatttttttttatttctcaaaaggtgagagaacggtttaaattcaatttccactcaaaatgccactctaccactccaagccttctaggaaagatctatatatgggcccatttgtcgtccaaacacagcaaaaaaccttggtgaatcatctctttgatcctaaattatattttcaaagagagaaagaaagagagagagagagggagttaaagtccaatttacacccaaacttcaccatacctctcatcttctcataggaaacatctacaaggggccactagacagccactcatgctaggttgagtgaagtacaagtgggatcacagcgtcaaatcactgccaactcctttaaatcgtttctacccctcgtgttgacacctagctctcactttccaccttcactttcaccattcactactacaaccaagatttttgtgtcagggctaaaatgatttttgcgtgccggtaaacggcccgcatgcacttaggggtctgggaaaatgacgatttttgcgtgcaggtggcgcacccccacgggaaaacaaaaacccgaaaaaacataaactttctttaaaaatgaaaccctagaatctggtggtggcgccgccgctcctgcttgccgctgccgcctcctcgtcgtcatcatcatcgtcagcggcggcctccacgccgctcgcctcggatctgtgctcccctccggccgcaccgccgccgacgcccctcccctccgccggatctagggagggaaggaagaggaggggaggggagctggatgccacgcggggggagggcggccggccgccgtatccgtgcggggacgaccgccaccgctggatttttgcgttgatggccgccgccgttggatccgtgcagggacggccgccgcccgccggatcccacgccctccaccgccacaacgtggaggaagccggcgcgcgcctacgcccaccgcggctgtcgccgcgcgccgccgccgctgccgccatcgggaggagaggagaggacaatggagagaggagaggagaagcgtgagagagagaggactgagaggagaagctctgcgtggaaattttaaagttgaaaatgggattgaggggaggggagaggagagaaaaaggagaaattttaaagtgtgtgagtgggaaaagagggagttagtatttttgcatgcggctctcttaataggtccgcacgggaaaatcg

SEQ ID NO: 6273 - DNA, 27794 bp, Oryza sativa
  unsure (1)..(27794): unsure at all n locations
cgattttcccagaagcaacgagttgccgcctgcacggaatctaaaagggtccctgtagtagtcattaatctagccaactcgccactgtgaacctcatctatttctcacagtgttccactatgcaaaccaccaaaaactacctcggaatctccaagaacttccacttactcttttcacctgaaggagtttcatccatcgcatgtattctctggtgagcttcaccgcactccaaccatgggaacgtgaagttccttctctacctaatcaatccattttctttgtttctattttggcatagatcgaacagttagtgatatgctcgtcggcattcccggtgtccatagcgccgccatcgccccacttcgtcattcccgtcgactcgaaccatctccggccgagccattgcgccaccgacgtcgcctacgtcccaggagaaagacgcccaaaaatgatcaagccaatacgccgccgcgaacgccattggtcgccgttgccctcctattgcctctgcttccctagccgccaagtcaccgacatgtgtgccccggctatttagccacttcattaggcgtaaggactttcattagtagaaatttaaatcttgtaaggttctttttgtaaaattgctttgtatgccatgtgggcctatggacctaaacgcaattcacctaatgcccatggacctttttgtatagggtttagggtaagtcctaaaccctactcagagattactatttcatgcattcattacttgatataatagcttgatgagtatgttgtactcaccattgctttaaccctctctttgagaatcaatttggagtttttgccgaaccatgagtttaaacatataaattagtttcattccaacttagttcccaattatagattagatagatggtttaattctatagcaaaacattagagttggctcatcctatagcttctacagtaatagatagccacaatcttgtaaataccctattattttatgtaaagaaatcacctttggagccttgatcaaatgtatgcgatgaagattcagattgttgaacctgtatcaatctactgatccagggcttgatacagtttaaacatgtcagttaccgaatcttcaattttgggacctgatgtcacgcccggaatttctatccaaaattccgaacgcttacatgtgtgttaaaccctcgtccaggaatcagccgaggcacacaataacaaattgataatagagtacaaataaataactatttaatattcacaaataataaatcattacagaggtagatagtttctctcaaagaataactttctacgcagcggaaaaataaaactaaaacaaactgcggaacagctatggcgactccactccacagacatcttaactagaacaaacttaatcctccagatcatcaccttcgctgagatactcctcttctgatgattgaatattgcaagaatgagcatatgacatactcaacaagccacacagcaaatatgcaagtgcacaggataacaaaggatggcataatatagctcatttgcataaacagcatttaacaaatatttaagagaatagtaaaacagttgagtaattaatcaaaactaaataacaccatacaacacacccatgttgtatagtcccaacctcatttgaacaaccaaccccggttgtacaaatcaaacctccataccaggaatataccattctaaaccaggagtcaaattaattatcacaattaccattaatgaataatatgggactaatcacgaaaaacattgctcaactcacccataaccgcgggtacggctattcgaatagttttactctgatcagaggtgtaccactgtacccacaagacacaatcccacaacatgtcaccacgcgccttagtaccaccacggtacctcggaaaggaactgtgacattacccctcgcacaacacaactcaccatagtgcaccgttcctggatcataatctccccctcaaaaccagaggcaatggactccccagcgacccccaccaacttctcgccgcttcacagtctggcacactataatgaatcatgctatacaaaagataaagccgttgcccacgctggcttgtggttggtacggtaaatgtttcacaacagtagctcgcgaaccggtccttaattgtcatgagcacaaccatgtcacgcccagaaattcactagtaatttccgaacttatttgtgcataaaaccctcgtccaggaatcagccgaggtacacaaactgacaatttaatatacaaatccatcataatattaacgttacatacttacaaaagaaaagaaaacagtagcgaaattaacgatctagcgatggcttcagctccactcccacaggcagctcaactggggtataagccaaacgtcttctccttctggatcctttttcttcaactgaggtttggttgattattgcaaggtgagcatatgacatactccgcaagccacacagcaaatatgcaagtgcacaaggataccaaaggatggcataatatagggttcatttgcgaaagcagcatttagcaaagatttaagagaagtaaaacagtaaagtaattaatcatcaattttaatcaacactgaacagcacacccatgctgctcaggcccaaccaaacctgaacaaccaaccccggtcgtacagatctaacttccaaaccaagaattatccactccaaaccaggagtcaaattaattatcacattattaacattaacgagtagtgtgagactaatcacgaaaaacattgctcaactcgcccatgaccgcgggcacggctattcgaatagttttactctggcaagaggtgtaccactgtacccacaagacacagcctcaacatcatgtctaccatgcgtcgcgatactggaaagtacccgaatagaggctgtgacaataccttttgcacaacacaactcactacagtgcaccattcctagatcataatctccccctcaaaaccagaggcaatggactccccagcgacccccacggacttctcgccgcttcacagtctggtgccccgcaatgaatcatgctatacaaaaggtaaagccgttgcccacgctagcttgtggttggtacggtaaatgtttcacaacagtagctcgcgaaccggtccttaattgtcatgagcacaaccatcaaaaccatatgctcacaacccaccttaactaggttttaattatcaattaattaacatcacacgattaaccatcgtgaactaccatttaacataaccataattaataataataatataatttataattaatccctttagttagctaatgtttctaagcatggctaagcaaacatacatatagcatttagctgaaccaatccaatatataaggttcatgctaatcaaattataacccataggaaaataaagtcatcttcggccattaaataattgggaaaggttcaccacccgatgacattcgaaaataatgcatagttgaaataaaataatagctttaaacgggttcaacatgctcaaagggttgtttaggatctgtgtgacttgccttgcaataatcggtcttcaattagtcttgttgaacactttcgacgcactcacgaaccttcctcaacgaaaacgctctcctccggaacgtcggaaactaaagcgaaagaacaaaataaacaaaacagtaaaaaagaagcataaacagtatatgtggatatttttaacatgtagatctcgattttagatgaatttagcaacttgaaccactcgaatcggagttacgatgatttagttatgaatttccgaagttttaatctatttaatctattaaagaaaaactgaaaaagaggagatgatgacgtcatgatgacgtcatcgacggcagccacggcacgggtggcgacctcgccggagctagggtggtcggccggactaaccaagggcatctacacgtagaggacgacgacgcgatctcaacgatactcaccaacgtgacgaacgacgacggatgacggccggcggcgagcttgtgcggcggtggcgactcggtcgtcggcagcggcgactctccggtgaccggcgacggcgctacggttgacgagagagctcgggagatgggtcaaacgaaagagggcgactagggggtgctatttataggcttggattgaagagatcggctcaggaacggatggatttggtgaaagaagttaggatttatctgagttcacccgaatataaacggccaaaattcgtgagatatataacgaatttgatgggggtttcttcgggattaggtagaggagatagagaggaatccgtttttgcaatcaattttagaaggggatcaacggatgcaccggatttgatggaggaggaggcgacggcagcaggcacaggacggcagctcgggctctgcctggagctggaagacgacactgtagcgagagggaggtagattagactttttgggctgggccggaagggagcaacaaaggacttccaatttaataaattaatcaatgagatgatctttgaattgttaaaaatagttccaacgctcaaatgatttcaagaaaaatcttgaaaatacttggacactcaaagtatttaacaatattaaaatcagatcatttaatgattaatttaatatttaaataattgctgaactgctctttgtatgattaaaattaagagttgagctccaaaaaatccgagaaaattccagagaatataattaaccatggagaatttaataaaaattaaatccatccatgctttacatttaggaaattttatttcccacaattaacttcacttgtaaattaacgaacatttaatataaattctaataataatttattaaataatttataaatcctaagacgaaaatcaggatgtgacaaaccatcaaaaccacatgctcacaacccaccttaaccaggttttaattatcaattaattaacatcacacgattaaccatcgtgagctaccatttaatataaccataattaataatataatataatataatctatatttaacccctttaattagctaatgtttctaagcatggctaagcaaacatacatatagcatttagctgaaccaatccaatatataaggttcatgctaatcaagttataacccataagaaaataaagtcatcttcggccattaattaattgggaaaggttcaccacccgatgacattcgaaaataatgcatagttgaaataaaataatagctttaaacgggttcaacatgctcaaagggttgtttgggatctgtgtgacttgccttgggcttccacaaatgtttcggaaccttcctcaacggaaacactctcctccggaacgtcggaaactaaagcaattaaacaaaaatcaacaaaaccttacagaaacaagaataaacagtatatgtgaatatttttaacatgtagatctcaattttagaaaaatttagcaacttgaaccacctgaaacggatctacggttatttagttatgattttccgaagatttaatctattagaaaaacgggaaaaagaaaaagatgatgatgtcatgatgacatcatcaatggtggccggaccgagatggcgacctcgccggagattggatggtcggctgcgaacatggaggacatgtacacgtagaggacgacgagacgaacccaacggtacttaccctcgagccaaacgacgaacgacgacggccggcgacgagatgaacggcggcggcggctccggtcggcggtggcgagtaggctccggtggtcggcggctacgggggacgggcggccgggcttcccctcaccttggcgcacctattggcggcggctgcaagcagcggcgacaacgaaggcggcggcgcggcgctaccggagttggccggcggcggtggcgagctaggcggcggtggcggcggagctacggagcacgggaaggcttgggagacggggcaaacgaaagaggaggactaggggatcctatttatagccttggattgaagagatcggactcctcccgcaagaaatcaatccgggaaatcaaaaactcggttttagagataaactcgaaaacgagttcgattcggataaaatactcaacgattagctccgatttttcggggtaaagatagaggaggatgagaggatcaaaatcccacaaacaatcggactcggggaggccggattcgatgcggatttggaggggaaagggggcggctcgggtggcatggctgggctcggccgggcgactgctagaggttagggaagggtccgacatgtggggcccacatgtcggtctcccgagtggagggggcggctggcgggttgggttgggccggctcggcggctttgggctggcccgggcgcgcgggagggagaggagttgggccggaatcggcccaacgacttagggaagggatttttgaactttttaattaaaataatttgtgaaatgttgttccaattattaaaaatacttaccttactcaaataattgctagaaaattctagaaaatagaggaacaagtaaagtatttaataaaattttatctagctcatttttatgttgaaaattttcctagattattagagtttaacttgtaggcttttaaaataatttctaaaaatgatttaaaatatgcatttttaatttaggcgatttttagggcgtgacacctgacaaggtgtgtgggtgggggcctagagcggccatcccgctccctcctcccccccgagccggccctgactacatgggccttaacaggccacatggcatcttatcataatttctgggcttgatagtgacgaagatgaacgtcatagactgtatgacgacagaaggatcatcactatattaatgacaaaaagataagcattctttatagaacgccattagagacgcatgataggttgtcacgcccggaatttctatccaaaatttcaaacgcttacatgtgtgtaaaccctcgtcctggaatcagtcgaggcacacaataacaaattgataatagagcacaattattactctaattaataagcgaataaaatgtcattacagaggtaaatagttcctctcaatcaataaagttctaagcaacggaaaataaaagaaacagcgcaggcgactcctctccacaggcaacttgactagggctacgcctaatcatccacaccatcagcatcactgtagaactcctcctctgatgaaagattgcaaggtgagtatatgacatactcagcaagccacgcaataattatgcatgtgcacaggataacaaagcatggcatagtatagtctcaattgcttaaatagcatttaacaattatttcagaatttaataaaacagttaaataataattaaacaatattgatccaacgctatacaacataccccgttgcataggccaaccattctgaacaaccaatcccggctgcacagttctatctccaaaccaggaattaaccattccaaaccaggagctatcaagttattaacagcatcatttagtatggtgagaagtgtgagactaatcacgaaagacattgttagacccgcccataaccgcgggcacggctattcgaatagtttgaactctggccagaggtgtaccactgtacccacaagacacaacctcaacatcatgtcaaccatgcgtcgcgatacttgacaagtactcgaattgagattgtgacaataccctctatataatacaattcaaagcagtgcaccgttcccggatcataatcacccccttataaacaaggtatggactccccagcgacccccgtgggcttatctccgcaacttcacagtctggtgctctacaatgaaccgtactatacagaaagtaaagccgttgcccacgctggcttgtggttggcacggtaaatgtttcacaaccgaaactcgtgaaccggttcttaattgtcgtgagcacgaccatcaaaaccatgtgctcacaacccaccattatcaagttttagttggcaaattaattaattaaccaatcatgattaaccatcatgagctattattaaaccatcattaaataatagtgaagcataagttatcccagtagtgtgctaatgtttctaagcatggctaagcaattatgactaacatctagctgaaccatcatataaagctcaacttgtcaaattacattaacccaaggtatcaaagaataaagtaatcaagaacaaaagggccataataagcaataggttaattccacccaatgacattcgaaaataaatgcaatagttgaatagaaacaatagctttcaatgggatcaacatgctcgaagggttgtttgggatctgtgtgacttgccttgctggccttggaaatcctcaaagtcttctcctgcaaaattggactctcccggaacgtcggaatctaaagagaaaagaacaaaatcaccaaaacagcacataaacaagcatgaacagtatatgtggatatttttaacatgtagatctcaattttagaaaaaattagagacttgaaccaactaaatccgagctaagatgaattagttatgaattttcaaagattaaatcgatttaaatcatttatgtagattttaattgaattatgacgcaataattaattatttttgaaaaggaaaagggaattattgcatcagcgggtcgggtttacggtggaccgggtgcacggcggcggttcatgaaacggacggccgagatcgatccatccaaaatggacgaccgagatccatcggtccacggctagaccacgagggacgacgacgatgacgtcagtgacgacgtcaccactggcagcggcttgggcacacatgcttgccggcaaacgatggcacggcggcgcgaatggagggcaccgaaacgatgcgggcatcgctgcgaactcaccggtgaccaaagcgacggcggacgagcaacggacgacgtcggcgacgaggaaaaggcggcggcgaccttcggcttgacgacggcgacggcgttccggcggtcaacggtgacggagaaggtgcggacggagacagcaacgagacggcgatcacgacggtggccttcccgagtggtgacaacgaccggagcgacggcggcgacggcggctcaaggtctcacgcggaggcggcgctacatacggcggcgggctaagacgagagtggcgacgggtagaggggagctcgggggtcaatttataggggctagggagcggcggcgaaggcccacggcgaccggcgacgggaaggaaagtttagggttcggaggagagagatcgatccgaatcgaactcaaatccggcgatttccaaagcgatttagacgatgttttcaaaagggaaaaggtagagtggatcacggggatcctttcccctcaatcaatttcaccggaaacggaaaggggcggccggatttggaatggcggcggcggcgcagctcggctagggtttcggcaagaggaagacgacgactgacgggtgggactgtcacgcctaaaactcgtctaatttaaaaatgcgttgtttaaatcatttttataaattattttaaaagcctacaagttaaactctaattatctaggtaaattttcaacataaaaatgggctagataaaattttattaaatactttgcttgttcctctattttctagatttttctgggaattatttgagcaagggaagtattttaatatttggaacaacatttcacaaaatattttaattaaaaagttccaaaatccctccttaaagtcattgggccattttcggcccaacattttccctctccccgcggccaagccagcccaaaaccggcccaacccgtcgccgagccgccctcccctccccagccgccgacaggtgggacccacctgtcggggtggtcttccacctccggccgacctcaggccgagcccgagccgggcgcgccgcgccgtctcccgtctccgattccgcctcaatctctccacttttagtccggttttttgaggggtttttatcctctcatcctcctctatctttcccctcaagaatcggagcaaatcgttgagtattttgcccgaatcgagttcgtttcggatttatccccaaaaaccgagtttagattttcccggagcgatttcttgcgggaggagtctgatctcttcaatccaaggctataaataggaccccctagtcctcctctttcgtttgccccctctcccgcgatctcccgtgcctcgtagcgccgccgccacgtgctccaccccgccaccgtcgccggccatcctccatccgcgccgcgccgccgcctccgccgtcgccgccgcttgccgccgccgccacttggtgcgccaaggtgtggggaagcccggccgcacctcccccttcgccgccggccgccgtagctcaccgtcgccggtcatcccgagccgccgccgacgccccttcgtcgccggccgtcgtcggtcgtcgtttggcacgagggtgagtaccgttgggttcgtcgcgtcgtcctctacgtgtacatgccctccaatttcgcagccgaccatccaatctccggcgaggtcgccatcttggtccggccattgatgatgtcatcatgacgtcatcatcgttttttttctttttccctttttctaatagattaaatcttcggaaaatcatatctaaatatccatagatccgtttcaggtggttcaagttgctaaatttttctaaaatcaagatctacatgttaaaaatatccacatgtactgtttatgcttgtttttgtattgttttgttgattttagtatttttgctttagtttctaacgttccggaggagagcgtttcggtcgaggaaggttccgaagcgtttgcggaagctcaaggcaagtcacacagatcccaaacaaccctttgagcatgttgaacccgtttaaagctattattttatttcaactatgcattgttttcgaatgtcatcgggtggtgaacctttcccaattaattaatagccgaagatgattttattttcctatgcgttataatttgattagcatgaaccttatatattggattggttcagctaaatgctatatgtatatttgcttagccatgcttagaaacattagctaattaaaggggttaaatatagattatattatattattattattaattatggttatatttaatggtagctcacgatggttaatcgtgtgatattaattaattgataattaaaacctggttaaggtgggttgtgagcatatggttctgatggttgtgctcatgacaattaaggaccggttcgcgagctactgttgtgaaacatttaccgtgccaaccacaagccagcgtgggcaacgactttatcttttgtacagcatgattcattatagtgcgccagactgtgaagcggcgagaagtccgtgggggtcgatggggagtccattgcctctggtttgagggggagattatgatccaggaacggtgcattgtggtgagttgtgttgtgcgaggggtattgtcacagttcctttccgagataccgtggtggtactaaggcgcatggtaacatgttgtgggattgtgtcttgtgggtacagtggtacacctctgatcagagtttaatctattcgaatagccgtacccgcggttatgggtgagttgaacaatgtttttcgtgaatagtctcacattattcattaatggtaaatgtgttaattaatttgactcctggtttggaatggtatattcctggtttggaagtttggtttgttcaaccggggttggttgttcatatgaggttgggcctatgcaacacgggtgtgttgtatggtgtttatttaatattgattaattatccaactgttttattattctcttaaatatttattaaatgctgtttatgcaaatgagctatattatgccatcctttgttatcctgtgcacttgcatatttgctgtgtggcttgttgagtatgtgatatgcttattcttgcaatattcaatcatcagaagaggagtatctcagcgaaggtgatgatctggaggattaagcttgttcttggttaagatgcctgtggagtggaatcgccatagctgttccgtagtttgttttagttttaatttccgctgcgtagaatgttattctttgagaggaactatccacctctgtaattatttattatttgtgaatattaaatagttatttatttgtattctattatcaacttgttattgtgtgcctcggctgattcctggacgagggtttaacacacatgtaagtgtttggaattttggatagaaattccgggcgtgacagggacccacctgtcagcggcggtcgcacgcgcgcgcgcgggcggcgctcggcttgggctgacttgggccaagggagagagagagagagcggtttcgtcccaaaaccaaaagggaattttaaaaacctttttccatttaaattattcattaaatgaaattccatttattaaaaatacttccttagctcaaataaatcccagaaaaatctaggaattatagaattaagcaaagtatttaatgaaattttatctggccccattttatattggaatttattaattaaaattagatcttctcttctaggcttttaaaataaattctaataattccaattaaacaacaatttataatttggagatttttagggtgtgacaaacctacaccccttaaacggaatctcgtcctcgagattcggaagaactggcgaacaaatgcggatgagttggctttaattcatcttctcgttcccaagttgattcttcttccgagtgattactccattgaactttacagaaacagataactcgattcctggttcttctctcatttgtttccaaaatacggattggtttctcaacatatgttagatcctcttggacttcaatctattcaagatttgcttcttcggtaggtacccttaaacactttttcaactgtgacacatgaaacacattatggacacctgctaaggattgaggtaattctaactgataagcgacctctcctcttctactgacaatcttgtaaggtcccgcgaaacgtggtgccaattttcctttggtgtgaaagcgatgaactcctcgaagaggcgtgacacgaaggtacacataatctccttcttcaaaacttagatctctgcggcgattgtcggcataactcttgtgacgagactgagccacacgcaatctttcttgaatgattttaaccttttcttctgcttccctcaggatatccgtcccgaaaacctgacgttctcctgtttgatcccacaaaagcggagtgcggcacttccgaccatacagtgcttcgtaaggagccatctggagactagcttgataactgttgttgtacgagaattctgcgtaaggcaaattcttatcccaacttccaccgaagtctaaaacacaagctctcaacatgtcttccaaaatctgatttaccctttcggtctgcccatctgtctgcggatgataagcggtactaaaattcagcttggaacccatctcctcctggagcttcttccagaattttgaagtaaattggctacctctatctgacacgatcttcttaggaacaccatgcaaacacacaatcctggccatatataattccgctaaacgacttccggaataggtggtccttaccgggatgaaatgagccactttggtaagtctgtcgactatcacccaaatagagtcatggcccaatgatgttctgggtagaccggtgatgaaatccataccgatttcctcccacttccattctggtatcttcaaaggctgcagcaaacctgcgggttttctgatgttctgccttgactcgctgacaaacgtcacataccgctacatattctgcgatctcacgcttcatacttgcccaccaaaatctttccttgagatcctggtacatcttagtactaccagggtgaatggagtataacatatcatgggcttcctttagaattgcatctttcaaatctttgttgtctgggacacagattctctcacccaaccatacagttccttgctcatcttccaagaaaccgatagctttacctcttttcatattctttttgatctcatggatatcgggatcattgatttgagcttctctgatgtcacgccctaaaaatcgcctaatttaaaaatacattgtttaagtcatttttagaaattaaattaaaagcctacaagctaaaccctaataatctaggaaaattttcaacataaaaatgagctagataaaattttattaaatactttgcttgttcctctatttctagaattttctgggaattatttgagcaagggaagtatttttaataattgaaacaacatttcacaaattattttattgaaaaagttccaaaaacccctccttaagttgttgggctgtttttggcccaactctccctctctcacccgcggccaagccggaccagccggcccagccagcccgccagccacccctccactcgggagaccgacatgtgggccccacatgtcggacccttccctaacctcaggccggctgcaagccgagcccaagccggccgcgccacgccgcctcccgctccaaatccgcacccaatccggccctttttcttctgattgtttaggggtttttatcctctcatcctcctctatctttacccccaaaaatcggagcaaaccgttgagtattttatccgaatcaaactcgtttttgagtttatctccaaaaccgagtttttgttttctcgggccgatttcttgcgggaggagtccgatctcttcaatcaaagtctatatataggaccccctagtccccctctttcgtttgccccatctcccgagctttcccgtgcctcgtagccgccgcgccgccgccgtttagctcaccgtcgccgccgacgactccatccgcgccgcgccgccgcctccgtcgtcgccgccggtcgccgccaccactgttaggtgcgcgggagcgaggagaagcccggccgcccgtccctcgaagccgccgaccgccggtgctccgccgccaccgccgaccgagccgccgccgccacccacctcgtcgccggccgtcgtcggttgtcgttagccgtgttggtgagcaccgttgcggtcgtctcgtcgttctcgacgtgtgcatgccttccaaatccgcagccggccgctctagctccggcgagcttgccatccgagccggccaccattgatgatgtcatcatgacatcatcggtttttctttttcccgattttctaatagattaaatcttcggaaaatcataactaaataaccgtagatccgtttcaagtggttcaagttgctaaatttttctaaaatcaagatctacatgttaaaaatatccacatgtactgtttatgcttgtttttgtactgttgtgttgatttttgtttaattgctttagtttccgacgttccggaggagtgcgtttctgttgaggaatattccgaagcgtttgtggaagcccaaggcaagtcacacagatctcaaacaaccctttgagcatgttgaacccgtttaaagctattattttatttcaactatgcattgttttcgaatgtcatcgggtggtgaacctttcccaattaattaatggcctacgatgactttattttcctataggttataatttgattagcatgaaccttatatattggattggttcagccaaatgctatatgtatgtttgcttagccatgcttagacacattagctaactaaagggattaattatatactatattatattatattgttattattaatgatggttatattaaatggtagctcacgatggttaaacgtgtgatgttaattaattgataattgaaacctggataaagtgggttgtgagcatatggttttgatggttgtgctcatgacaattaaggaccggttcgcgagctactgttgtgaaacatttaccgtgccaaccacaagccagcgtgggcaacggctatatctttcgtatagcatgattcattatagtgcgccagactgtgaagtggcgagaagtccgtgggggtcgcaagggagtccattgcctctggttttgagggggagattatgatccaggaacggtgcactgtggtgagttgtgttgtgcgaggggtaatgtcacagttcctttccgaggtaccgtggtggtactaaggcgcatggtaacatgttgtgggattgtgtcttgtgggtacagtggtacacctctgatcaaagtttaatctattcgaatagccgtacccgcggttatgggtgagttgagcaatgtttttcgtgattagtctcatattacacattaaatggtaacggtggtaattaatgtgactcctggtttggaatggtatattcctggtttggaggtttaatttgttcaactggggtaggttgttcaaatgtggttgggcctatgcaacacgggtgtgttgtatggtgtttatttaatattgattaattatacaactattttactattctcttaaatttttattaaatgctgtttatgcaaataagctatattatgccatcctttgttgtcctgtgcacttgcatatttgctgtgtggcttgttgagtatgtcatatgctcattcttgcaatattcaatcatcagaggaggagtatctcagcgaaggtgatgtcctggaggattaagcttgttcttggttaagatgcctgtggagtggagttgccatagctgtttcgtagtttgctttagttttattttccgctgcgtagtatgttattctttgagaggaactatttacctctgtaataatttattatttgcgaatattaaatagttatttatttgtactctattatcaatttattattgtgtgcctcggctgattcctggacgagggtttaacacacatgtaagcgtttggaattttggatagaaattccgggcgtgacatctgacttgatcaatgagagtaggcttcgcatctaaagctgcaacaaagcctctactgacaattcccagattcaatctttcaaattccttgcacaattccaatggcaactgtcatccttccatagcattacaatagcctttcctactaagggcatctgctacgacattagcctttcccgggtgataattgtcacaccctgaagttctcctcccaagcctaaaattttatttataaatgaccctaagaaaatgccggtgcaaagcatgagaaaaccctaagaaagtaatacaaataataatcgaatctggcatgtggaatttttcttgagttctacatgtctaaattcgctaacaagttttttagtggaattttcagagccctagaaataattttaaccaattaaaattgagcaagcaatattttaattccagggaaaatccttttctttctttttctttttctttttccccttcccttttcgaatgggccgccggcccattctctccttttccccctcccagctgggccggccgcaggccgaggcccagccaggccgccccgcctccctcctctcccggggtcgccgacaggtggggcccacctgtcgggtccttccccaacctccggccgcccctccacgtcaccgccgccgccgaaaccgccgccccgcctcctccgggccacttcggccacgccgcgcgtgcccccgccttccccgctcccacccctctctctcccgcccgcgccctcaaccgagatgggtgggattcgttttttgaatcccgccactctctctctttctctccacctcccacctcccacgtcgccggcgaaatcgggcgtgctcgggccgttcccgaccttccagcccctataaaatccatccccgagccctcctcgtttttccttttgccgcccctctctcccgagctctccatcgcccccgcgccgtgcaaccactcgccatcgccgctcccgctactccggccgccgctagccgcgctagggtcgccgccgcaccgcgccgccgtcgccgtcgggttcgcgaggccgaactccacctcgtccgccccttccccgtcgagattcgtcgccggaatccgcatcccctcgcgctccggtgagctctacctctactgccgccttcggccatggatgccggccgccgtggttcatctccctccctctaatctctctctcttgcttccttagggcatcccgaagctcgtccgcccgtcgccgccgtcttcccgtggctcgccatcgccgttagccatcgtctccctccgcgccggccactcgcggtgaggcatccctcccctcttttccccttcctctccctcctagtgccgcgccgccgcttcaagtcatgcgccgtcgccttcggccgccgccgccgcctcccgtgccgccgttcgccgtcgccgtcggccgcgtgccgtcgccactagccatggctggccgaccggctttgatgccgagccgagctcggcggccgcctctaccgccaccgcccgatcggctcagggccgatctgggccgtcggtcccgtggaccggcggtggaccacccgcgtgatcccggtccacattggaccgccccccttgagccactgccgagtggggcccgtgtgccggcgcccttccccctctctcgcgagccaccgaccggtgggacccgcctgtcggcgccgccccccccttgatgacgtcagccctgggaattattgcccaataaattatttaaggcctttttgttatagtaataaacacagtgaatcttctgaaattcataactaattcatccgagctccgtttaagccccttcaagtctcagtaaatcaagaaaaatgtgtagaatccattaaaaatggttttgttctctgtttcagtagacttatagcctgtttgcattgtttgccttgtatgtcgttagattccggctcttccgacgctccggcgtacttcgaaatagtcgccgaggttcctccagcagcagagcaaggcaagtcatgcttgtcacttgatcatgttgatcctacattgcaaatgttctattgttttccttcaaatagtgcatttgttttgcaataacactatgggatgtttacctattgttacagccatgctattttggtaccttgctcctttgttagcttgggttatgacatgaatagactttggactaggaattgcttagccatgcttagttcaactagcacacaatggggaaaactcatttaaaatatagactgtaggtttatatgataatgttggattaatcccaccgctctggtgttggttaattaaaatgaatcacatggtgggctatggttgcatggttttgctagtcgcgcccatggcaattaaggaccggttcgcgggaaaccctggaagaactcctcgtacttaccacaagccagcgtgggcaacggctgggcttgtagtgtagcttttctctagctgacgcatccaggcaagggtgagcttgatggagtggggcgggccctgcgacggcctctgtcgcttccggattcacctaggcacgagaggcgactgcccgtcgcctgctggggacgggggtgaaacctggggtgtggtgtgcttggctagagaggggttatgcgaagggtcatgtcacagtctctttccgatatgtcgtggtggcatgtcggcgcatggaaacgtgtcgtggggctatgtcttgtgggtacagttgtacacctctgatcagagtaaaactattcgaatagccgtgcccgcggttatgggcggtcaaccagactcaccgtgattagactcatcttagtttagtctaatgaaattggatggtataggtggatggttgggcctgttgcaacgtggtgtaacgttggatagtggatgattaatatcgtttaattattacaactattttcgcattcgacttctatttataaatgccagtattatgcaaatgaacctgtatagctatcccttgttgaatccctgcatcatacccccattccggtatgacttgctgagtacagtggatagtactcagtcttgctttattttcccccaaccccagagtgtgagtatgtgtctgatggcgggttctccgaggagtaggcttcgtccgtgccgtcaaggatgcctgtggagtggtgttctcgctgcagttccagtcaaggattagctcctgttatctttctttttccgctgcatttatgtaagacttttataatgtttgtaagacgtggatctgtatgtcaacattgtcgtttgtgtgccccggccggtcctggacgggggttttaatgcacattctgcttggaattctattcgggaatttctgggcgtgacaagttggtatcagagccgaccttgaccgtaggacaagccaaatggaaacctaagggccctctgaatccttttcattgcatatgttctttgcaattggaattgttccgggaaaatttggggatctgttcttgtggttcaagggacaaatcttgttgctcgtttaagtgagatttgttaagacaagtaggtctagggttttagtaaaattatttgagatgtttttgaccgttagttgggatttgatgggcgaaatgcattaggtcttagctcaggaatatgggttgtaaggtatttatgcttttcttgttattataagtatgtatctaatttccccattattttatcgctatgtaagtccgtcttatttattcgctctcatgcaaaataatctatgcataaaatttcgctcttattcgattctcttatttgagtcctttatttttatttaaattggatttgagcatgcattgatcctacccctttgtcttctctagatggccgagcacccacccaaccaccgcggagaaggcatgggtgatttcgtggcagagttggcacgcatgacactggtggtgggctaccccaacgcgccggagtacacgactgttccaccgctcagtggcgagcttcctcaccgtgtccgcttggaggtccatggctacatggggacttgcctcgctaaaatggtggttgaggcgtctggaggcacagcagatcacgcatgtcaggaggcagcatatctgatgatggccagactacgggagcgccacaactacatcttccacgacacggcgtaccggttccaccctcgtcgagccagcggcagtgatgtcagttccttccgtccgacagccggcgagaacgacaccacctttggtcacatgtgcgctgtgatgagggggatggacaggatgcactcggacctgcacaaggcgtccaaggccttgaatgatgggaagcttgtgaggatcattgctctgaaggacgagatagcgcgtctgaagagggagaatgctcaattgaagggtcttcccgcgccaggaggagttcggatccgcactacgccccgcaagtcgacaacggcacccgtgcgcgtccagcttgcgcctaggaacccacctccgtcagcagctcccgcagctccagcagttcccgcagcacctccagttccgcccgcagctccagcagttcctgcagctccagcgccagctccagctcctgttcccatgtcagctcctgcatctgctctctccttcgctcctgcatcagccgtcaggggccccgccagtggaaatggaggttggttgccagctactcccagtggcaaccgcgaccacagcagcagcagctccagtggctcagagccgggcagcggcgagacttatctgccaggctccaggagtcgctcagaaggacgtggtgacgagcaggaggacgccttcgactccaccgaccgcaggagccgttccgagcattaggctggttttccattagcttatcgactgcctagcttctgcttgttagtttgtgtgtttaggttgcttgcttggggtcagtcgacagtcgatatcatgtgcctatgatatggctgtcctaataaggatttttgcttgctgtttaaagtgttttaattcagatcagaacaattgcagtttaaatttctataataaagcttagttcctgagtaactgtttttctccgtttccccgtctgctcttcctccagatggtctacaccaggaatggcacccgcacgacaagcgagggcagcaacggcgaagaacgcgctgatggtgtgcaccccaacagtgattccggcaatggtccgccaccatttcccgagaatctgacgctggcccaagtaatggcacatcagactcagatgatggcagccatgatgcagcagatgcagcagcagcaccagcagatgcaccagaggatgctgcagcacgccgaacagcagcaccagcagtttggtccccctcctcctcagtccaagctgcccgagtttctacgcgtcaggccacccaccttctccagcaccaccaaccccatggaggcgaatgactggctccatgccatagagaagaagctgaatctcctgcagtgcaatgatcaggagaaggtcgctttcgccacacaccagcttcaaggtcctgcgtcagcttggtgggacaatcacgtggccacccgcccgccaggcactgaagtcacttgggcggagttctgtcgtagcttcaggaaggcgcaggtgccagacggggtcgtggcacaaaagaagaggggattccgggcactccatcagggcaacaggacagtgacagagtacctccatgagttcaatcgcctcgcgcgatatgcaccggaggatgtctgcaccgacgccgagaagcaggagaaattcctagcaggcctggatgatgagctaaccaaccagctgatatctggagactatgccgactttgaaaggttggttgacaaggcaatccgtcaggaggatcagcgcaacaaaatggacaggaagagaaaggcggcacagttccggtccaaccaaggaaaccatcagcgaccgcgcttcactctcggacagcagggtggacctaccaccatgatcgtccgccagcaccgcacgttcaagtctagcaacttccaccagggcgccagtggcagtcagaaccaccatggaggtcagcctaaccacggtgcagctccacacccaccagtggcaccagcacagtcaggcccgtccgcgcaagccaaggagactggagcaaagccagggtcctgcttcaactgtggtgagcttggccacttcgccgacaaatgcccgaagcctaggcgtgccgggtcaaagtttgtccaggctcgtgtcaaccacgcgtctgcaaaggaggcgcaagcagcaccagaggtcgtactgggtacgtttcctgttaactcaatccctgcaacagtactttttgattctggtgcaacgcattcgttcatttcaaagaagtttgtcaggatgcatgggttaataagagaggaacttagcacaccaatgcgggttcataccccagggaatagctccacttcggtacaattcagcccttctataacaatagaaattcaaagatcaccatttctagccaacatcattcttcttgattccaaagacctagatgtcattcttgggatggattggctgaccaagtttaagggagtcattgattgtgcgaatcgcacagtcaccttgactaacgagaagggagaaacaatagtgtataaatcactagtctcaccaaagcaaggggtctccttgaatcagattgaggcggaaaccccagtggtcaccgaggggatgaattcgaggaaattggaagaaattcccatagtctgcgagtacccagaagtgtttcccaaagacctcaccaccatgccacccaagagagagattgaattccggattgatttggccccgggaaccgccccaatctacaagagaccgtataggatggcagccaatgaactagccgaggtcaagaaacaggttgatgagcagctgcagaaagggtacatacgaccaagtacctcaccttggggtgctccggtcatttttgtggagaaaaaggataagacgaagaggatgtgcgtcgattatcgcgcactcaacgaggtcacaatcaagaataaataccctttaccacgaatcgatgacttgtttgaccaactgaagggagctaaggtgttctctaagatagacctgcgatcaggctatcaccagttaagaattcgggaagaagatattccaaagacggctttcaccacccggtacgggctgcatgagtgcacggttatgtctttcggacttaccaacgcacccgcattcttcatgaatctgatgaacaaagtgttcatggaatttctcgacaagtttgtggtggttttcatcgacgacatacttatctattcaaagtctgaagaagaacatgagcagcatctccgtctggtactcgagaagttgaaggagcaccaattatacgccaagttcagcaagtgtgacttctggttgacggaagtcaaatttctgggccatgttagacttctggttgacggaagtcaaatttctaggccatgttattatagctcagggcatggcagttgatccatcgaacgtggagtcagttaccaaatggaccccaccgaagaccgtgtcgcagattcgaagttttcttagactggcgggttattaccgccaattcatcgaaaacttctccaggatcgctcgacccatgactcagttgcttaagaaagatgaaaagtttaaatggacagctgagtgcgataagagctttgaggagctcaaaaagaaattagtatccgccccagttctgattctgcccgaccagatgaaagatttccaggtctattgcgacgcatctcgccacgggcttgggtgtgttctaatgcaggaaggcagagtggtagcgtatgcctcgcgatagtcgcgtccacacgaagggaattatccaacccatgatctggaattggcagcagtggttcatgctttgaagatctggaggcactatctgattggcaaccgctgtgaagtatatacggatcataagagtctgaaatacatcttcacccaaccggatctaaatctccgacaacgaagatggttggaactaatcaaagactatgacatgagcattcactaccacccggggaaagccaatgtggtggcagacgcattaagcaggaaaagttactgcactgctctatgcatcgagggcatgtgtgaggaattgcagcaagagtttaagcggctcaacgtgggaattgttgaacacgggttcatagctgttggcggatggcatgagtcccttcgaccgaatctgccgaaacccatggcgaagaccacgagccaaggatgatgcgaggcgaagggtcgcgtgagtgcatgccgaagaaggacgacttcgccaggaccggttcgccccggcatccagcccagagaaggacgacttcgccaggaccggttcgcccccgcgagggccgaagtagccttctcggcccaccaagcttagaggccatagggccggcgatcgcccgatggcccatcaagggcccatgagcccccttgacgttatgtaaccctgtaaacgtccctttcataagggcaactatgtaaattcctcaatacaaactagaccctagaagtgagaatctgtaacggggctataaatagcccccaagggccatgtaataaagagagagaaatccaagaaatcaatatacttcgtttctttccaaccaaggccaacgatagacaataactcccccccgaacacagcttacaactttcatcgtactgtgctctccaaagagcaactcttctcaaaatctcaaaacaaaaggtgctgagttggaatcccattctaaggattcttgtggttccggggaatccagctacaggagaaccaggaacggggagctctcccctttttccgcccgactctttgatcttaaacttaagaatgctggttttaagaacgagtgattgcccttctccgacccttactgcccaaccggagagcggacggctaatgtgttccacttattgaacagggtctatggtcggtccgtgacccctggacgccgaaggcgtccttggggtgatctcgtagttcctacggggtggagataatggggtcggtccatggattttccttccttttgccacatttcgctcaaagggttgaagggagatagtgcatcaagctattcgcaagggccaacttgatcctcttccccagggatcccagatgagggaagcctaggagagccgccgactccaactatcgtccatgtacgatccatactagatctgaccaactgcccatcctacctcctctacctttttgacagcccatctttttgtctcagtagagtctttcagtggcatgtttcagtcctcttccccattacttagaaaaagtgagccaccggttcaggtacaagatactaccattaccgcctggacaattagacagccaacccgtaatcgcaacgacccaattgcaagagcggannnnnnnnnnnnnnnnnnnnnncccccgagccaagtggagtatgcatgaaagagtcagatgcttcttctattcttttccctggcgcagctgggccatcctggacttgaaccagagacctcgcccgtgaagtaaatcatcgcccctacgatccaaccaattgggagagaatcaatagactccttttcgggagcgattcatccttcccgaacgcagcatacaactctccgttgtactgcgctcttcaagtgtgcttcttccccttctcccccttaccatggcaagtccttgggaaataactccgatgggcagaaaaaggaaggcgttaagagaccctcctggcccaaccctagacactctaagatcctttttcaaacctgctctgctcccatttcgagtcaagagatagataaatagccacatcccattgcactgatcgagggcgctcgtagtgacttagggagtcgaagaccgggaaggggcttatttataccaagcattccttttatggctagatccaaccttctggtccctgcggaaaggaaaaagaatttcacgttcttcctttcaggaagggaggattagggaagtcctattgattgctgctttcttcagaccgccgggaaaagcatgaaaaaaaggctcgaatggtacgatccctccgtcaccccagaatgaaagggtgatctcgtagttcttggtctgtgaagatgcgttgttaggtgctccattttcccattgaggacgaacctcaacctgtgctcgagagatagctctccatacactgataagggatgtatggattctcgagaagagaggagccgtagtgccccccccggaccgcccggatcccacgagtgaatagaaagttagatctacatgggatctcacctgaatcgccccatctatcctcctgaggagaagtttgtttggtttcaaactccgattcaaacaggaggagtacgccatgctaatgtgccttggatgatccacatcttcgggtcaggcgctgatgagcacattgaactatccatgtggctgagagccctcacagcccaggcacaacgacgcaattatcaggggcgcgctctaccactgagctaatagcccgtcgcgcgggcctccctttgggaggcctgctacgccaaaagcgagaaaaactccatccctttccttttgacatccccatgccgccacaccacacggggggggggggcatggggacgtcaaaaaggggatcctatcactatcaactaatttgttccgacctaggataataagctcatgagcttggtcttacttcaccctaaacgaaagaagacttccatatccaagtttagctcagacgtagctgccttctttttgggcgtgaagcagtgtcaaaccaaaatacccaataagcataagcattagctctccctgaa

SEQ ID NO: 6274 - DNA, 21874 bp, Oryza sativa
gtccctgtccaagaaaatcatttctgtagtagtgattcatgaagttccttctctacttgatcgatccattttctttgtttcttttttggcatagatcgaacacttggtggtgcgctcatcggcgttcccagtgtccagagcgccaccatcgccccactttgtcattcccgtcgactcgaatcatctccggctgtactattgcgccactgacgtcgcctaggtcccaggagaacgacgcccacatatgatcaagccaatacgccgccacgaacgccgtcggtcgccgttgctctcctgctgcctctgcttctcttgccgccgagtcaccgacatgtgggcctggctgtttagccacttcattaggtgctaaggactttaattagtagaaatttaaatcttgtaaggttctttttgtaaaattgctttgtttgccatgtggacttatggacctaaatgcaattcacctaatgcccagggacttttttgtatagggtttagggcttaccctaaaacatgaaattactatttcatgcattcattacttgatataatagcttaatgagtatattgtactcacccttgctttaaccccctctttcagaatcaatttggagtttttgccgaagccaggagtttaatcagataaattggtttcattccaacttagttcccaagtatagattagatagatggtttaattctatagcaaaacattagacttggctcatcctatagcttctacagtaatagttagccactaccctattatttcatgtaaagaaatctcctttggagccttaatcaaatgtatgcgatgaagattcagattgttgaacctgtatcaatctactaatacaggggttgatacagtttaaatatgtcggttaccgaatctttaattttgggacccgacatggtgtgtgggtgggggcccctgcgatttgggagcctagagcggccgtaccgcttgcgccccctcccccctgaggcggccctaactacatgggccttaaaaggccaaatggcatcttatgacgaattctgggcttgatggcgacgaaaatggatgccatagactctatgacgacagaaagatcgtcactagattaatgacaaaaagataagctttctttatagaacgccattagagacgcatgacaggtgacgaatcatattcgtcacacgaatgtcacagatttcatagcatgacttgaaattaaatttttatgacgtaaatgagcgtcacctatcataagattcttgtagtgatggcttgtttggctattagagaggcagtttgagacatacagcacacagtttcataccgtgtgcgtgcctagttggcaactggatcctagtagatgcaaattttgaatcattcaacccaacccaatccttcttctcttaatcttctcttcctacacttgttttgtgtttgtgtgtgtgtgtgtctaagaggctagtagagttagctatcctaaaattttttgcacgttgcagctacaaactgtgctgctggcttggtcgtcctctgcttcaacattaaagagggagctaatagatcggtgattcactttggtttcttggatgctatccagccacgtcaccatgcatgcgaattttgtggatggagtcagagggtctgcatgcacggagctgatttaattaattaacttgttgccagctagtacctaattaagcatgtgtgttaatttattattaattactttgctagtgttaatttatccttagtttttttattcgaaactactagcatgcatgcctttgtcagagagagaaaccgatggaatatcctcgtttcaaaagtccatgcataatgtgcatgctgtgtggattcgtgctgtattttcctgggtagataagaccaaaaaatcccacttaccaactaggttttttaaaagtctggtacatcgtgaaccatgctgcttcacgtggtcggaactatatacgttaagatcaaatgtgctcaacgtggtctggcacatcatggaccatgctgcttcatgtggtcggatctagatgcattaggaataatcctttttgtagtagtgaaactaaagaacttcacttgccaactacttcctctatttcacaatgtaagtcattctagcatttctcacattcatattgttcctaatgaatctagatagatatatatgtttaaatttattagcattaatatgaatatgggaaatgctagaatgatttacattgtgaaacggagggagtagtttttttagagtctgaacaaagatgaaactttttggaaaggtgctcctgatgaccaagttcaattcaccaactgaaatcgcacactggatttacatgaaaaatgcgagatagacaaaaatgatttctttcggttctaaattaatactcccggccatttgggaggagcaatatgtacatatgcattcatcacacttcagcttttttgtctttttttttccttggagttttaagaatgctcataattagggcatgcaagttgatccattgatatattcgcaatatttgacgatttttttttcattttaaaaattgttgacgatattagcttaattttggtatggaaaatatcggttaatttatccccaatttttatcaagagagaaaatgaaccatgagagttggggtgctaattaaccacaagcagatattcattttaatttgtggtatatatatatatatatatatacacgagcatgcatgtaaggatggaaatatgtgaaaaatataatggtgctagtagatttgtctaaaacacttccataatactatgatcaggacactcgataaggacaaagttcaattttagggattgtgtcattatcaaaattatcaatgaataattggccatagggccgggattagcaagggtctactactgtcctgccatttcattaattaattagattaagtccccgattccttgcatcccaaattggcctacgagaaccgacaaaaatcgcaagatgggaggattgtggtaggttatcttcaccaactgtgcctctcaagtggccataacatattagccagaaggataaataatcatcaatctgccttcacagttttgatcatctcatgagacatatatataaaccacccattagcaagagtctcctaggtgaattaattaactatgttgatacacatatacttaattggtataagaaaaattagtggtcgttaattagtataaaagcatcaatcaaatggagactattagctagctaggagaccgggcaagcaaagcaaagcattgatcttgatgaatcctccagagagattaattgcatattgccagttcctcctgacctattatatgcatgcaagtgctctctgtacttgtgcggtgcaacgacgagcaagagtgcgtacgtttatagtagaactgagggggtgcgccttatatacaccggacgagcaacagtgcgtacgtttgtagtgacgtctccaattttagtttctatggtagtaaaatattcgacgtttgacacctcaaactgcagaaaaactggagctgtgaaatgttttcttttttcatatgcgtggagctctaaaatattgacagttttgtttttttctataaaaaaagccaagaagagttaacgacttgatgggtaggcgctcctggatggagggagatgagcttaaaaagttgtagtaaatggacccatgcagtggaaatgcggaatggagtggagcagtaataaaatttaaaatgccacgcgcagggcatctcgaccacgacaggactctccttgagatcttcaaacagtgtgtgcttgctagctgaactgcagcagtggaacagtaataaaatttaaaacggatgtacagtgttcacagtggacgagtgtgctctgtgttctctgcatgtgaatagatatggcgatctctgcttgtgaatagatttggcgagtactattactgggtatacgtggttaggacagatgttagtttgttctgcttgtttggagatggatttgggagcaaatgtacatggttagggcgcaaatgttagtttattttgctgtggaggggagtgggttttgctagaagtagacccatgaattttgctattccaaaattcctcaactagctatcagcctcatcgtttggcatattttctgaatatgccaaacggcatatttgcaaacgaaaatcaatttgtgaataaaacttttatatatgtgttcttagcgatctaaaagcaaagggtgaaaaataaacttcgatgaaaaaaacctcaaaatcagctccaaatttaatgttaaaaaaaatcaaattttggctgataagcatatgaatatgccaaacgatgaggccctatatatctagctccaacaaatctgtgatgcctatatctcactagtcttgctatgtgctatgtcatgtacacgtgggtaaatacctaatttatgaattttgctgtctcatcatgattatggcaaatatacatatacctaactcatgaatttttctatgcctacttctcaccatttatgctatgtctaagctagaagattttgctatggccatacctactcttaaatttttctatgtcggccttgactcagccgccccaatagaagtgacgaaactactgttgttgcaagagttggattccttcaagaaagtgatagatgaatctgaggcatcaagggagcagcaatcgaagaaaattgaaagtttgattggcctaaatgctccatattttgctctgaaaagttgacagttatgttaccaatcatgtatcattgtcattttcatagccttcatcatggcgttgcgaatattgtgaatattccaatggatcaacttgcatgccctaagtgtgagcattcttaaaactccaaggtaaaaagtcaaaaatgctgaagtgtgatgcatgcatatgtacatattgctcctcccaaatggacatcatgcaggatcgggactggacaacacattaaaggctctcatgctacacgcttcttgcagctgtagttaaacaagggcatcaagcggtagttcgataacaataagattcattggccccaacatacccccatccattccaataaatatggcacgcatgtattttaagatttatctttaaccaagaattagtttaaatttacaaagataattgatagaaaattagcatcatttcaacgtgtttttcaatacgaataccacaattctatttatgcattactagtcatcaacctgtgcacttgcatgggctaaaaaaattatgtgacatcaattaactaacgtggaagctttattggtgcatccaattactaaatatatgatttattctttgtttctcaattctttcggtcaaaaacgtgcatgtgtgttattcatagaaacgtatgtagtatttgtaagaagtacaatatcgaatttccaaaaggtttcgaccttgtgcgataatatacacacacattaacctacataggcaagctagctagacctagaaatataccatttctaaacctattcggtcacttactcacattggggagcctaactaaactaacatggactcacatggcatgcaagccagccatggtactaactcgtctactacgccatagtacgctacaaacacaactaagttatcttatgaaggactactcaatagtacacttaaaacagtgttactcgttgccttttatcttcatctgacgggtatgagctaagtgtatctgaaaatcatctccttctgtccatcggcgaaaacgtgcaaatttaaaattccttggtacgcaggactagatatgaagagtttgttcagaaattgtgcaacaaacatgtacatccatcaactatatacatgcataggatacatacatacaatgcaggtagccatttgcaccatatccataatatactagtaggcagccatccacaccttatgcataccaggacgatccatttgcacattatccacatcatcacataacgcttctgcctatatataggagcagcagcttacattcaagaatcacctctcaacacacaactaagaaacatagctaggtaaccagggaaggtagcatcagcagcgggaggcaatggagggaaagaggactaccacttcgatggtgatcatgtgcatggtcatcttgagcctcactgtcgactacgccaccgcagcacagtgcggctgctgcatatcctctcgagcaaaagcatgttgttttggttgtattgctgctggtggctccgactcagtctgcaagaacacttgttgtttcccatgtattctggccgattctggtaaattcactgaagtcactctattcaatgcattcttatatgtagagacagactttgtagcatatcgtggactaatacatatgtgtgtctttccatgcattttcctcaatgtactttgttgacttcacttccaatctcacgactttaggcatatatcttgcaacatgaagacatcttatgctctacttccactacaaaattaactaatgcgctaatgggatttccatattttaatttcacagttgttgctaagatggacgaaatgggagttcttgctaagatggacgaaatgggagttcttgctaagatggaaggacaagcctaaaacaacatatttgcattgctaccagtcttaatgcctttcataagaatatgttgttttgcttcaagttatggcctagttatgttaatgtttatctccaataaattgttgaccatatggagcgatctatagtcgatccatctgttggtcccaactatttgtatgtcgtgcatgtgttcgctcacaagcatatttaatttctcttgctgcttttaataaggccatagcactatccaatgtatcatctgttggtctctgaccttagcaatttattgcaacatgattattattatttgtgtgtgcatgttctttacttaatttattcttagcggatttctgatgtttttgtgagttttagactatgggagataattaagattgtcatgccaaagagtattccgaatcctactaggaaggcatagggtggggggggaggaaacatggtcaatttctcggctgctatcacattccttgttttcttagtcttgggagacttatagccatactaaaggcaatacagtcgaggaatgacaaccttactcacaaggacaaatagtcattaaaaaattatgacagcactaaccatatctgatttcagttcacgaaacatacatttaaatttaggcagtattacggagaactaaatcgacaaacaacaaaccatacttcattgtcaaaacaaattgccttcaatgtactttacaaattctcacaagatcatatttgcaatttttcctaaactaattaaccaagagcaaatatgcaatggagaattccacatataatttcacagcataactacataatacaatatggtataatacacatatgcatactagggcctacggcaaaagaggaaaagatcaatgcgcatgctaacttgtgtataatacagatatgcgcagtactttgaaatatgcataccaggacatatgctttagttcactccattcattcttgcactcttgcacattcaacatcaatcagatctaccaagcattcttgcacattcaagcacaagcagatctaccaatgaatcactaacttatgtagcaatggggggaatcggaggagaattaaaacctttcctcgtcagacgactgaaggacaggaggcggcggaagattcactggctgcacaccatgccgcgcgaatccctgaggtgtgggcatcgcatctatcagcaccaacgacatcggcagtggcaggggtggactagggctctttcgtagaccgatgtaaactagacttattggcttcgatttagggaggggagggaaaagagatagactttacccggctggcctttgggcctgcgtggagagggataggagttggcttggtttcagccaaaagataggaagaggattttaaataggttgcatatgcatgctttgtctaaagaaaattcctaaaaataaatgaatcagcaataaatcctaccaaaattcccataaatactaaacaacaccctaagctcccagcaattttagtttgaatttatcacatcaattgataacccaaataaatccttcaacacagctaaaaatctggaaacagcataccaattagcctactttgcaccttcaccgaaattaaaccataaatcctcttgcaaaatctcaaggtcagaatgttaaacatactttactctaccatctggtgcaatggcttagtctaattcgaaatgtaaccacatgaaatgagagccataaattacgtaaactttggaacttggcaccttgaaccatcaaatccttgtctaccttgccgtctccctgtcccccacacccccccttaattctaaattaaatgtatgagagaaagagagtaatatagtttggtgtgatagtgccaacacatggaaaatttagagcttctagttctctccttctacatctctcttaaatgtgggaccaaatccttgtggggcccacatatcatacaaccatagccaacacatcatctgctcttctctcatttaaattttcttttatttctcaaaaggttagagatgggtttaaattcaatttccactcaaaatgccactctaccactccaagccttttaggaaagatctatatatgggcccatttgtcgtccaaacacagcaaccaaccttggtgaatcatctctttgatcctaaattattttttcaaagagagaaagaaagagagagagggagttaaagtccaatttacacccaaacttcaccatacctctcatcttctcattggaaacatctacatgggaccactacacagccactcatgctaggttgagtgaagtacaagtgggatcatagcctcaaatcactgccaactcctttaaatcgtttctaccgctcatgttgacacctagctctcactttccacctttcctttcaccattcattactacaaccaagatttttctgtgagggctaaaatgatttttgcgtgtgggtaaacggcccgcatacacctaggggtctaggaaaataacgatttttgcgtgcaggtggaacaccaccacgggaaaaaaaaacctgaaaaaacataaattttctttaaacatgaaaccctagaatctggtggtggcgccgccgctcttgcttgccgctgccgcctcctcgtcaacatcatcatcgtcagtggcggcctccgcgccgctcgccttggatccgtgctcccctccggccgcaccgccgccgacgcccctcccctccgccggatctagggagggaaggaagaggaggggaggggagctggatgccatgcggggggagggcgcccggccgccggatccgtgcggggacgaccgccaccactggatttttgcgttgatggccgccgccgctggatccgtgcagggacggccgccgcccgccggatcccacgcccaccaccgccaccacgtggaggaggccggcgcgtgcctatgcccaccgtggctgtcgccgcgcgccgccgccgctgccgccatcaggaggagaggagaggagagtggagagaggagaggagagtggagagaggagaggagaagcgtgagagagagaggactgagagaagaagctctgcgtggaaattttaaagttgaaaaggggattgaggggaggggagaggagagaaagaggggaaattttaaagtgggtcagtgggaaaagagggagttagtattttgcatgcggctctcttaataggtctgcacgggaaaattggctcattttcacgtacggtccatttaagagaaccgcacggaaaaatcgatttttccgtgccgtcctcttaaaaggaccgcacgtgaaaatgagctgatttttccaaaagcgacgagttgctgcctgcacggaatctaaaagggtccctgtagtagtgattaatcaagccaactcgccactatgaacctcatctatttctcatagtgttccactatgcaaaccaccaaaaactacctcggaatctccaagaacttccacttactcttttcacccgaaggagtttcatccatgtcacgtattctctggtgagcttcaccgcactccaaccacgggaacatgaagttccttctctacctaatcaatccattttctttgtttctattttggcatagatcgaacacttggtggtatgctcgtcagcgttcccggtgtccagagcgccgccatcgccccacttcgtcgttcccatcgactcgaaccatccctggctgagccattgcgccaccgacgtcgcctaggtcccaggagaaagacgccaaaatatgatcaagccaatacgccgccgcgaatgccatcggtcgccgttgccctcctattgcctctgctccccagcaaccaagtcaccgacatgtgggccccggctatttagccacttcattaggcgtaaggtctttcattactagaaatttaaatcttgtaaggttctttttgtaaaattgctttgtatgccaagtgggcctatggacctaaatgcaattcacctaatgccaatggacctttttgtatagggtttagggtaggtcctaaaccctacatagaaattactatttcatgcattcattacttgatataatagcttgataagtatgttgtactcagccttgctttaaccctctctttgagaatcaatttggagtttttgctgaaaccgtgagtttaaacatataaattagtttcattccaacttagttcccaagtatagattagatagatggtttaattctatagcaaaacattagagttggctcatcctatagcttctacagtaatagatagccacaatcttgtaaataccctattattttatgtaaagaaatctcctttggagccttgatcaaatgtatgctatgaagattcagattgttaaacctgtatcaatctactgatccagggcttgatacagtttaaacatgtcgattaccgaatctttaattttgggacctgacaaggtgtgtgggtgggcgcctagagcggccatcccgctccccccccccccccgagccggccctgactacatgggccttaacaggccacatggcatcttatcatgatttctgggcttgatggtgacgaaaatggacgtcatagactgtatgacgacagaaggatcatcactagattaatgacgaaaagataagcattctttatataacgccattagagacgcatgataggtgataatatatatatatatatatatatatatatatatatatatatatatatatatatatatagtaaatttgtttggtgctccatggtgcccgggcaccatgattgaaatttactatatacccaattcaaatgagtatgaaactttttcaaatatttaggtattaacgttaactactttactaactagttcaaagcaagtttgaactgaattcaaacttgcttttgttagattttgattctaggtatatagcatctaaacatataattagttaggtatgtaataatggattgtgaaataaagttaaatttgagttgttttgttgctaggtataggtatgaatcgaatacttataactaggtatatactcacaatttaaaaattttgaaaaatttgggcgaatttatgtatttcataccatggtgcccgggcaccatggtgccccatatgagtgtcctatatatatatatatatatatatatatatatatatagtaaatttgtttggtgctccatggtgcccgggcaccattgttgaaattgagtatatacccaattcaaatgagtatgaaactttttcaaatatttaggtattaacgttaactactttactaactagttcaaagcaagtttgaactgaattcaaacttgcttttgttagattttgattctaggtatatagcatccaaacatataattagttaggtatgtaataatagattgtgaaataaagttaaatttgagttgttttgttgctaggtataggtatgaatcgaatacttataactaggtatatactcacaatttaaaaattttgaaaaatttgggcaaatttgtgtatttcataccatggtgcccgggcaccatggtgccccatatgagtgtcctatatatatatatatatatatatatatatatatatatatatatatatatatatatatgcctgcactttcatacacccaggtgtatgtacacccttttattaatggatgatccattagcattcaatttagctgtgaaaaaaattaataatattaatttccaaatgactgcatgcatgtggcatagctgcacaccggattgggtgcaaatttgaacaagatcgtgggcatgcatttggtttcaaatttgataacgtaccttagatatccccaccttttctagtatgcaacagtatatactgttttttaagccgcagtatatatactctttgaagcgatgagcagtactatatactagttttttgtgtattagcggtacataataaggagtaccttacatttttgttgtagcagtgaatatttctttttttaattagcagccgtatatactgatgcggacatcactacttcggatacacacaacaatcctccaacggtcattcaaggaccgataacaagagctcgtgcgcgacaattaaatttagagctgagttcgttcctatgttcttctttgtatgaattcgagaatagaggggaacaatggaggggacaaggagacacttggagaaggacttagagccatggaggaccattggggacgtccaagtcaaggtggaggcccaaaccaagtcgacgtctggtgcaattcggagtctaggaccagtctgcactaaaacgggcgcccaggtcgtatacgtgttcgaattggggcgttctttatatggatggaaagctaagaagatatcctttccaatggttttggtcccacgtccaaattctttctgagtcaacgggaattgaccgaacaacttaacgtccagaatctgtcccggtgctgcgtcaccgtatttgggcctttggcccgtgtatcgtattggaacccattagggttgcgtcgagaggggtttgcacgaccctaaactatatatatcagtacccgccgtcatctttaggtttttgggttttgcttagattaatctgtcaagaacagtttcgccgctagattggtttgtaagaccccaactcgtgagcttaatcattcatctgcaattttggttgtttttctatcttgttcttgtttgtgttcttcgattggcaaacagggattagccttctcggcgaggtcatccgcattttgacacgggtgataaccagaggagacgtggtgctgcgattgcggggctcaagaacgtgcgcgttcaagaagccggatcgatttgtgtcgcgactccgcccaaatcgttgtttatcagaacctttcggaagatcgggaaccctagtgcacatcaagtggtatcagagctctaggttcaccgtcaggttcgctcagtttctttgcccttgtcttccgctgtttctcgtttgtctttttgtgtgctgggccttcgctgcccgtgtaataaattaactatttacgcttccgcttgttaaactctgaattgtatcaacttttggtgtaccttgcctcctgggacaaggattaatgcacgcacgtaaggaacgcccgttgggttatttccggtcgtgacagcaacagtatatactgttttttaagccgcagtatatatactctttgaagtgatgagcagtactatatactagttttttttattagcagtacgtaataaggagtcccttatatttttgttgtagcagtgaatacttctttttttaattagcagccgtatatacttactccagaactaacgagtatatatatactgattatgtctttttattggtacgcgcagtatatactactgcaacgagcgaatgagtatatactgttctttctcagaatgagtatatactgatttttttttggaacgagtatatatactgacttttctcggagtggtatatacttttttcttctccaatcggtatgaacagctactcggagtggtatatacttatttcttctacaatcggtatgaactgctctttggtcagtgtatatatactacattcctcattgaaggagtatatactgcttcttttttttatcagtatatacatttgttattaattgagtatatattgtatgcactacttgttctgtcagtatactgcatatactaattgtcatgtttggtcggtatactgcatcgtcctcgctaaaggaggttatactgcctttttgtttgatcggtaaatactacgtatactacttttttttcactcagtatataaataagtatgtaccagtatttcttagataagtcgtatatttgctatccatggaagctggatgcatatgcttttcagttgaatagaataattaatatgcttttcacgtgcaaattcagaagtatgcctgaatcactggcaaagtatcggctgttgcattatgaataaacctaaattaatgaaataccctagaagggcactgaattctgaatggacattaccagaccaaagaaaaagatcaacgcagactatcggaaactaagaacaaaacataacgggatcacccctcgatgtggctcatcgaagaatctctgcatccccgcatacagatctcggttaacaacgatgggatcacgccgaccgcacgccggagagaggtggacaagaatgggtcttcctggattaacaccgttagctaggaatcacgggttcgatgccgacgacgatgctgttgccgcacggccacacatgctggactgttctgtcatcagcaccatctacgtccacgatacatgcatctcgcatttgcatgcaccaaacaaattcgatctgcatgcatgcattatcgatctgcaacctagaaaaagcaaatcaagaaaatcggaagaaggaaggacttgcctgcagcatagtcgatgttccagttccggacgacgctcaacgtcatcttgatcgtagcatgggcctgcatcgatgccgtcgccgtacggccacactgacttgcccgaagatcaatggcgtcgttgtctggtcacagctcttcggccagccagtcgcctgcggatagtcatactgaaggcattggtaatggaagacgccggcgtagacatcagcagacgccgtgaccttcgaatagccgatgggtcgcgccgtcgtcgccttcgaatcgccgatcgcgataacctgcggatcgatctatcgattctgtttacaaccacccacgagattttaatacgagctattcaaaagggttctggttagtacggaataattcagattatgaggatttttttcgtaactagaaatcaaaacgggctcggtatatggatccgcttgctgatttgatcggtggtgttcgctgatggacggtggatggaaccgggagtacctactcctgggagtatagaatcattatatatatatatatatatatatatatatatatatatatatatatatatatatatatatatatatattatatcctactaccgggagtagctactcctgcatcatctgctatacgtgctttcaagatttgtgcagctttctgctaattcgaatttgtcattagcgggttaattaacccgttaaaatatgccgatcgctattttcgtgggatacaaacttttgaatgcattatgcacgtcagatgtttgcattatctgcctgacggccgcatatatatatgatctgctcgtccacgcatgtatttcgcatctatagcatatcatcacccacaactaaaatgaacagatgatgttctgctggcacactgcgtgtggtaattacgtactgtccaactatagccttgtgaacaagataattaaattgagcagaagatgttctgttctttctctctatatatacctattcaaagaataataaaaaaaggcagcacatattctgctacctttcatggatgggaagaagatattctttttgaatgaagcagaacatgcagttttctagtttctgctcccggttcacattctgcccattttctaggttctgcattttgaagttctggaggagcagaacgtatccatgctggtattcaattacacaagcagaacttgatatggggaccagaacaaaaatgttctgctcttgtttctgctggggccttttgctctaatagtagattgaattgtttttgaaggaacagaaactattccgttacatattcataattataggaacagggagattagcttctgttgcatgcgtatacatatttatgttatgcagattagcttctaccatatttttagcctgttttttcatttgccggctagtatatatcttctgtcggccaggagcagaaaatcaattccaaaaagaacagaacatcagttagttaggagcagaaaatcaatttgaaaagagcataacatcaacaattgcatgtgctgcccgtttatatacaacatatcaccaaacagtgctcactttcaaacgaaattaataataaaaatattggtttgagagcagaacatattctgcctccttataagtagatcgagtttgttttgaaagaacagaaggtattcttctttcttcttgccaaagcttcctataagtaaacggactttgttttttgagcagaagatatatattctgctttcttgtttctagaaacagagataatttcaggtacaaaattcaaatctctttctgctccctttctaaccgatgttctgctcctttggtagtttctgctgattttcaagttttggatcaaggagcagaacttaccgatgatgagatttaattagacgaggagaagttgaatatgtactacttatctaagtacgtacacagcagaaactatacccagcagaaactcggttatgcagaatatgtactacttatctaagtacgtatagatgacatacagtatgttagtaatcaaccgacagaacatgtactgccatcaaaaacagatacggagaaaaaaattaggtggctgttctgctaatttttttaagttgatgttctgtcattctttttaattcatgctctgccattttttctgttggccggctaatatatatgttccaccggcacgagcagaagataatatgccaggacgagcgggtgcgaggaagaaactgcatccgagaagttggtttgcatgcagccgatgatttagcaactatctgaactaacaaactatttaattaaacaacacaggtattcatcgttattggatcctcgtcactccattaactgaatccgatccataataggagggagtaactactctcggtagtaggaaataggctatatatatatatatattagaaaaactattctacacccggggtatagaatagctattctatacctccctcccaccaacccacctcctctccccccaagggcccaaaacccacctcccacctcggtcaaaggccagtcaaaggtccctcacgtcggtcaattctaggtcaaacccgtcggtgactttccccacgaccctctctcttcttagctctcgtctcggaatgacgtagtaacgtgttgttcatcgtgtagtaacatagtgttttacttgcagtaacaaaattaaaatttactcataatatacttatgatggatctacttttggtaagcaattttttttgaacatcatggtgcaaacggtttttaaaaatagtacatggtgtgagagatattacccttcaaagatttgtttttgaagatttaactctccacaagtagtaatactatatcaaaagttttactactgcctgttttgcgttactgcaatcacatcatgtcattactacaagatgtagtaacgattataattttcacgtaacatagtgtcttactgtaattacttgataacgttactgcaagactataagttttgcagcaataaagcgtctaactacattttttgagtagtgttactgcataaacacgtggtaatgtgtaattgtcgtgcagtaatacttttacttttgtgcagacttttgtgcagtgacaagtgtataattagcatctgagacttttaacccatatatttttgtttcaattcctgaattactgcaattcaccacaatattacggtcaaaagtgcaataacgtcatatacatgcagtaacgttatattggagggaggaaaccaattttcttgagaagagggaggaaaaacggttcttgaggaggggagtacgtagatgcattttgaagtttaatcctccacatgcagtaacacgataacatcatggtggaaacggttttaaaaaataatacatatcttatgacatattgcttttcaaagattgacattttgaactttagccctccacatgcagtaactgaatgtgtaatttacagtaataggggtttatacatgcagtaacatggttttaccaaatgtataaaattattcaaaatactcctacatcaatcagaccttgctcaaagccacctacaaactttatctatggcccacctattcgaacttcatctcgtaaaaatgacatagtaacactgcatttatcatgcagtaacatatctacttggaagtggtaacatgcacctattatgtagtaacgcttctacttttgtgtagtaacaagtatatggttagcatgtgaggctttaactcatatatttttatttcaattcctagtttatgtagtaatactattcaagaaaatgcaagacactttgttactgcaaagcttattgtctttactagactcttatggtaacgttgtgatagaaatgtagtaacgtacagtagtaacaagtaatgctattgtattattacttgtggagagtcaaattctaaaaagaaaagcttttaagaacaatatctctgatgtcatgtatggttttttaaaattgtttacaccatgatgctagaaaaaaaatgcttatcaaaagtacatccatcatgactatatttcaattatatttgagcgttgttactgcacgtaaaacacagtgttactagacggtgaccgccgcgttactgcacagtttcgcgaaacgagagctaagaagaggtgggtggtgaggggagttagtaggtgggtttgactgagctttgaccggcgggagggagctttaaccggcgtttgaccgaggttggaggtggtttttgggccttagaatggagggggaggtgggtgtggcccttgagagcgaggtgtacaatagtcttaccctatatatattacatatatattacgcacatatatatatatggaatacatatatatatatatatgcatatgtataaatacatatacatgcatgtatagtacaattcatttgctcactagctagctatgacttcgacgccggcgttatgtcaaaagaagaaagaccgacgttataaattgtcgatccgtcgtagtagaattcaccctcgggattaaggacttcttcgttgatgaatctcatcagttgttcttgaatagccgtgatagaatccttgtgtgggagattgtccctcatgtgaatacactatcattcgaaaaataatgacatatgaatatatgaaattaataaacaacaaatcgatacgcaatgaaattttgaatggtttatatatacgtacatcgagctcttgtgtggtgtagatttgggttgataggaagtgggcatactcgcatacgtagtagccgcacaggttagttccctggtcatgctttgcacactacatgagaaaggacaagagatttaatatacacttatattaactgtaactagtaatcatatataattagcatatgcatgatttaaaattgttaaaaattctaattatcatatgtaaataccacatgcatgaaaattgttaaaagttctaataatcatatataactagcatatgcaaaatttaaaattgttaaaaattctaataatcatatgtaaataccacatacatgatttaaaattgttaaaaattctaataatcatatgtaaataccacatgaatgatttaaaattcttaaaaattctaataatcatatataataagcatatgcaggagttaaaacttttaaaattctaattatcatatataactagcatatgcatgatttaaaattttaaaaattctaataatcatacataattaacatatgccgtacaacaattgatttatatggatattcaatacatccaaaatattttacatcgtgtacacaacaattacggcaatacatcggcggtgacggttgaccgcacgtacttcctcctcactattgttccttccttatgatcgctacgtgagtaaggggtgtcttcgtttgataggaggatgctagggtcaaccgtcaccgtgaaagggggttgcccatcaaactgatcataatcttcatcagtcttgtcctcaactctgatgatttttcttttgcctgggagaaccacgtggcacttcggctcatcaggccctttgcccttctttcctttgctagacatgtccttcacataaaaaacttgcgttacatcattggcaaggacaaaagattcgtccgagtatcgaaccttgttaaggtcaaccgttgtcatcccactgtcatcaatcgttacgcctccaccaatcagccaaactcattggcaccggaacagaggaaccttgagaggtccatagacaagttcccatatgtcctcgatggcaccgtaatacgtgtcagttgtaccatcgtgtcccatggcatcgatacgaacagcactgttctggttcgtgctctttatgtcttggtttctcgtgtagaatgtgtacccatttatctcatatccttggaatgtcgctatcaagccagatggtcccctcgccaggtaggcaagttgttggctaatcgtctcgttacccatgagatgttgtcgcagccacacgggcaatgtatcaatgtgatgccgtataatccatgcatcagacttaccgatgtttctggcgggaactagagccaagtgctcctcgatgtaaggagccaccaatgaagattgttgcagaaccgtgaaatgggctttacggaataaattgttgtctaccgtcattgctgcgttccttccgagagtcccctttccccatagtctcccttcatggcgtgattcaggcaccccgattgggcgaaggtcttcgataaattctacgcagaattcaatgacctcctctgttccataccccttggcgatgcttgcctatggatgagcacggttacgaacatacttcttcaaaacgcccatgtacctctcgaaaaaaaacatgttgtgtagttacacaggcccgagaataccgatctctttgacaaggtgacaaagcagatgcgtcattatattgaaaaatgaaggtggaaatattaactcaaagctgacaagacattgcaccacatcattttgaagggcttccaatctatccggatcgatgaccttctgtgaaattgcgttcatgaaagcacattgctttgttattgttgcccggacattgtctggaaggataccccaaattataactggtagcagttgtgtcatccacacgtgacagtcatgagactttaggtttgtgaacttcttctccttcgtgcttattattcgctttatattcgtgaaggacgtccaagaattcccaatagggtaactcccaaaatatatagttctttttccacatcgccgcgtgaccatcttcgctatcaataggctggctgccaggcccctttccaaacactactttaagatctttcaccatagcaaacactgttttccactgcgatgttt

SEQ ID NO: 6275 - DNA, 11941 bp, Oryza sativa
cgtgaaatgatgtttcgtttattaaaaatacttcccttgctcaaaaaagtcccagaaaaatctagaaaatagataaacaagcaaagtatttaataaaattttatctagctcaattttatgttgaaatttttcctagattataggagtttagcttgtaggtttttaaattaatttctaaaaatgcattaaaaactgatttattaaattaggcgattttcagggcgtgacattgatatagtttaaacatgtaggttaccgaatctttaattttgggacccgacaaggtgtgtgggtgggggcccctgcgatttgggagcctagagcggctgtaccgctcccccctcccaagcttgccctgaatacatgggccttgaaaggccacatggaatcttatgacgatttctgggcttgatggcgacgaaaatggacgtcatagactctatgacgacagaaggatcgtcactagattagtaacaaaaagataagctttctttatagaatgccattagagacgcatgataggtaacgaatgatattcgtcacaagaatgtcacagagttcacaacatagtgaatgatctatatatgggcctatttgtcgtccaaatacctacaaacaaccttggtgaatcatctctttgatcctaaattatattttcaaagagacaaagaaagagagagagggagttaaagtccaatttacacccaaacttcaccatacctctcatcttctcctaggaaacatctacatggggccactagacagccactcatacttggttgagcgaagtacaagtgggatcacagcctcaaaccactgccaactcctttaaatcgtttctacccatcatgttgacaactagctctcactttccacctttactttcaccattcactactacaaccaagatttttgtgtgagggctaaaacgatttttgcgtgcgagtaggcagcccgcacgcacctaggggtctgggaacatgacgatttttgcgtgcgggtggcgcaacccacgggaagacaaaaatccgaaaaaacttaaatttttttaaaaaaaacgaaaccctagaatccggctataggctttcacccgccgcccgccggccatagtgccgcctgcctcccgccggcctccgcgccaaccgccgtcagatccgcactcccctccggccgcacagccgccgacgcccctcccctccgccggatctagggacgaaaggaagaggacgggaggggagctgtatcccgtgcggggagagggcggccggccgccggatccgtgcgtgtacggccgccaccgctggattcttgcgttgacggccaccgctgctggatctgtgtagggacggccgccgcccgctagatcccacgccctccaccgccgtcacgtggaggaggccgctactcccaccgccgccgcaccgctgctgtcaccgcgcgctgacgccgctgccgccgtcgggaggagaggaggggagagtggagagagtggagaggagatgcaagagagagagaggactgaggagaagctctacgtggaaattttaaagtggaaaaagggatagaggggaggggagaggagagaaagaggaaaattttaaagctggtgagaggggaaagagggagttagtatttttgcatgcggctctctcaataggtccgcacgggaagatcggctcattttcgcatacagtccatttaagaggaccgcacggaaaaatcgatttttccatgccatcctcttaattgaaccgcacgtgaaaatgagccgattttcctagaagcaacgagttaccgcccctacggaatataaaagggtccctgtccaggaaaatcgtttctatattagtgattcgagaagttccttctctacctgatcgatccattttctttgtttccgttttggcatagattgaatacttggtggtgcactcgtcggcgtttcgagtgtccagagcaccaccatcgccccacatcgtcgttccaatcgactcaaaccatctccggccgaatcattgagccaccgacgtcgccaaggtcctagcagaaagacacccaaatatgatcatgccaatacgccgccgcaaacgccgtcggtcgccattgcccttttgttgcctctgcttctccagccattgagtcaccataagtgggcccgagtgtttagccactacattaggcgctaaggactttaattagtagaaatttaaattttgtaaggttcattttttaaaattgctttgtatgccatgtgggcatatggttctaaacgcaattcacctaatacccagtgacctttttgtatatggtttagggtaagccctaatccctactcagaaattactatttcttggatttattacttgatataatagcttgatgagtatattgtactcacccttgctttaaccccctctttcagaatcaatttggagtttttgccgaagccaggagtttaatcatataaattggtttcattccaacttagttcccaagtatagattagatatatggtttaattctatagcaaaacattagagttggctcatcctatagcttctacggtaatagttagccacaatcttgtaaataccctattattttatgtaaagaaatctccattggagccttaatcaaatgtatgcgatgaagattcagattgttgaacatgtatcaatctactgatccaggggttcatatagtttaaacatttaggttaccgaatctttaattttgggacccgacaagctgtgtgggtgggggcccctgcgatttggccagcctagtgcggctgtaccgctcccccccccctaagctggccctgactacaagggccataaaaggccacatggcatcttatgatgatttctgggcttaatggcgacgaaaatggacgtcatagactctatgacgacagaaggatcgtcactagattagtaacaaaaagataagctttctttatagaatgccattagtgacgcataataggtaacgaatgatattcgtcacacgaatatcacagatttcacaacatgacttgaaattcaatttttataacgtaaataagcgtcacctataataagatctcttgtagtgatggcttgtttggctattagagagacagtttgagacatacaacacacagagctaattgatcggcgatccacttgggtttctggtgatcatatgcaacatggactaagctacttggatttgttcaaatgatctgcttcttggatgctgtccggccacgtcgccatgcatgcgaattttgtggatggagccaaaagctgcatgcacggagctgagtaggagacgacgtagacagatctgcacatcgtggaccatgctgcttgatgtggtcggatgtaggtgcagtaggaataatccttttcataatagtgaaactaaagaatttcacttgccaactagtttttttagagtctgtacagaaatgaaactttttgaaaagtgctccagatgaccaagttcaattcaccaaccgtaatcgcgtgttggatttacatgaaaaatacgagacagacaaaaatgatatctttcggttctaaattaatactcccggccatttgagagtgtaggatggtaaagggcctttcccaccccaaaagctagccattgaggtgaggggctcccccacttatatcttaggtcctttgcccttccacaaccaatgtgggactattcaacaatctcccccttcacacattggtgcctctcagcccttcaccgccccttcaccgtatccgggcccccaccggcccacggtccatcaggtatacgggtcccgcaggcacccacggtctatcaggccttcacacacgtgtccatcgggccagagaagttaacctagcctggctctgataccaattataggatcgtaaagggcatttcccaccccaaaagctagccattgaggtgaggggctcccccacttatatcttaggtcctttgcccttccacaaccaatgtgggactattcaacagagaggagcaatatgtacgtatgcatgcatcacatctcagtgttttttttcttttttttccttggagttttaagaatgctcataattagggcatgcaagttgatccattagtatattcgcaatatttgatgatttttttcattttaaaaattgttgacgatattagcttaattttggtatggaaaatatcggttaatttattcccaatttttatctcaagcgagaaaatgaaccatgagagttgaggtgctaattaaccaaaggcaaatattcattttaatttgttgtgtatatatatatatatatatacacgagcatacatgtgaagatggaaatatgtgaaaaatataatggtgctagtagatttgtctaaaacacttccacaatacaatgatcatgacactcgatcaggtctcaaagttaaattttagggattgtgtcaatatcaaaattatcaatgaataattggccagagggccgggattagcaagggtctactactgtcctgccatttcattaattaattagattaagtccccgattccttgcatccctaattggcctacgagaatcgacaaaaatcgcaagatgagaggattgtggtaggtaatcttctccaactgtgcctctcaatcggccataacatattagctagaaggataaacaaacatcaatctgccttcacagttttgatcatctcatgagacacatatatataaaccacccataagcaagagtctccaaggtgaattaattaactatgttgatacacatatacttaattggtataagagcattagtagtggtagttaattagtataaaagcatccatcaaaaggagactgttagctagctaggagaccgggcaagcaaagcaaagcattgatcttgatgaatcctccagagagattaattgcatattgtccagttccccctgacctattatacacatgcaagtgctctatgtacttgtgcggtgcaacgacgagcaagagtgcgtacgtttatagtagaactgagggggtgcgccttatatacgccagacgaggaagagtgcgtacgtttgtagtgatgtctccaattttagtttctgtcatagtgaaatattcgacgtttgacacctcgaaccatagaaaaactggagctgtgaaatgttttcttcttttttatgcgtggagcactgaaatattgacagttttgtttttttctataaaaaaagaagaagagttgacgacttgatgggcaggctctcctcgatggagggagatgagcttaaaaagtcgcaataaatggaccgatgtagtggaaatgtggagtggagtggagcagtaataaaatttaaaacgccacgcgtagggcatatcgaccacgactggactctccttgagatcttcgaacagtgtgtgcttgctagctgaactgcagcagtggaacagtaataaaatttaaaacggatgtgcagtgttcacagaggatgagtgtgctatgtgttctctgcttgtgaatagatatggcgatctctgcatgtgaatagatatggcgagtactattactgggtatacatggttaggatagatgttagtttgttcagtttgtttggagatggatttgggagcaaatgtacatggttagggcgcaaatgttagtttgttttgctgtggaggggagtgggttttgctagaagtggacccatgaattttgctattccaaaattcctcaactagctatatgtctagctccaacaaatctgtgatgcctatatctcactagtcttgctatgtgctatgtcatgtacccgtgggtaaatagctaatttatgatttttgctgtctcatcatgattatgccaaatatacatatacctaactcatgaatttttctatgcctacctctcaccatttatgctatgtctaagctagacgattttgttatggccatacctactcttaaatttttttatgtcggccttgactcagccgccccaatagaagcgacaaaactgctgttgttgcaagagttggattccttcaagaaagtgatagatgaatctgaggcatcaagggagcagtaatcaaagaaaattgaaagtttgattggcctaaatgctccatattttgctctgaaattttgatagttatgttaccaatcatgtatcattgtcattttcatagccttcatcatggcgttgcgaatattatgaatataccaatggatcaacctgcacgccctaagtgtgcgcattcttaaaaaatgctgaagtgtgatgcatgcatatgtacatattgctcctcccaaatggacatcatgcaggatcgggacttgacaacacattaaaggctctcatgctacacgcttcttgcactgtagttaaacaagggcatcgagcggtagttcgataacaataagattcattagcaccaacataaccccatccattccaataaatatggcacgcatgtattttaagatttatctttgaccaagaattagttttaatttacaaagatatttgatagaaaattagcatcatttcaacctgtttttcaatacgaatacaacaattctatgtatatattactagtcatcaacctgtgcacttgcatgggctagaaaaattacgtgacatcaattaactagcgtggaagctttattggtgcctccaattactggatataagattttttctttgtttctcaattctttcggtcaataacgagcatgtgtgttattcatagaaacggaggtaggtagtatttgtaagaagtacggtatcgactttcaaaaaagttccgaccttgtgcgataatatacacacatattaacctacataggcaagctagccagacctagaaatataccatttctaaacctattcggtcacttactcacgttggggagcctaactaaactaacatggactcacatggcatgcaagccagccatggtactaactcgtctactacgccatagtacgctacaaacacaactaagttatcgtatgaaggactactcaatagtacacttaaaacaatgttactcgttgccttttaccttcatttgacgggtacgacctaagtgtatctgaaaatcttctcttctgtccatcggcgaaagcgtgcaaatgtaaaattgcctggtacgcaggactagatatgaagagtttgttcagagattgtgcaataaacatgtacatccatcaactgtatacatgcataggatatatacatacaatggaggtagccatttgcaccatatccacaatatacaagtaggcagccattcacaccttatccataccaggacgatccatttgcaccttatccacatcatcacataatgcttctgcctataaatagcagcagcaccttacattcaagaatcacctctcaacacaaaactaagaaacatagcaagataaccagggaaggtagcatcagcaacaggaggcaatggagggaaagaggactaccatttcgatggtgatcatgtgcctggtcatcttgagcctcactgtcgactccgccaccgcggcacagtgcggctgctgcatatcctctcgggcaaaagcatgttgttttggttgtattgctgctggtggctccgactcagtctgcaagaacacttgttgtttcccatgtattctggccgattctggtaaattcactaatgtcactctatttaatgcatttcttatatgtagatacagactttgtagcatatcgtggactaatacatatgtacattgtcctcaatgtacattgttgatttcatttccaatctcacgacttcaggcatatatcttgcaacacgaagacatcttatgctctacttccactacaaaattgactaatgcgctaatgggattttcatattttaatttcacagttgttgctaagatggacgaaatgggagttcttgctaagatggacgaaatgggagttcttgctaagatggaaggacaagcctaaaacaacatgcttgcattgctaccagtcttaatgcctatcataagaatatgttgttttgcttcaagttatggccaagttatgttaatgttatcttcaataaattattgaccatatgggacgatctatagtggatccatctgttggtctcaactctatgtatgtcgtgcatgtgtgctctcacaagcatatttaatttctcttgctgcttttaataaggccatagcactgtccattgtgtcatccgatggtctctgaccttagcaatttattacgacatgattaatattatttgtgtatgcatgttctttacttaatttattcttagcggatttctgatgtttttgtgagttttagactataggacataattaagattgtcatgccaaaaattattgcaaaacctagtaggaaagcaaaagaggcgggggggaggaaacatggtcaatttctcggctgctatcacattcctcgttttctcaggtttgggagacatatagccacactaaaggcagtaaacctgaggaatgacaaccttactcacaaggacaaatagtcgttaaaaaactatgacatcactaaccatatcttatttcagttcaccaaacatacatttaaatttaggcagtattacggagaactaaatgaacaaacaacaaaccatacttcattgtcaaaacaaattgccttctatgtacttcacaaattctcacaagatcatatttgcaatttttcctaaactaattaaccaagagcaaatatgcagtggagcattccacatataatttcacatcataagtacataatacagtatggtataatacacatatgcatactagggcctacggcaaaagaggcaaagatcaatgtgcatgctaacttgtgtataatacacatatgcacagtactttgaaatacgcataccaggatatatgcattagttcacaccattcattcttgcattcttgcactttcaacaacaatcagatctaccaagcattcttgcacattaaaccacaagtagatctaccaatgaatcacaaccttaggtagcaatgggggtaatcggaggggaaaaccttacctcgtcagacgacggaaggacaggagacggcggaagattcaccggctgctcaccatggcgcgcggatcactgaggtgtgggcatcacatctatcagcaccaatgacatcggcggggggggggggagggggaggactggggctctttcatagaccgatgtaaactagacttattggctttgatttagggagaggaaggaaaagagatagactttacccggcatggctttgggcctgcacggagagggatagtagttggcttggtttcagtcaaaagatatgaagagaattttaaattgtttttttcaatttaaataatgaccgaaattatgttagtattattaaaattacatctttagctcggaaaatttcaaaaaaatttaagagagcataattaattattgagaagttattaaaactattccaagtcatattttacaaggtaaaattttatttcacatatcaacttgtaacatacaaggaatttcaccttgaaaaatttttgtggaaaatttaaaactttttgaattcaaaagtttttggtgaacatagaagcatactagagcatataactcccttaaataaaataaaacacatagtttttctggccaaatcaaaactaagtccaaaagaaaaagtttacaaatcttgtggtaaaaaattttaaaacaaaaattttgctttgaccataaactagaaacctaatcttctcggttttgcattttcaacctaactaaaaaaatatatttaagttaaatataaaacaaattgaaaggtcagtatcaaaatacgcaaacctaaattgagataaaaagaacttgcttgtatgtgcatattattcttttaagattgtttttggatattcttggtacatctcataataggttgcatatgcatgctttgtctaaagaaaattcctaaaaataaatgaggcaacaataaatcccaccaaaattctcataaatactaaacaataccctaagctcccagaaattttagttataataatttatcacatcaattggtaacccaaataaatccttgaactcagctaaaaaatctggaaacagcataccaattagcctactttgcaccttcaccaaaattaaaccataactcatcttgcaaaatctctaggtcagaatgttaaacatactttactctatcatctggtgcaatggcttagtctaattcgaaatgtaacctcataaaatgagagccataagttaggtaaacagtattctggactgtggtcaatagattaactagtcaactttactaaattaccatggcaaaagcaaaagtaattaaactttggaactaggcaccttgaaccatcaaatccttgtatctacctgtcacccctccctatcacccccccggccttaattctaaattaaatggatgagagaaagagagtaatatagtttactgcgatagtgccaacacatggaaaatttagagcttctagatctctccttctacatctctcttaaatgggggaccatgtcgctatggggcccactcatcatacaaccatagccaacacatcatcagcacttctctcatttacattttgttttatttctcaaaaagggagaggagggttaaattgaatttcccccaaattggcactctaccactccaagccttttaggaaacatctatatatgggcctattttgtcgtcaaatacctgcaaaccacccctggtgaatcatctctttgatcctcaattatattttcaaagagagaagaaagagagagagggagggaaagtccatttacccccaaacttccccatacctctcatcttctcctaggaaacatctacatggggccactagacagccagtcatacatggttgagtgaagtacaagtgggatcacagcctcaaccactgccaactcctttaaattgtttctacccctcatgttgacaactagctctcacttttcaccttcacttttaccattcactactacaaccaagatttttgtgtgagggctaaaacgatttttgcgcgcgggtaggtggcccgcacgcacctaggggtctgggaaaatgatgatttttgcgtgcgggtggcgcactcgcacgggaaaacaaaaatccgaaataacatatatttttttaaaaaaaacgaaaccctagaatccggcggtgggcttccacccgatggccacagtgcctcctgcctcccgctggcctccgcgccacccgccatcagatccgcgctcccctccagccgcaacgccgccgacacccctcccctccgccggatctagggagggaaggaaggggagaggagcggagctggatcccgcgcggggagaaggcggccggctgccggatccgtgcggggatggccaccaccgctggattcttgcgttgacggccactgccgctggatccgtgtaggggctaccgccgcccgccagatcccacgccctccaccgccgccacatggaggaggccggcacgctcctcccaccaccactacgccgctgctatcgccaagagtggagagaggagaggagaggcgtgagagagagagaggactgagaggagatgctctgcatggaaattttaaagtggaaaaagggatagaggggaggggagaggagagaaagaggggaaattttaaagtgggtgagagaggaaagagggagttagtatttttgcatgcagctctcttaataggtccgtacgggaaaatcgactcattttcgcgtgctgtccatttaagaggaccgcacggaaaaatcgatttttcccagaagcaacgagttaccgcacgaaaaaattgatttttccgtgccatcctctttaatagaccgcacacgaaaatgagccgattttcccagaagcaacaagataccagtccctgc

SEQ ID NO: 6276 - DNA, 2789 bp, Oryza sativa
tgttgttgttgtagaactggcgttgagggcgagcaactgaagaggatcctccctgtgggtatggtgcagcttgaggtcccaaagcaatgcgtgcctctggctacaaccctgttgagccttgaaatgagcagccctacgctttttctgttccatcctattatacttgtcttcttggcgaatcgccttgtccaccaactgctggaaattccggtaatccatagccatcaatgcataagacaactcatcattcagtccctctaaaaacatctcatgacgttcttcatcagtgcgaacatcttctggggcataacgagctaagcgattaaagtcatggaggtactctgtgacagaacgggatccctagttgagtgctctgaactctctcttcttaagggccacaacacttgatggtatgtgtgtcttcttgaaagcagcagtaaactcccgccaagtgataggctgtccctcggctctgtttagacaaaagtggtcacaccgctcagcagcaggaccatgcaactgatgtgaagcaaaggaaaccttctcctgctcggtgcactgaaacaaatccaacttcttttccatagcattcagccaatcacctgtctctactgggttagtggtgcttgagaaggtaggtggtctcacacgtagaaaatctgccaacttgttctgcggaggtggtggtggttgattcttgttatttgcctgctggttctgcgcttgctgcactaacagattaatcaactgggtttgctgggccaaaacttgggcaagtgtgggatctccttcattgtgaccatttccacttccagtgcgggtgttcaccatctgaagaaaagcatgggcaaaatgaaagaacgacagagagatacccttagaacggagaactttaattaatttaaattctatattgctcttaactgtgtatgattacatttaaattgaattaacactatctcaccagctaacttactctctgacaagcaaaacaactaaacttatgtagttacatcccaccaatgatgtaagcaacatgctaaacccacacacgcacaagcaatcttaagcaagcgaactaacacagcgaactacggcaacggtcaaactagacaacaactctcgccttgcgtcggaacgaagagatggatcttcctcctctggagtagctggctctctttcttctgggtcttcctcttcttcctcatcacttaagacatggatgacaggttcagcatgatcaggcacagcgtctcccaccacacgagtcttcgaagctaactggagacgaggtggtggacgggttctcttccttgcggtgaggcgaagcttgggtgctgacggtcgtgcttctcccttaagcccagctagttccttctgcagacggtacaccttgctctccaacttacaaatcctgccacggttccagttttccctatcatgagctgctttctcccgctccacgcctactgcatccatggcgctaagcatatacacggcgtgcatcacaatggcgctaccttcaccttcgggacagttgtaagttccatagtcttgaccatgaggcttgtgtgggtgatactggaaagctgatgactctaactcctcatccaagcgatgacgtagctctccaatggccaccaaggctgcttcttgacaagcatggctgtactttcttcccccagcttcaaactttatcgacggaaggtcttcacgatcactagtcaacgtcacgcgaacacgacacttctcctcgttggggtcatggggaatctggtgatacttaggggcaacctcgtaacctacttcaaatgccatcattctcagcaagcatatgacatactcaacaagccacacagcattaacgagcatatgatatactcaacaagccacacagcagatatgcaaatgcacaagataacaaaggatggcataatatgacatacccataaccgtgggcacggctattcgaatagttttactctgatcagagatgtaccactgtacccacaacacacaactccacatgtcaccatgcgcctcagtaccaccacggtaccttcgaaaggaactgtgacaatacctctaacacaacacaactcaccacagtgcaccgttcctagaacataatctccccatcataaccagaggcaatggactccccagcgacccccacggacttctcgccgcttcacaggctggcaccccgtaatgaatcatgctatacaaaaggtaaagccgttgcccacgctggcttgtggttggcacggtaaatgtttcacaacagtagctcgtgaaccggtccttaattgttataagcacgaccatcaaaaccatgtactcacaacccacctttaatcaggtttatgtatcaattaattatcataacacgattaactatcgtgagctaccactaaatataaccataagtaatatcgtaatatgattaaccccattgatgagctattcaatttattacccataggaaaataaagtgattgtcggccattaattaactgggaatggctcaccacccgacgacattcgaaaataatgcataagttgaaataaaacattagctttaaacgggttcaacatgctcaaagggttgtttcggatctgtgtgacttgccttgagcttcttcaaacacttctggacctttctcaacgtaacgctctcctccggaacatcggaaactaaaagcaataaccaaatcaacaaacagttcaaaaacaagaataacagtacatgtggatattttaacatgtagatcttgattttagatgaa

SEQ ID NO: 6277 - DNA, 17327 bp, Oryza sativa
cgctggcttgtggttggcacggttaatgtttcacagcgaaaatcgtgaaccggtccttaattgtcatgagcacaaccatcaaaaccatatgctcacaacccaccattatcaggttttggttggcaagttaattaattatcaatcatgattaaccatcatgagctatcattaagccatcattaaataatagtgaagcataagttatcccaatagtgtgctaatgtttctaagcatggctaagcacttatatctaatatccagctgaacccatatataaagctcaactagtcaagttacaataacccaaggtatcaaggaataaagtaatgaagaacaaaagagctataacaaacaataggttaattccacctaatgacattcaaaaataaatgcaatagttgaatagaaacaatagctttaaatgggatcaacatactcaaagggttgtttgggatctgtgtgacttgccttgctggccttggaattcctcaaattcttttcctgcaaattcggactctccgagaacgtcggaatctaaagagaaaagaacaaaatcaccaaaacagcacacaaacaagcatgaacagtatatgtggatatttttaacatgtagatctcaattttagaaaaatttagagacctgaaccaactaaatccgagccaagatgaattagttatgaattttcaaagattaaatcggattaaatcatttatatagattttaatggaattatgacgcaataatgaattattttttaaaaggaaaagatgattattacgtcagcggctagggttcacggtggaccgggtgcacggcgggggctcacgaaaacgaacggccgagatctaaccctatccaaacagacggccgagatctaatgggtctaccgcggctcacgggaagcgacgatgatgacgtcggcgatgacgtcatcaccggcgacggctaggatggtgcaagctcgccggcgaactacggcacgacggcgctaacgaaaggcatctaccggttgcggacaacacggcgaactcaccggtgaccaaagcagcggcaacatggttgacacgagcctttgttgctggtgtggaggagttgttctgagcagggatgacctttgcgcggcggggcttcggacacttatcagcgtaatgtcctgggccaccacagttgaagcacaccccgggcttactgccttgctccctcttggcatgctattgctgtgacggagctgcaatagagcgtggagcttgattgcggatgttgttgcccgcgctgttgttgaagaactggcgctgcggatgaacaacaaacgaagaacctccctgtggcatagattggggtcccaaagcaagacgcggcctctgactatttccctgctgtgccttgaagtgagcaatccggcgtttcttctgctccatgcgattgtacttgtcctcctggcgaatagccttatccactaacttctggaaatcatgataatccctagtcatgagtgggtaagaaagctcatcatttagtccttccaagaacttctcttggcgctcttcatcagtgcgcacatcttccggagcataatgagccagacgattgaactcgtgaagatactcagtgaccgtgcgtgaaccctgagtgagcgacctgaactccttcttcttgagagacaccactcccgatggtatgtgcgtcttccgaaaagcagcggtgaactcaagccaagagataggttcagcagtagtcctgttaaggcggaagtgatcccaccactcagaggcagggccatgcagctggtgtgaagcaaaagagactttctcctgatctgtgcactgaagcaggtccaacttcttctctatggtgtgcagccaatcatcagcttcaacaggattggtggtgctagagaaagtaggcggcctcacacgaagaaagtctaccagcttattctggggaggcgcatggttgtttccctggttctgctggttctggagttgctgcatcatcatattcataagctgtgcctgttgagccaggacttgagcaagcgtgggattctctgcattgttgttgttgttgttgttggggttggggccattcccgttgctgcgagtaagcaccatctggcatagagaggagcacaagaagagaaacaagggaaaaactacttagaatagggaattaattttactaacttaacttttattgatattaactgagtttcactattagaaaactgaaaactctcacacctctaaactcaccaacctcctaaaactagaaagcaaacaaagacatgcatttacatcccaccaatgatgtaaacacatgcaagacccactcacacaaccaaacttaaacaagcaaactaacacaacgatctaaggcaatgacttaacaaggcatctaggtcttccgggcatcgaagttgattaaaggctcgttcggtgcgtccccatcgtcttgagttggtccccactcgatcttggaatgggtgcgcttggattcttcttcatcatcatcactcacattgacgaccgaaggatccgctggggctggggtagcttctttttccactacacgaacctttggcgccaactggtagcgagggacgaatagagctctcttccttgcggtaagacgaaccttggccttctgcggtggtgcttctcccttcaatgctgctagctccttctccaaatgatccaccttgtcatctagcttgcaaatctttccccggttccagtcttcacgatcttgagcggctatcacaatctcaatgcgggtttcatccatagcccatagcatctcaaccaaatgccttgtggtagcatcattctcaatccctgccggttctaggtagctgccacggtcacttccctggggttgacgaggatggtaacggtactcggtgtcggccaaccgatcattgtaactttcgcggagctctcctatggcgatccttgccacctcctgacaagcatgaatgtagcttccccctccagcctcgaacatcaccgatgggatatcttcacgattactgttcaaggtgactttgacccagcacttctcttcatcacgatcatgagggatctgggcatacaaaggggcaatcccaaatcctatgaggaaagacatcgtacgcaactcctggacaaatccttcagtaccaaacaagtactcaagcttgtagcacagcatctaaagacaagtgaaatgagggagttaagtcatttatctagttaatagcacaagtttttgggttagcttgaataaagttagaaattcaaagtaaaaagtaaataaataaagcaaaccaagcttgcaagataagttgaaacagttagaaacaggttcacaaactttgcacttttgaataacaggtatcaaagaaaataaataaaagagagttataaaatcgatatgctaagcttagttcattgcagcaaaattaaataaaacaatgttataaaacttttgatggtaaatgggccattagtacggtaatagatgtacagtactaacaacacaggaataataaataaattttgaatgagaacaataaaagaggtcatgaattgcatgtgccattagtttggtttaattaaaagagagagaggagaacagttctacttttccaatatctttagagggcttctatgggtaaccatttggcataacctagggtcaaggaggctccgataccaacttgtcacgcccagaatttctatccaaaattccaaacgcttacatgtgtgtaaaccctcgtccaggaatcagccgaggcacacaataacaaattgataatacagtacaattattactttaattaataagcgaataaaatgtcattacagaggtagatagttcctctcaatcaaaagaaacagcgcaggcgactcctctccacaggtagcttgaccagggctacgcctaatcatccactccatcagcatcactgtagaactcctcctctgatgaatgattgcaaggtgagtatatgacatactcagcaagccacgcagcaaatatgcaagtgcacaggataacaaagaatggcatagtataatctcatttgcataaatagcatttaacaaatatttcagaatttaataaaacagttaaataataattaaacaatattaatccaacgctatacaacataccctgttgcatgggcccaaccattctgaacaaccaatcccggctgcacagttctatctccaaaccaggagctaaacaagttattaacatcatcatttaatagggtgagaagtgtgagactaatcacgaaagacattgttagacccgcccattaccgcgggcacggctattcgaatagtttaaactctggccagaggtgtaccactatacccacaagacacaacctcaacatcatgtcaaccatgcgtcgcgatacttgacaagtacccgaatagagattgtgacaataccctctatataatacaattcaaagcaatgcaccgttcccgcatcataatcacccccttataaacaaggtatggactccacagcgacccccgtgggcttatctccgccacttcatagtctggtgctctactatgaaccatactatacggaaagtaaagctgttgcccacgctagcttgtggttggcacggttaatgtttcacagccgaaaatcgtgaaccggtccttaattgtcatgagcacaaccatcaaaaccatatgctcacaacccaccattatcaggttttggttggcaagttaatttattaatcaatcatgattaaccatcatgagctattattaagccatcattaaataatagtgaagcataagttatcccaatagtgtgctaatgtttccaagcatggctaagcacttatatctaatatccagctgaacccatatataaagctcaactagtcaagttacaataacccaaggtatcaaggaataaagtaatcaagaacaaaagagctataacaaacaataggttaattccacctaatgacattcaaaaataaatgcaatagttgaatagaaacaatagctttaaatgggatcaacatactcaaagggttgtttgggatctgtgtgacttgccttgctggccttggaattcctcaaattcttttcctgcaaattcggactctccgagaacgtcggaatctaaagagaaaagaacaaaatcaccaaaacagcacataaacaagcatgaacagtacatgtggatatttttaacatgtagatctcaattttagaaaaatttagagacctgaaccaactaaatccgagccaagatgaattagttatgaattttcaaagattaaatcggattaaatcatttatatagattttaatggaattatgacgcaataatgaattattttttaaaaggaaaagaggattattgcgtcagcggctagggttcacggtggaccgggtgcacggcggcggctcacgaacggccgagatctaaccctatccaatcggacggccgagatctaatgggtctaccgcggctcacgggaagcgacgacaatgacgtcggcgatgacgtcatcaccggcgacggctcggacggcgcaagctcgcctgagaactacggcacgacggcgctaacgaaaggcatctacgggttgcggacaacacggcgaactcaccagtgaccaaagtagcggcggaagatcaacggacggtgacggcgacgaggttgatacggcggtgaccttcggcttgacgacgacggcgatgctccggagacctacggcagcgacggaggggcggacgaggtcggccacggcttgtgatcacgatggcgaccttcctgagtggcgacgacgactggagcgacggcgacgcacggctagaccagcggcgatgacggcggcgcacggctgcacggtgctagggctctaccggcaacgagaggcgaaggcgagggtggcggcgggtagcggagggcttgggggtccttttataggggctagggggcggcggcgaagtcccacggcggccggcgacgagaaggaaagttttagggttcgggaggaaaggggaatccaaatcgagctcaaatccgatgatttccaaagcgatatagacgatgcttccaaaaggaaaaaggtagaggagatctcggggatcctttcccctcaatcaatttcatcggatcgggaaaggggcgacggaattggaagggcggcggcggcgcggctcggctagggttcgggcgcgaggaagacgacgaccccgacaggtgggccccacctgtcagcggcggacgcgcgcgcgtgagcggcggcttggctgcgggccggcctgggccgaggagagagagaggggggggttttgggccgaagccagaagagaactttttaaaacctttttcaatttaaattattcatgagatgcaattccatttattaaaaatacttccttagctcaaataaatcccagaaaaatctagggactatagaattaagcaaagtatttaataaaattttatctggcccaattttatattggattttattatttaaaattagatcttctcttctaggcttttaaaataaaatctaataattccaattaaacaacaatttatatatttgggatttttagggtgcgacaatctctctttgttccttggaattcgcaccgtcagtagtgcgtctatttaaaggaattttggggatccattttgaagtccgcccaccgtgcagaaaacatcccgcctgcaattgctcttcgccttcttcgctgccacaagaaaccctagttcatcgacctaagccctttctccagcgatcttcgatcagtgatggatctcggcaaatcattctccaccagttgcgatcgaagactatattctctgcggttttctccctccgccttccgaatttcttctcttggttttgaacttctatggtctttctcttctccatttgaaccccaattctatcacctttcttagcatcttttctcatctttgcgaggcctacattggggtagagccttttcttgatctctttcgcttctactacgagctgcgttggatggagtccaacagggtatctggttgcgtcgtgtttcgacttcgcgatggcttgaagtcgcgttatatccccttccagtgcccttcttctcgcagcaaatgtcggaataggtggttctatcttcagatcaaagattcagaccctgtcttcgttgttcccaaagaacaaccggacaagatttcgtcttggaccgcaaagccccctttgaccccctctctctagtcgtttatcgacattattgacgatctccgagtacgaggcttgtcggggtatgaagtcgctgcagacttcgttggtaggcggatccagccgctccaggctcgggcccatctagcctttgactattccggaccggaggacgcgacccgggtttctcctcggggtatctttctcgcatttatcctgacatgctcttgttcgcgttcctcttgatttatcgagatttggttcttgattcgcaggtctgaacagcgaagccgtggaacgtcgtgtcggccaggtgatgatcagtggtccgacaacggcgagtaacatccccgtgcccctttgtgaaaagggggcggccgaacatgatgacgccatcaacgtaagtgttctcgataggcatcctgcattttcctttcgagatcacattgtgacttgattaagcgtaggctcttcctctgactgacatcatcgggccgctcgcggaccatcaggtggcggcgtctctgaaagagaaggtcgccaaggaggcgtctgatgctgctgctactaccactagtggtggcaatgttccgacaaaggggaggaagttctcctctgtaagcggacatcatcgcaaggtgtcaacccccttggtaagttatcctgtcgtcagatcgtacagccagaagaattacgccttacttcgcatcgaccgtttttcaggcctcggacgcgtctcccccgccttcacgacgacaacgtcttgtgacgattggcgagaagtaagtagacgaatcttaagcttccgtgattttattcgagtgttgtctgaaccgtggtcgtctcacagggcggcgcgggtgaaggctgtgcaagacaagtccggagggacctccggcgcatcgcccgctgcggcctcgacggatgtcgtgctcgcacccgggagccgcgaggtgacaccaagcggcccagtcagcgatcccgcggctggtcgtggtccaccagctgccgtcctcacctgggaggagctccaggtcgagatggggcgcctcctcgaggctggtgctcgcggcatcggccgcgagattgcagaggcgaggtcggaagcagcgttggcgaacgagcgtgctgactggctggtacacgagttagcggaagctcgtgaagacctcaagaagatgagggagttggtggccggcaacgagcgacaatggcaggggctcgaggaccgcctgtcggagctcgggaacaacctgtcggaaatccgtggctcgttgcgggtcacatacactggcctgcaccagctcgccggggagtgcggcattaagtctaccatcctggcgaatcccgacgagttctcgctgacatcttctcttgcggaactggcgacggcgatgggggagatcccctccaagcatgcggccaggatcggggaggaaacgtcgaacgggatctacaccggggcgtgccacgtccccgcgtgtgtaaagctatcgcatcctgaagtcgatctgcgcgagatcttggatcaggcggcggctagcaacacgcgtaaggaggtgaaaaaagaaatcggtgatctaggggaatctgttctccccctatttgaagagtaggacctcttgtacccccaagacatgctgtgtaaaactgaattttaaccgcctttgtgcgtgcaattatcattgtagtttactcttgtatgttgatcttgggagcttttgtcctttgtagagatgttgatgacgaggatgtccaggagcgcgggcacatgcgtcgcccgacaatgtggaccagacccttgctacggggacggagatggcgacgacttcctcaggttagtagtccgttcatcccttgatgccctcccgactagataaactatgttctcgaaagaggcgtatagcttgacttagttgttatcacattgagcagatctcgagaatgcccttgctggccaagatcgtcgtatccaatattggaagacgaaatttgaagtagcggaactcgagagaaccatgctggcagtgaagaaaaagcaggctgtggaaacgctccgaggtcgtgaggtgtggttcaactcatacttgaagagttgctgcacatccatggccagggtctgtagagaacttcgagtgccccgtggagatccggaggagtcggcggccagatacatctcacggctgaacggagcctgtgctcaactcgatggcatcggcaagcgtattgacgaggccttgaagcaggagtgtcgtcgatcgagttgatatgccggagggcacgtgttggcttgcctacgagatcatcgcccgcgcctggacctcgattgtctccatgagggttttgctcgttctcggaagactccggcggagatagaccatctggcgaggtcgatgtcgccgttggcggagaagatcttccagtctatggactggcgttggccttcttggtaatcttcgtatcctgtgatagatatctcaggaaaaaggtgtaatagagctctgaatttgcgtaaaaactgtaagaagtattttgtgaaatagaaaataaatctatctttaataaatctttcttactcctgatgtcgtgtgtaagagtgcgttctcagttcacgactttagtcagccgtttgagttgtacactctccctagcccccagccttgtcgtcggaggaattttctcggaggataaggctcttgtacctttgacctgccttggttgaataagctctgatcctagcccccagccgtgaagttggaaagttaatttccgatttcgcggcctggttaatacgcacggcgagaacccttacacgaccagatcttacatggtctttagtctctacaggatctgacaaggccttatcggctctgggcgtccccagccgaagatcccttaggttcctcggaggccttgtcaagatggcgtaaagggacatgaggacaggtttcaacgctaggtgtcattagggtaagggatcatcgggcggaaacactttgactgtaatatgggcctaagaataggctttattgatactgtaaggtgtcttacaggtatggatggtattgactcatacatagaatttacgtagttggtcaatgttccaagaatttgctaactcgcgaccatcaccgtctgcgattttgaatgcgcctggccgcaagacttgtgtgattgtgtagggcccttcccattttggtgagagtttgtttcgccctgcttggctttgaactcgtcggaggacgtagtcgccgatcgaaagtatgcgtgctcggatgcgcttctcgtggtaacggcggagggcctgttgattgccgactgctcgaacggcaactcgttcgcgatgttcctcgagtagatttacatcgacgtttcgctgttcctcctagtcctcgtaggagtgcttctgtactcgtgtactcggatgtcgtagctcgctggggagcatggcttcggagtcgtacacgaggaagaagggtgtttccttgttgtcggtgtggtgcgtacggtccatagtactgacgggagttcttcgacccattttttgtcatgtgacatgagcctgtcgtagacgcgggttttgatcccttgtagtactatgctgtttgccctctcgacttgtccgttgctttgagggtgagagaccgaggcgaagcatatcttgactcccagcccgatgtagtaatcctgaaaatcagcgctgatgaactgggagccgttgtcggttatgatggggtgcggtagtccgtatctgcaaaatatctccttgatgaatttgatggcgttgtcagcctagatttcccccgtgggtactgcttcgatccacttagtgaatttgtcgatcgcatttaataggaacctgtagccgccctgtcctcgtgggaatggcccaagtatatctagcccccagcacgagaacggccaagtaagaggtttagtctggagcgcttgagctggtagctttgtgtgtttacagtggaattgacaggcttcacatcgctggaccatgtggcatgcatctttaagggcggttggccaaaaaaaacacttgtcaaaaagctttcccgaccaatgttcgaccggcggcgtgtgacccacagatgccttcatctatatcaaggaggaggtgtctaccatcgtcggacgagacgcatttgagaagtaccctgtttggcactttcttgtatagatcgttgccgaccatacagtagattttttctttacgggttattttctcagcctctgtatcgtcctcgggcaactcctcgctgttgatgaatttgattagtggggtgcgccagtcgtctgtggtctcgatgttggcaacggcgcgttctgcttttgtggcctccgagctaatgtcgggggtggccgagctgacttcgccgctaacctcttttactgatggcttcgtcaggatgtccagaaaagtgccgggctcgagcggttgtcgtctggacgcacgtcgtgctaggtcgtctggctcgatgttgtcctggcggtagatgtgtcggacctcgatcccatcgaaccttttctctagcttcctgacttctgcgagatacttggataactcagggttagagcatttataatctttgtgcacctggttcacgactagctcggagtcccctttgacgattagtcgcttgaccccaagtgcggctgcagctcttatcccggcgagtagtccctcgtattcggctgtgttattggtcgccctgaagttgaggtggattgcgtgcttgaattgatctccggagggagatgtcaagataaatcctgcccctactccttggctgttgagtgcaccatcgaacgccattgtccacgtttcgttgtcgacttggttgtctgatttgttatcaggcatagtccagtcggctacgaagtcggcgagtacctgggacttgatggctgttcatggcgtaaagtggacattaaactggctcagctcgactacccatttcgcaatgcggctgacaacgtctttgtttctcacgactgcaccgagggggaaggaggagataactgtgactctgtgggcttgaaagtagtggcgtagcttccttgatgtcatgatgaccgcgtaaagtagcttttggatctgtggatatcttgtctttgcgtcgtggagagcttcgctgacgtagtagactggtcattgtaccttctctctctcgacaacaatgacggtgctaacggaatatggcgtggcggcaatatagaggaataattcttcattaggttggggagcaacaagtacaggggggtctgataggtagcgcttgagtgcaacaaatgcctcttcggcttcctgtgtccatacaaatgtcttgtttcttcagcagagcaaagaaaggttgccctcgttctcccatcctagcgacgaacctactcagtgccgccatgcatccggttagcttttgtacttccttgagtcttgtgggtgacttcatgttctcgattgccttgatcttctcgggatttgcttctattcctctgccagaaacaaggaatccaagcagcttgcccgacggtactccgaacgtgcacttctatggattgaacatgaggcgatatcgccagaggttgtcgaacgtttcccgcagatcgtcaatcagtgagtcgcttgtcttggtcttgacgacgatatcgtcgacgtaggcctcgacattgttgccgagctggtcgctaagtgcgccctagaccgtgtgctggaaggtattccctgcggttattagtccgaacggcattttcacatagcagaatactccgaatggcgtgatgaatgctgtcttctcttcgtcctcttttgccatactgatttggtggtagccagagtaagcatcaaggaagctcaacagctcacagccggctgttgagtccaccagttgtctattcgaggaagagggaagtgatcctttgggcacgccttattgaggtcggtgaagtcgacgcacattctccattttccgttggccttccgcaccatgactagattggctagccactctggatgaagtacttctctgatgaagccagctttgagaagtttgtcgagctcttctcgtatggcttgttttctgtctggtgcaaatctccgcagtctttgctttactggcttggcatcgggtcgcaccatgagtttgtgctcaatcacctccctggggacccccggtatgtcggacggctgccaagcgaacacgtcagcattatcgcggaggaaggtgatgagcgcgagttcctatttctcgcttagtgttgccccgatcttgacggtcttgtcggggttggcactggagagtggaacgatcttgattgcgccgtacggttttggcgccttgtttgtcttgcacactttctttggtggttcagtcgtggcgggtgggctaggtgtttgctcgaccatgtcgaggctccgtttgtcgcactgtactgccagctttgcgttcccttgaatagtgattgttcctttcggtcccggcatcttgagcacttgatacgcgtagtaagatccggccatgaacttcgcaagtgcagttctcccgataatggcgttgtaagttgtatgaattcaacggacatcaaaggtgatctgctctgttcagaagttgttggcttgcccgaaagtcacgggcaacataatcttgcccaatggtctgtatagtccgactaggtatggaatgtcatgtatagatagaatatctttaaagagactcgggttaagttccaaacttgtatgttaaggaaatatccgggatcctagttggttacgattaggtcatatctgcaactacctattccgttagggatatgagctgtattttgtaatacggactccttctcctatataaggaggggtccgggtgcctcttggggtacaacattctactcttagatcatacgatcaataatagactcggcggaataatccccggacaggagtagggtataacttcttattaagaaggcctgaaccagtataaacttcctggtcttcaaacccatcaacttttctagcttgatagccacccccttttagtattgccgaaatcttgtttcgtcatgtatcattgtcattttcatagccttcatcatggcgttgcgaatattgtgaatatatcaatggatcaacttgcatgccctaactgtgagcattcttaaaactccaaggtaaaaagagataaatgctgaagtgtgattcatgcatatgtacatattgctcctcccaaatggacatcatgcaggatcgggactaagacaacacattaaaggctctcatgctatacgcttcttgcagctgtagttaaacaagggcatcgagcagtagttcgataacaataagattcattggcaccaacaaaaccccatccattctaataaatatggcacgcatgtattttaagatttatctttgaccaagaattagtttaaatttacaaagatatttgatagaaaattagcatcatttcaacgtgtttttcaatacgaatacaacaattctatgtatatattactagtcatcaacctgtgcacttgcatgggctagaaaaattacgtgacatcaattaactagcatggaagctttattggtgcctccaattactgaatataagattttttctttctttctcaattctttcggtcaataacgagcatgtgtgttattcatagaaacggaggtaggtagtatttgtaagaagtacggtatcgactttcaaaaaagttccgaccttgtgcgataatatacacacatattaacctacataggcaagctagccagacctagaaatataccatttctaaacctattcggtcacttactcacgttggggagcctaactaaactaacatggactcacatggcatgcaagctagccatggtactaactcgtctactacgccatagtatgctacaaacacaactaagttatcttatgaaggactactcaatagtacacataaaacaatgttactcgttgccttttaccttcatttgacgggtacgagctaagtgtatctgaaaatcttctcttctgtccatcggcgaaagcgtacaattgtaaaattgcctggtacgcaggactagatatgaggagtttgtccagagattgtgcaacaaacatgtacatccatcaactgtatacatgcataggatatatacatacaatggaggtagccatttgagattgctagttagcgcatacgcgcgagttgctttcctagcgcatacgtacacgtgtctctcgtggagcgaacgagagaacggccgtacgacgctttcatcggaaacagaaaacgcgattagcgtctaattaggcgcagattaaccgagaaaactacgtctaatgcagttttagataatgatagtatgattttgtatatttctatttttttcaaagattttattaaagtaacagattgaaaagaaatctataggtgaaatcaaaattttaaaacttttaacccagatttggaacattgaactcgaaatttgaattttattgaagtcaaattttgaaaaatttcaacttttcatctcaaatttgaaaaactttcaatccagatttgaaaacattcaacctagatttgaaaactttcaacacagatttgaaaactttcaacccagatttggaaactttcaaaacagatttaaaatctttcaacacagatttggaaactttcaaactagatttgaaaacttttaactcagatttaaaaactttcaattctggtagaaagttttcaaattttaaatttgaaaactttcaacccaaatttgaaaactttcaaccaaaatttgaaaactttcaagtcaatatttgactgttaagttaaaataaaaaaactttcaattctacattttgtaaagaagtgtgagaaagattaaaaaaaatgggaaagaaacggcagaaaaaaaacgtgtctaaggtcagaaaaaaaagtacgaaaaggagaaaaaaagagctcggggaggggatagccggcatgcgcgccagctaaattgatttagctggcgcgtacacgcccattagcaatccccggtagccatttgcactatatccataatatacaagtaggcagccattcgcaccttatccataccaggacgatccatttgcaccttatccacattatcacataatgcttctgcctataaatagtagcagcaccttacattcaagaatcacctctcaacacaaaactaagaaacatagctagataaccagggaaggtagcatcagcaacaggaggcaatggagggaaagaggactaccacttcgatggtaatcatttgcctggtcatcttgagcctcactgtcgactccgccaccgcagcacagtgcggctgctgcatatcctctcgggcaaaagcatgttgtgttggttgtattgctgctggtggctccaactcagtctgcaagaacacttgtcgtttcccatgtattctggccgattctggtaaattcactattgtcactcttttcaatgcatttcttatatgtagatacagactttgtagcatatcgtggactaatacatatgtgtggccttccatgcattttcctcaatatagtttgttgacttcacttcccatctgacaacttcaggcatatatcttgcaacatgaagacattttatgctctacttccactacaaaattaattaactaatgcgctaatgtgatttccatattttaatttcacagttgttgctaagatggacgaaatgggagttcttgctaagatggaaggacaagcctaaaacaacctactcgcattgctaccagtcttaatgcctttcataagaatatgttgttttgcttcaagttatggccaagttatgttaatgtttatctccaataaattgttgaccatatggagcgatctatagtcgatccatctgttggtcccaactatttgtatgtcgtgcatatgtgcgctcacaagcatatttaatttctcttgctacttttaataaggctatagcactatccaatgtgtcatctgttggtctctgaccttagcaatttaatgcaacatgattattattatttgtgtgtgcatgttctttacttaatttattcttagcgtatttctgatg

SEQ ID NO: 6278 - DNA, 5169 bp, Oryza sativa
tatactccttcaatgaggaatgtagtatatatacactgaccaaagagcaggttataccgtttgtagaagaaataagtatataccactccgagtagctgttcataccgattggagaagaaataagtatataccactccgagaaaagtcagtatatatactcgttccaaaaaaaaaatcagtatatactcattccgagaaagaacagtatgtactcattcgctcgttgcagtagtatatactgcacgtaccaataaaaagacataatcagtatatatatactcattagttctggagtaagtatattcggctgctaattaaaaaaagaagtattcactgctacaacaaaaatataaggtactccttattaggtactgctaatacacaaaaaactactatatagtactgctcatcacttcaaagagtatatatactgcggcttaaaaaacagtatatactgttgcatactagaaaaggtggggatatctaaggtacgttatcaaatttgaaagcaaatgcatgccaacaatcttgttcaaatctgcacccaatccggtgtgcagctatgccacatgcatgcagtcatttggaaattaatattattaatttttttcatagctaatttgaatgctaatggatcatccattaataaaagggtgtacatacacctgggcgtatgaaagagccatcatatatatatatatatatatatagatatatataatgcatatatatgtattgtaacataaaccctaaaccatgcagcaatagggccatgcaaataagaaaaaaattggtagatcgatctttagtccaggttatttcactcaggactaaggatagcgatctttagtcccggattcgtagtcccggttggataaccgggactaaaggggggttacgaaccgggaggaaaaagggtttctccaccagtgtagctgatgctaatttacgtcatgaaaattgaattttaagtcatgttgtgaaatctaacgttcgtgtgacaaatatcattcgtcacctatgtcacaccctaaaaatccgaaatatataaattgttgtttaattggaattattagaattgatattaaaagcctagaagagaagatctatttttaaataataaatttcaatataaaattgggccagataaaattttattaaatactttgcttaattctatagttcctagatttttctgggatttatttgagccaaggaagtatttttaatcaatggaattgcatttcatgaataatttaaattgaaaaaggttttttaaatcctcttttggctttgggccgaaagtcggcccaaacccctctctctctcccggcctaggtcggcccgcagccgagcaccgtctgcgcgcgcgccctcgcccgctgataggtgggacccacctgtcagactcgtcgtcttcctcgcgccgtcgcccggccgaaccctagccgagccacgccgctgcccttccaaattcgatcgtgtctttcccgatccggtgaaatttatagaggggaaatgatccccgagatcccctgtaccttttctcttttggaatcatcggctaaaatcgttcggaaatccatggattcgaactcgaatcggattcgtctctctccccgaaccctagactttccattgctgccgccggtcgccgtgggccttcgccgccaccccctagccgctataaaaggacccccggtgtctcctctacccgccgccaccctcgcctaagtctcttgtcgccagtagagccctagcgtcgtgtagtctagcgccgccgtcgccgccgttcgtccagccgtgcgccgccgtccttccggtcgtcgtcgtcgctcgggaaagccgccgttgtgatcgtcaaatcatcgccgacctcgtccgcctctccgccgtcgctgtagatcgccggagccccgccgtcgtcgtcgagctgaaggtgaccaccgcttcttcctcgtcgccgtcgccgtccgttgaccttccgccgctgctttggtcaccggtgagttcgccgtgtcgcccgcaacccgtaggtgtccttcattcgcgccgtcgcgccgtcgttcgccggcgagcacgcgaggccgagccgccgtcggtgatgacgtcactgctgatatcatcgacgccgtccaccgtagaccggtcgtagaccgttagatcttggtccgttttggatagatcgatctcggccgttcgtttccgtgaaccaccgccgtgcacccggtccaccgtgagccgagtcctctgacgcaataatccctttttcctttttaaaaataattcattattacgtcataattcaattaaaatctatataaatgatttaatccgatttaatctatgaaaattcataactaattcatcttagctcgcatttagttggttcaagtctctaaatttttctaaaattgagatctacatgttaaaaatatccacatgtactgttcaggcttgtttatgtgctgttttggtgattttgctcttttctctttagagtccgacgttcccggagagtccgaatttgcaggagaagactttgaagagttccaaggccagcaaggcaagtcacacagatcccaaacaaccctttgagtatgttgatcccgtttaaagctattgtttctattcaactattgcatttattttcgaatgtcattgggtggaattaacctattgccttgttatagcccttttgttcttgattactctattccttgataccttgggttattataacttaactagttgagctttatatattggttcagctagatattagacataattgcttagccatgcttagaaacattagcacactattgggataacttatgcttcactattatttaatgatggcttaatgatagctcatgatggttaatcatgattggttaagtaattaatttgccaactaaaacctgataatggtgggttgtgagcatatggttttgatgggttgtgagcacacgattttcggttgtgaaacatttaccgtgtcaaccacaagccagcgtgggcaacggctttactttctatatagtatggttcatagtagagcaccagagtgtgaagtggcggagataagcccacgggggtcgctggggagtccataccttgtttataagggggtgattatgatccgggaacggtgcactgctttgaattgtattatatagagggtattgtcacaatctctattcgggtacttgtcaagtatcgcgacgcatggttgacatgatgttgaggttgtgtctttgtgggtacagtggtacacctctggccagagtttaaactattagaatagccgtgcccacggttatgggcgggtctaacaatgtctttcgtgattagtctcacacctctcaccatactaaatgatgctgttaataacttgatagctcctggtttggaatggttaattcctggtttggagatagaactgtgcagtcgggactggttgttcagaatggttgggcctatgcaacagggtatgttgtatagcgttggatcaatattgtttaattattatttaactattttattaaattctgaaataattgttacatgctatttaagcaattgagactatactatgccatcctttgttatcctgtgcacttgcttaattgttgcgtggcttgctgagtatatcatatactcaccttgcaatcattcatcagaggaggagttctacagtgatgctgatagtgtggatgattaggcgtagccttggtcaagttgcctgtggagaggagtcgcctgcgctgtttcttttattttccgctgcttagatctttattgattgagaggaactatctacctctgtaatgacattttattcgcttattaattagagtaataattgtgctctattatcaatttgttattgtgtgcctcggctgattccaggacgagggtttacacacatgtaagcatttggaattttggatagaaattccgggcgtgacaacctatcatgcgtctctaatggcgttctataaagaatgcttatcttttcgtcattaatattgtgatgatccttctgtcgtcatacagtctatgacgtccatcttcgtcactatcaagcccagaaatcatgataagatgccatgtggcctgttaaggcccatgtagtcagggccgacgagggggggaggggggagcgggatggccgctctaggcccccacccacacaccttgtcaggtcccaaaattaaagattcggtaaccgacatgtttaaactgtatcaagccctggatcagtagattgatacaggttcaacaatctgaatcttcatcgcatacatttgatcaaggctccaaaggtgatttctttacataaaataatagggtatttacaagattgtggctatctattactgtagaagctataggatgagccaactctaatgttttgctatagaattaaaccatctatctaatctatacttgggaactaagttggaatgaaactaatttatatgtttaaactcacggcttcagcaaaaactccaaattgattctcaaagagagggttaaagcaatggtgagtacaacatactcatcaagctattatatcaagtaatgaatgcatgaaatagtaatctctaagtagggtttaggacttaccctaaaccctatacaaaaaggtccatgggcattaggtgaactgcatttaggtccataggcccacatggcatacaaagcaattttacaaaaagaaccttacaagatttaaatttctactaatgaaagtccttacgcctaatgaagtggctaaatagccggggcccacatgtcagtgacttggcggctagggaagcagaggcaataggagggcaacggcgactgatggcgttcgcggcggcatattggcttgatcatttttgggcgtctttctcctgggatgtaggcgacgtcggtggcgcaatggctcggccagggatggttcgagtcgacgggaatgacgaagtcgggcgatggtggcgcaatggaccgggaacgccgacgagcatatcaccaactgttcgatctatgccaaaataggaacaaagaaaatggattgattaggtagagaaggaacttcacgttcccatggttggagtgcggtgaagctcaccagagaatacgtgcgatggatgaaactccttcaggtgaaaagag

SEQ ID NO: 6279 - DNA, 7108 bp, Oryza sativa
attttctttagacaaagcatgcatatgcaccctatttaaatccctcttcctatctttggcgtgaaaccaagcaaactcctatccctctccacgcaggcccaaaggccagccgggtaaagtttatctcttttccctcccctccctaaaacgaagccaacaagtctagtttacatcggtctacgaaagagccccagtccacccctgcctctgccgatgtcgttggtgctgatagatgcgatgcccacacctcagggattcgcttgccgtggtgtgcagccggtgaatcttccgccgcctcctgtccttccgtcgtctaacgaggaatggttttaattctcctccgatttcccccattgctacataagttagtgattcattggtagatctgcttgtggttgaatgtacaagaatgcttggtagatctgattgatgttgaatgtgcaagaatgcaagaatgaatggagtgaactaaagcatatgttctggtatgcatatttcaaagtactgcgcatatgtgtattataccatattgtattatgtacttatgctgtgaaattatatgtggaatcctccactacatattttctcttggttaattagtttaggaaaaattgcaaatatgatcttgtgagaatttgtaaagtacatagaaggccatttgttttgacaatgaagtatggtttgttgtttgttgatttagatctccgtaatactgcctaaatttaaatgtatgtttggtgaactgaaattagatatggttagtgctgtcataattttttaatgactatttgtccttgtgagtaaggttgccattcctcggctgtattgcctttagtgtggctatttgtctcccaagactaagtgtcgtaggctctccggaccttccattatatttgagatgaagtgaataattcaagtcatcaaacaagcataatgaaacatccgacgcctcgagagaggaatattggagacattgctgagcccttagcctgccagtcaacttcagcctgagatgtgcccgtcaaaccactcgaaggcggcgaccagatgtgttacacattcaggagacttgataaaaatagctaaagatctacaacctctcaaatattcctaactcatactcatgtgaatctagttcccaggatgtgcactagattcacactttcatcttaagcatgattacacatagcaaacacaactaagatgaaagaaacttaagacttacaacaacttaataattacataggccaaccggccaaatagacttattagagaacagcggaagcttgactacccaatcacaagcacaccgactaggggtttaccccattaagttctcatcctagaagaagcaatcggaacccgcatcactcaaagactaagactaaacctgcaaacaaaaggttatatcaacagcaagagtcagtacattaaacaagttaatgtactggcaagcacaagtcaatcctactatactacatgtaaggcatatattcaaaggaagacaatatgtagttcattttcagcataaagcaagttttgtttcgcaattcttttgtaaaagagttgatgcttcaattaacaaagacaagttttgagtttcattattaacttcttcataattccatcataaacaatctcttattgccatacttaacaataagtcataatgtatcaccacatacacaactcaacacatttatcaatttcaaaccagtgtcacatgatcacatttttaaaacatagtctatactcatgacacatcaccaaagcgctcatgaccgtgagcacggctaatcgattagtttaaagaactctgcagagtttgtacagctttacccacatgatatgaactctctagtttgttttgagtttgcaagactccaccacactcttcatgttgaatgtgatctagaggtcataacgaagcctttacactacttagagcctagccttgcaccagcacgatacgtgttcctccatcctaggcatacttggaatatacctagaaccgttaagtggcgggcccacgccttaaacttaacgccgtggtggcggacacgacgggaacccaccacgtggcacaataccgttgtattggacacgcttagtcacctaaactaccacgtcggggtaaataggaagctcctctgaattatacgaactcatacacaccggcctaccagaatgcaaggctagtcctaaatagattaatcagcttaggccatcccatactagcacatgtggatgtacgaataactttaaatgggtgacacaagttcggtccttatggacttgggcaaacactccccctatcggtatgcaactaacactgtatgcacaccacttgctgcccaagtgtaaaatcacattttacacattttagttcgcaaatacccatcatattcattttattctagcgaaggttcaagtatcaaaaccacattttaattataaatggaatgagcatttgcatatttctaagcatggctaagcaaagtagttgcacatagagcatatataaacccatttgagcacaaagagtgtactctaaccatttctaggggttcaaacagcaagaggatcaattattcaaggtggggtatgcagcaaataggtcataactaccttaacccaatttcaaataccgatataatctaagttcacatgcaactttgcaaacaaatattttcattcctcaaatcatgggattcaatgtgttcaaaggatgggaggagaaaacttgccttgatcagagaattgttagcacctaatccactccttcaccgattatgcaattatctagataaaaggacacgatatgcaattaaacaccgaaagagctgaaaatccaaaatgctctaaaatgcatgatttatgcacagtgggttggtactgatctaaaatgaatttaggtgaaagaatttttattttaacttattccattagggagttatgaactttttagaagttttatcggtttatagtagtatagtcttaggtagtgttatgaaatacttttgtaaagtgatttttactagattagacttcacaggggtgtggagatgtgttttctaatactaacacatttggtttcacaatttttggatttataatgaattctttatgcattttacaagttataacgtgttattggtgtatagtgttttatatgttcatgacttttgagttataggttcagaacatgctacttcctgtttaagttgaataaaaggaataatttggttatctaaaacatttttagttcacatgtttatggtctttactagtatggttcatattttataaactagagatgctctaatctaaactagcaatatattatattaacctagaaattgttatatgagccaagttcttctaagttttagtggatgaggatggaactatggcttcactggtcaatcaagtttttatttaggtttaattagacctaaagtgtatatatatacttatacatgtttatgtattacttaaacaacactatgtgtttaaattcttatttcactaagttaaggtttcgatctatgttctctacaaaaggtgccaaattttattttaccatgttgaagataactattttctggttctatagaaactttgttcatttcatttggactaaaaataaattttctacaagttttacaaattaaaggctgctctatgttagtaaatccttatatgaatatttagagacttttactacacagtaagtatataatcttatttcataacttagaaatacatgtttagtgatcctacagaacttaagtttactcaaattgaagctaaattgggttctacatgaatttctaaagtttagcttatctaaaactaatcattatagagataatagttttagaggcatttgatgcaaagtaagtaattacttttatttcacctaatcagagactgtatgatgatgaatctgtagaatttgattttgtttcaaaatgagttgggatgaattttctatgtattttataagtttgtacatgttttatgtatgacctatcttagataaattttagagacattatttgtacagtgagtgtcaagttttatattcctggaataaagttcataacttcaagaatctacagcaactagaatcacttcaaaatgagttatatttgattttatatagattttacaactttgtgcatttttctgctaaacatatttgtttgggcattttcctaattattcttcagattttaaaggatgggtccacatggctgtgagggaccaatatgcacaaaggcccttgaggtttctaggaatcaacccgcagtcctaggcccatatgtcagtgtgtttctacaattgtaaacagatccctgcacttaatctaattcacggaagtcatccctctgctctaggcagagcagagctagccatggctgagctcgatctggagctcgccggcggcaaacggtggctcgtttgaggttgaggtcaaaagataaaatgaagagaaagctctcgcgattccattcctctagttttcttggttagaggacatcggagtagcgccgatggcgagtgtgagcggcggtggttttggggtgaaagtgcatgtgtgcatggaagtcgattacgaacgaaaaggatgcatgcatgtagtcttctagacttcaggatgctcaccgtgggtcgagctagggttgtcgaggtcttggcggcagcggtgacttgtggaacggctcggcgacggcgctcctcctcgggtgaacgacgacggctcgaacgggacaatgagctgcttcaagcaagcatgcacgagggttgtgaggtcaaggagatggtgtatgcgcaaggaatcgaacaatggctcaccgaggcagcggtaaacgacgatgacggcggaggcgatccaagattggtgccggtgaagaaaaggatgtgttctctgtgttcttgatgtttccggctggggttcttgaggcgttttgaagaggaggtcgaggcgatgacaatggcgcagcggctttctctgaggtggatgagaatggccggacggcgacgatggttgaagcggcggcgctccggtgcgtgctccagggcgttgtcggcgtggcttgcgttcctggcgatgcactgcacgagaggggtttaggtcaaaagaggaaatgctcggcattgtgtggagagatgggaacgcgaaagagatggaggtgaccttgactcaaacggagatggcgaaggtcgtcgtcactacgaccagtggcgaggttgaggatgacggagaggctgaggacctctccctcggcttcttcagctccagagtgatgtgtggagttgggcgactcggtctggaggagatggaggcatgactcagtgacttgaaggcgtcgacacgtcgtcaccacgcgtcgacgcgtccaggactcggtcggctctcgatctctccctctatgtgtttcttggtcggctgaggatgagggacagaggaagggcgagctggagaggctgccaggtgggtccaggtcatggcaaactaggctagggtgagagggttgggtaagattctgggtaaacttgatttttagatcatttttttcggaattattttctcctctaactttgtaactacataattcaatgtgtagaccagaagaattagtgtagattttactggtggtagatgattacacctagattccattttctttggttgcactaaaaaaataatgggtggactgctcacagaaattaaacaaagatgggctattagaaagctagattgaatttttaggaggcttaaacagaggaggaaaattctagaaaaattatatttaggcatgataactagtctagtatttgaataaattatttcccatgttcacttatgtgcagttaaatgtacttttggatgaaatatggttttagccgattaaaatttaatttgatttcttttagttgtctgctttgaccgtttaatttgaggtatcaacttgagtgttaacacgttaccaaattacggaggataagtttgtgctaatcactatccacataaatttttccatgattttatcttgcacaaaatattttagagaattaggatgacctttgtttgtatatgtattcccacttcataattgcatttaatattattatagggattacattaaattttcttttagactgagaagatgatatttgagtttaatattaagtccacatgttatcacccaagattaactataggtttgtttagtgaaataattcttttagattatgctcatgggacctattatggaatgcaagaccaaaactccaaatgcacaaagaactcaagcctaggcatgcattatgtacatgtatgcttggtgacatttctagtctaatgttgggaatgaaaagattttattttgttctcaaattataatcatgcaatggtttaagttgatcttcacctaaattaaaacggaaatttttggctctctcaaaattggagaagttaacctctaactattttgacaagaaattttaagtcctaaaatttcgggtatgttacactaagaatacaaggaatgtgatagcagccgagaaattgaccatgtttcctcccccctccctttgctttcctagtaggattcggaatactctttggcatgacaatcttaattatctcccatagtctaaaactcacaaaaacatcagaaatacgctaagaataaattaagtaaagaacatgcacacacaaataataataatcatgttgcattaaattgctaaggtcagagaccaacagatgacacattggatagtgctatagccttattaaaagtagcaagagaaattaaatatgcttgtgagcgcacatatgcacgacatacaaatagttgggaccaacagatggatcgactatagatcgctccatatggtcaacaatttattggagataaacattaacataacttggccataacttgaagcaaaacaacatattcttatgaaaggcattaagactggtagcaatgcgagtaggttgttttaggcttgtccttccatcttagcaagaactcccatttcgtccatcttagcaagaactcccatttcgtccatcttagcaacaactgtg

SEQ ID NO: 6280 - DNA, 13926 bp, Oryza sativa
cattcttgctcaatctttcccccccttcagtaagagaagctttggagatgaagtcctaggtggagtcctggcttataccccagttgagcgcctgtgaagatggagctgtaggcccgctagtccgctgctgtttatttttgattgtcaggccttaagtgcctttgtaataatgtaaatattatcgatataataaagatgtgtcttttatatcatgtttgtgtggtgtaccccggcttttcctgggacggggactaatacactagcgttcgggaaaaggcaattttctcggtcgcgtcagaattcactatcatcctggtaaggccaacgtggtcgccgacgctctaagtcgaaaaagccattgcaacactcttaacgtccgtggcattccactcgaacttagtcaacagatggaagccctgaacctaagcatagttggtcgcggattcttggctgcgttggaagccaagcctaccttgctcgatcaaatccgcgaggctcagaagaacgatccggacatgcatggactcctcaagaatatgaaacagggtaaagccgctggtttcacagaggatgaacacggaaccctatggaacggaaatcgagtatgcgttccagataacagagaacttaaacagctgatacttcaggaagctcacgaaagtccttattccatccaccctggcagtacgaagatgtacttagacttgaaggagaaatactggtgggttagtatgaagcgggaaattgcagagttcgtggccctttgtgatgtgtgccagcgtgtcaaggcagagcaccaacgaccggccggacttctccaacctctccaagtacctgaatggaaatgggatgaaattgggatggatttcatcaccggactcccaaagacccaaggtgggtatgattccatatgggtagtggtggatcgattaaccaaggtagctcgattcattcctgtgaagaccacctatggagggaacaaactagccgagctctacttcactaggatcgtgagtctccatggcgttcccaagaaaatcgtatccgataggggaagccaattcacctctcacttttggaagaagcttcaagaagagctgggtacccgattaaacttcagcaccgcataccacccgcagacagatgggcagaccgagcgtctaaatcagatcctagaagatatgcttcgcgcatgtgtcctggatttcgggaagacctgggataagagtctcccctatgccgagttctcctacaataacagctaccaagccagcatacaaatggcaccttatgaagcgttgtatgggcgcaaatgccggacaccgctcttgtgggatcaagttggggaaagccaagtgttcgggactgatatcctgagagaagctgaagctaaagtcagaaccattcgggataatctaaaggtagcccagtcccggcagaaaagttatgcagataaccgtcgccgtaacctggaattcgcagtggatgattttgtgtatcttcgggtcacgccattgcggggtgtacacaggtttcagacaaaagggaagctcgcaccttggtatgtgggtcctttccgtatcattgcccgacgcggagaagtcgcttaccaattggagctgcccgcctccttgggcaacgtgcatgatgtgttccatgtgtcgcaactcaagaaatgcctccgagtgccatccgagcaggccgactcagagcaaattgaagttcgcgaagacttgacctacgtggagaggccagtgaaaatcctggacaccatggagcgcaggaccaggaaccgggtaatccgtttttgcaaggtccagtggagcaaccacgccgaagaagaagccacctgggagcgtgaagacaagctgaaggcagcccatcccgatctcttcgccagttcttccgaatctcggggtcgagattccgtttaaggggggtaggtttgtcgcgtcccaaaacgactctaaaatacatcctcaaaattgtgcatagaataagtaaaatccatgtgaaagcctccaacaattaaaatgtgcaaagttaaaagtcgaataaggcttggaggatttttgtatctttcctaaaagcctaaaatgcgtaaataaattttagtggaattttcagagcacaaataataattaagaagaaataaacaaagttaaaaaggttttataaaaagaaaaaaaccctaaaaagtctttttccctccccccttccccctcttgggccggctcggcccagctccctccctctctctcctctcccccgcggcccatccggccttcccccgcgcgcgcgccgctgacgggcgggcccgcccgccaccctcgctgacgggtggggcccacccgtcatcccctacctcgcgccgcaaccgccgcctcgcccgtgccctagcgccgccgccgccgcggattccgccgcatcctgccgcccccgcgcgcaataaagagggggaaatcactccccgtgattccctctccctttccccccacttttccctctctctctccctcggattcgtttggaaacactcccgcaaacttcgccggcgcatcaatggcggccggatcttccgcggccgattccccctcatccgtccgttctctccccctcccaacactatttaaacgctccccgtgcctccctccaccgtttccgccactcgccgctctctctccccgtcggaatcgagctcgcgccgtcgttctctctctccgccgtcgccgccgagctccggtccgccgccgtcgtcgccccggaccctctcccgtttcggcgtcgcctccttcggctccgccgcgacctcggcgacctcgtcaccccccccccccccccccgtttcgcccgccgaccgccggaacgccgccgtccccgtcgacccgagccgcgccgccgcctctctccgcttcggtcgccgtttccgttgtcgccgtcgacccggggtgagccgtggaccgccgtttcgcttcccccttccctcccttctctcgggcgccgctccgccgcgccggtggtcgccggcggcgaccatcggggcgcgggcgcgccgcctcccgtcggctctgccggcgtggccgccttcgggcgcgccccgcggctgccatgtggggcccggccgtcagccgcccgcgccctcgggtgcggctgacgcgtgggacccacggcgccggccggcgtaagccgcgtgcacccggtccaccgtggaccgtgaggctgccacgtgggccccactcccgtggacccggtccgcgcgctcctctctcccggctgacgcaataaatccgattttaaattaaaatttaaatgaagaaagtcgcaaatatccatttaaagagcatataaacttcaaatgaccataacttggccatttgaactcggaattggaccgttcaagtctctaatttttccttaagaagccaagaacccatttttgtgctttatttcggtttgttatatggagtttagtagagtaaaagccttttcttttccgttggtcgtgtagacgctgcagcttcggaagatccgctcttcgtggaagttgaagccggcgtttgggaaagcgagcaaggcaagtcacatcatctttgaacatattgaatcccagtttgtaaaattatgttgatttaacttattgcattatcgctttatttaaattcccgcgttatcactgtgttatttagccatgcctatttacctttgttatgaccttattattattggtattgttattattaccttgttcaccctagaaccaacaaaaccccaactagtggacactctactcatggtaccactagtatgattttaggtagatgcttcgctttaattaggtaacattaggtggttttacaactctagactttgggaatattcatatcacctggatactttggaatggtttggttattgtggaatgggcttcacaccgctccttctattcaaaatccccaaaatggttttaggctgggctcggggtgcatggttttgatagtagcacctcagccatataaggaccggtcttcgggcctctgttgcaaagcactaccgtacttccacatgtctagtgggtaaggcttagtttgtggctcagtctggttataaacaaaagtacacggattagagatggacgaagtcgggggtcgatggacatctctaggacaaatgaaggctacacgggctgcggttcggtagtcgagatgtcatggcacagggccggtgtcctgctgctaggggctcagtcctgcctacctgtcccgggagttccggccgtaggtgggattgggtcggtactcttgtctatggctaggatgggttggaaactatgtcacgtcttccgtctgtataccgtggtggtatgtggcacgtggttacacgtgaggaagatgtgtcttgtgggtaaagatgtacacctctgatcagagtataatctattcgaatagccgcgccctcggttatgggcaagccgagcaatgtacccaagttagtgttttaattcttaaaacctgcttaacaactaaaatgtggaatggttggcctgggttggcttgggacgagctgggacccagggtcgggttgccagttcggtctgaatcatcgtaggccttgggttaaggcaggttcgtgtgggttcacggccttgataaataatattgtatagttctagaatcgtgtttacaaaatagctttgggcaactaaatatctttaaatagccgtactcatggaattgagtaccgggactcatatgacaccttggttagaaatctaaagtctatatgtttataaattcttgctataactcttccagattgcttattactgccttttgcaaagaaccctactatatgtcaatacataacatatttccatgatgacttgctgagtattgcgaatactcattcttgctcttataacccctttttcagatctggatcaagaggaggacccttatgactattactacgatgaccccgataatttagggaacccctaaaggttataccttcctagtcaaaatgtactaaaatttccgctgtgtaatattagtacttatgtaggtaagtacctacccttgtaaaaccctagcattgtaaactttaatgtatgcaattaagaaccagttatattgtatgtatcaacatctactgatccagggatcgattcattaattttagtcggatccaaatttttagtttcgggtcccgacattggttgaaatctatattgatgatgtggtcgttaagtcaaaggaaatagatgaccacatagccgatttgaggaaggtttttgagagaactaggaagtatggcctgaagatgaatccgacaaaatgtgcttttggcgtatcggctggtcagtttttggtattccttgttcatgaaagggggattgaaataactcagaggagtgtgaacgcaatcaagaagattcaacctccggaggacaagaaagagttgcaggagttgatcggcaagatatatattgttagaaggtttatacctaatttgtctggaaggttagaaccttttacacctttgttgagattgaaagccgatcaaaaatttacttggagggcagagcagcagaaggctttggataatattaaagaatatcttagttctcctccagttttaatccctccacaaaagggaataccttttagattatatttatcggccggtgagaagtcaatcggctcggtcttgattcaggagcttgaggggaaggaaagagttgtgttttatttgagccgtcggcttttggaggcagagacaaggtattctcctgtggaaaagttgtgtttgtgcttatatttctcttgcataaggttaaggcattatctattgtccaatgaatgcactgtaatatgcaaagccgatgtggtcaagtacatgttatcagctccgattctgaaaggaaggattggaaagtggatatttgctttgatggaatttgatcttcggtatgagtcaccgaaggcggttaaggcacaagctatagccgattttattgttgatcatcgtgatgactcaatcggctctgtcgaaattgtgccttggactttgttttttgatggatcagtgtgcactcattggtgtggtatcggcttggttataatttctcctcgggaggcaagttttgagtttgcctatactatcaagccctatgcaactaataatcaggctgagtatgaagcggttctcaagggcttgcaattgctcaaggaggttgaagccaatgctgctgaaattatgggtgattccttgctgttgaaattatgggtgattcaattagtaggagaatatgagtgcaaaaatgatatattaatggtttacagtgagaagtgccgagagttgatggatggatttcggctggtaactttgaagcatgtatctcgagaacaaattgtcgaagctaatgatttggctcaaggggcatcggaatataagccgatgatgaaggatgtcaaagtagaagttgccacaataacagccgatgattggagatatgatgtttttcgatatttgcagaatccgtctgaatcggcttcgcgaaagttacgttataaagctttaaaatataccttgttggatgatgaattgtattgttggacgattgatggggtattacttaaatgtttgagtgccgatcaagctaaggttgcgataggagaggtacatgaaggaatttgtggaactcatcaatcggctcataagatgaagtggttgctttggccatttagaggttgattctggggatgctataaaatttgttcaagagcatattatttatcgatttggtattcctcaaaccattacaaccgatcaaggctcgatcttcgtgtccgatgagtttgttcagtttgacgatagcatgggtatcaaattgttgaattcttcaccatattatgcacaagccaacgggcaaccgaggcgtctaacaagagtttaatcaagttaattaagagaaagattttcgattatcctcggcaatggcacacttgattgtggtcctataggatggcttgtcatggttcgatccaagttcctccttataaacttgtttatgaacatgaggctgttttaccatgggaagttagaattggctcaaggagaacggagttgcaaaatgagttgacagccgatgagtattataatctcatggccgatgaaagggaagacttggttcaatcgagattgagagcccttgcaaaagttaataaggataaggaacgtgttgctcgacattacaacaagaaagtggtgtccaagtcttttttcggaaggtgaacttgtgtggaaattgattttgccgatagagactggagataacaagtttggcaagtggtcaccaaattgggagggactgtttaaaatccataaggttgtatctaaaggagcttacatcctacaaggacttgatggggaagtttatggccaagcgctaaatggcaagtacttgaagaaataatacccaagtgtttgggttaatgcatgatcggctggtgttgccgatacatgatagccgatgtatttacatcgccttgagatggccgatattgctatatcgcccttagttgtttttatgttgtaatcggttgtgatttgccgatgtacaatggccgatattgttatatcgcccatagttcaatttataattttatcaatgccttcgtccttgtaaaattaggggggcacatatatagaaaagttgcaaatttgaatttttgagtttttgaggaaattttttgagcaaattgaaagttatattaatcggcacagcagtacagtgatacaaggagcattaaagtttgctagccgattacaaagataagttatcctattacaagaccaatcatccagacaaataacactggatagccgatacaacccgttgtctaatttgaactacttcttcgatggcttggatgtcttgggcgtcggttccagggatgattttgagggacttggtcatatcagccacattctttatagccgatttaagtatggatttatgttcttcgacagcatttggaagattggctaacttttgcttctgcagatccaactcagcattgcattcttcaagttgagctattagatcaatcttgcgggcttcaagccgatctatgttcgattgaatcggaccagtagagagttgatcaagcttggctttctcctcatgcacaagctgccgattggcttggatagtggcttcaatatcttttcgctcccgtcgatcagctattctttgcttagccttctccagcttgaattgatgttgctcgaggtatacagctggagtaatggtgttcgccagatcatccgggattaaggcttggatttcagcaaaccgtgcccggattgagccacaatcggccaccagattatccaatgatgactctagcggaagggatatgtcttcaagtgttttcttgatagtttcatccagagggtctagagccttgctagtggtttcttcctttgtctcatcaaagtaatcctttatatcaaaagagaacaaatcggctaaggcctgcaaaagagaaatccgaagatagttaaataatcaaacaaatttagccgatctaagatcttattatagagagaaacttactaggatggcaggagcggctggttgttcttcttcttcatgatgatgacttcctgtagccgatggggtacagtcacttgacatctgctatacaggtggggaaggaggagcaggaggctgcaaaaagacaaatgttaagtaaatatcagctatgatcggataaatggaaggatttatataggacaatcttaccggtggagctggtttaagtattgttgctgccgatttcttcctcacagcagtcttctttttctgcaaaagtgagatttataagtgatcggctatgaatgaaataactgcaaaaggaaattagtatgagtggtttacccttgagaaatgagctagggtagcaggagttgggggagtttgcttgggtgaagccgatggtgttttttctgtatcacttactttggctgcagcttgatcgacatcttcttcgatctcttcttcatccagggcttgctcgatggatggatctaaagcaggcaagtcatcggctggcttaggtttgttcttcttggtcttcttcttgggagccagagctgattggtcaatagccgatgccttggcctttctcttcctgccaacatcggccggttctctcatctgtccttgaagcagacttgaggtcttgggggcatggtagccgatgacaggaggagctaatccacctccgtttggtagaaggcatggagcatattctatgtccctgccgctattgctcttgcgaggaggagaagattctgttgtctgcaaggtaaagagagaagttagtcaagattcaagtcagctaataattattcaaacaaaattggcaaaataaagatgtacctgagggacaacatcaggaaataggtctgtcatgtacatagaagccgactgatggaatatatgttgcttccattcgccccaccatctgtcaaaattcctactcctgagtcttgccaactctatgttctcgatgctgcccagagggggtgatgtgcactagggttcccgatcttccgaaaggtcctgataaacaacggtttggacggagtcgcgacacagatcgacccggcttcttgaacgcgcacgctcttgagccccgcaatcgcagcaccacgtctcctctggttatcacccgtgtcgaaacgtggatgacctcgccgagaaggctaatccctgtttgccaatcgaagaacacaaacaagaacgggatagaaaaacaaccaaaattgcatatgaatgattaagctcacgagttggggtcttacaaaccgatctagcggcgaaactgttctcgacagattaatctaagcaaaacccaaaaacctaaagatgttggtgggtactgatatatagagtttaggtcgtgtaaacccctctcgacgcaaccctaatgggttccaacacgatacacgggccaaaggcccaaatacggtgacgcagcaccaggacagattctggacgtcaaattgttcggacaattcccgttgactcggaaagaatttggatgtggaaccaaaaccattggaaaggttttcttcttagctttccatccatataaagaacgccctaatccgagcacgtatgtgacctgggcacccattttagtgtagactggtcctggactccgaattgcacccgatgtcgagttggtttgggcctccaccttgacttggacgtccccgatggtcctccatggctctaagtatttctccaagtgtctccttgtcccctccattgttcctaagcacaatataatcattaggtagcaagctattcttgaattcatacaaagaagaacataggaatgaactcacctctaaatttaattgtcgcgcacgagctcttgttatcgggccttgaatgaccattggaggattgttgtgtgtatctgaggtagtgatgtccgcatcagggggtcctgggatattgagtagccgatccatcatcagtgtggatgagatctcctcgcttcattggattttatcggcaaagaataagccgattggcgtctatcccattccaaactgtctagcatgggcaccaaacttgtatgtttcttccttgatggatgccgacaggaaggatgcatggactaatagcagccgagaagacttatctggacttgtcaaatttttcggaattgatatcctcaaatctgaagtctgctgggatatccaaatttacttaatcttcgtatgggaaccaaactcgagcatctctctggaagccttcataaaagctacagaaccaatccttgagcaattcagccgataactttgctccagcatcggctggtgtggatgcatattccccataggacatacacctgcggtgggtgcgctcttctccatcatcattggtaatcggctttaatcttggaaactcagcttctgtcatagctggccgattgacagctttcatggctaccaggtttagccaggtttgcagcaaccaccatggcccgcctacactaacggctgagcagacaacaattttagccgatgcattgttcagcatttgaaacaagtagccgaggaggatcttgcctaaaggaaattgcctctttgattctaaggcttcagctaaaaactgccagttggttgtggggccgcaacttgatccacaaaaaaggaatttctcaagccacatcagcagaaaggccacatgttctcgggaggtggcaggtcctttgcccatatatgctgctacataatcagaccagccacatatgctcttagttctgaagtcaaactggttcttggtgttcaagctcatgaggttagccgacgaggtcatatccaaaccgatgatcatggtgatgccaagcaaaatggggttcatcggcccttggttgaacaggaaagcattaatggtgttggaccaaaaataggtggcagcggccatcaggggttcatctttagctgaatttgctatggtaaggccaagtgcctggccgatgccgatttcgtcccaattgccctgcttgctacccgatacccgtttatgccacacagaccaacttttctccgtagtggttttctcaagagaaggccaagacataaaggtgtttttccagtgacctagatttgggttggccaatctaaaagggatcctattggtttcagcgatgatgaactcggtgggatcaagattgccgatcggaccaaggaaataatggtgctcatgtgacagactcgggatcgtgtccagattggacaagtgctacagatgtaaacaagaatagagaagaagaaaacaagatgaggcaaggaagaaccaatctattgcgaaagaagaggatctagccgatgggtacttaactctgcgtattctgccgatggcgcgacggatggactggcggaggacgacatctttgcgggcggatgcttggccggagaggaaatcatcttagggtcgtctggtgcacccaggggatcgccggagagagagaggacgaagttggcttaagcggtgaaaaaggagctaatggtgtgaaatttctcggggacgacggttagtatttaaagcagcgcgataacggtcggaaaaacggaagtgcgatattctctcggagatgagatatggcaaatccgaaacattaccaaatattccggacttggggtcatgtgttaacgaccaaatttggtaatccaagtatcagagaagaagataggatcgaagcggaattcaagatagaaattaatctagaaacagagtgaggatcggctaaagttcgaatcggctatgacaaggatcggcagaattcgagtcggactaggttggctgattcagccgataccgacaatgtgacgtggtacatgttgtcgggttgagttaatatgcttcatgaggattgccgtgcatggattgaatcctgagaaggcaattgtatctattaattaggatatttcatgtaatttccttagagatatgtttgggcaaaagtctgccgaaaaggattatggtatctttgtcgacgggtggcacccgtagaccggatatattgggtattggggtatgttggtacaaggatctacgtaatacgacatcaagcaaacaaaagacaaggattatactggttcaggccccttgacaggtaatagccctaatccagttgatatgggattatatggtggaaaacacaggttacaaagggaacaatggaacatgacggatccggcaagatcgtggtcgagttggttcgactagatcccggcgatttggctccttgcgggctccgacttcgtaggctgtgacggttgtgttagctctgagattcgatgccttaggtactccctggggggtcccttttatatcgcaggtcaggcggtctccaagtagaaatcggagatatcagaccctatacgatacattgacgacccagtcttgtccgagtaggacttttcccatccgtagattctgtgaatgatttccttagtgtacgcagaaagtatccgtatgcgcgtgggtataccataccgatatgtgacgtatatcgaagggtaaagggtatgcctaacccgtaaccctgacagtagcccccgacttctgcttaaaatgagttcgtgtaaccgttcacaacttctagcgtcgagactgttgtcgttcccagtgcgaggaccgtagagacaagacatagtcgagaacaccatttgaagcccaacggtcacgagcgaatttgaactgaagtccaaaaaaccgccgcgcgtaacagacccagaaatttccggcgggcatctcagtcacgcccggaatttctatccaaaattccaaacgcttacatgtgtgtaaaccctcgtccaggaatcagccgaggcacacaataaaaaattgataatagagtacaattattactctaattaataagcgaataaaatgtcattacagaggtagatagttcatctcaatcaataaagttctaagcagcggaaaattaaaagaaacagcgcaggcgactcctctccacaggcagcttgaccagggctacgcctaatcatccactccatcagcatcattgtagaactccttctctgatgaatgattgcaaggtgagtatacgacatactcagcaagccacgcagcaaatatgaaattgcacaggataacaaaggatggcatagtataatatcatttgcataaatagcatttaacaaatatttcagaatttaataaaacagttaaataacaattaaacaatattaatccaacgctatacaacataccctgttgcataggcccaaccattatgaacaaccaatcccggctgcacagttctatctccaaaccaggagctaaacaagttattaacatcatcattt

SEQ ID NO: 6281 - DNA, 12801 bp, Oryza sativa
caagtctctaatttttctttaagaagccaaagaacaatttttgtgctttatttcggtttgtatatgaagtttagtaaagtaaagccttttctttccgtttggtcgtgtagacactcaagcttcggaagatcggctcttcgtgaaatttaaaccggcgtttgggaaagcaagcaaggcaagtcacatcatctttgaacatattgaatcccagtatgtaaaattatgttatttacttattgcattatcgctttatttaaattcccgagttatcactgttttatttagccatgcctatttacctttgttatgaccttattattattgttattgttattattaccttgttcaccctagaaccaacaaaaccccaactagtggacactctactcatggtaccactagtatgattttaggtagatgcttccctttaattaggtaacattaggtggttttacaactctagactttgggaatattcatatcacctggacactttggaatggtttggttattgtggaattggcttcacaccgctccttctattcaaaatccccaaaatggttttaggctgggctcggggtgcatggttttgatagtagcacctcggccatataaggaccggtcttcgggcctctgttgcaaagcactaccgtacttccacatgtctagtgggtaaggcttagtttgtggctcagtctggttataaacaaaagtacacggattagagatggacgatgacatctctaggacaaatgaaggctacacgggctgcggttcggtagtcgagatgtcatggcacagggccggtgtcctgctgctaggggctcagtcctgcctacctgtcccgggagttccggccgtaggtgggattgggtcggtactcttgtctatggctaggatgggttggaaactatgtcaagtcttccgtctgtataccgtggtggtatgtggcacgtggttacacgtgaggaagatgtgtcttgtgggtaaagatgtacacctctgatcagagtataatctattcgaatagccgcgccctcggttatgggcaagccgagcaatgtacccaagttagtgttttaattcttaaaacctgcttaacaactaaaatgtggaatggttggcctgggttagcttgggacgagctgggacccagggtcgggttgccagttcggtctgaatcatcgtaggccttgggttaaggcaggttcgtgtgggttcacggccttgataaataatattgtatagttctagaatcgtgtttacaaaatagctttgggcaactaaatatctttaaatgctgtttactgcaaccctaaccctttatattataactcctttgtactcccttgcatttattctgcacttgtgggtgtgtcttgttgagtacggtggttgtactcagtcttgctcaatttttcccaaacccagaagaggagttcctggaggatgaaggctttggtgtctagctcgtgcctgccgtcaagtgcctgtggtcgtcgccctagtcttccgctgtttctcgtttgtctttgcgtgtgctgggccttcggtgcccatgtaataaattaactatttacgcttccgcttgttaaactctgaattgtatcaacttttggtgtaccttgcctcctgggacaaggattaatgcacgcacataaggaacgctcgttgggttatttccggtcgtgacaagttggtatcagagcccccttgaccctaggacgagccgtagatcccaagccttagcaatattttcaaaaataaaaatcctttgttatttgtgaaaactgtctagtctctctctgtcttgctgcttcatttatcgccaaaatctgacctttaaaatgtgggtttttctttctgtttttgtttgtagatggccggcagcgtcagccgtcgtggtttggacatgactggcttcgtcttggagctgcggggcatgtgcgtggtcctggggtatccacatggagtggactaccaggccaggccgcttccggagcaggactgtgacgatgcagagccccacgctggttgggaggtcactgcagtgatcctctctggctctcccgagcggacttcgctggcagtcaccacgggtggagattctttccccgccgcttgccagagcgccgctctcctcgccatcggcactcttcaccagcgatacccggacgagttgcagcactcgccctaccgctaccaccctcgccgcggaggagcccgcgactacgccaccttccgggatgctagctcggaggatgacgctaccctcgtgcacctggcgtgcatggtggaggcgtacgacgcggctcgtatcgacttccatcagatggtgcgccgtgggatggtcgagaacaacatgaagatcctggagctgcgtcaagagaatctgcagctcaagaaggacctagacgcagtggaggcgcagctgcatcagctcaagatcgcccagggagaggtctgccgccccaagcgtcgccgtgtctgccgcagccagaagatcaccgcccgcaagagcacctccaggcccgagcttgttcgtcagtccctggcgtggacttgcttcgtcgagacccctcgtgccgagcccgcgcccgtggttccccaggagggggaagcctccagcgttggtagcacggaggatgcgctgttgctcaccttccgttcctggcccgtcgcagcggtagacgagcagttagtaggcttgcgcgtgtgttctttctcgtttgtcttcttgttgggttgtgtggggcatggttatgccggtgtgtggtataactgtgtcggagcctgtctttattttatttgcctaagcaacttgaactttaatgaaccaatttaatagcagtaataaattcaagaattatggtagtcgtgggtggttagctttaattgtcagctctctctgtttgctggttctgtgtggggttttcagatggtgacgaccaggagaagtgctaacaccggtgatggcaaccaacctgaaggcagcaaccaccaccaccagggcagcccaccttcaccttcttcttcgccttcaccaccaccaccagataccaacgccattctcacccaaatcctcacccagcaggccaacatgatgactgctttcctccaccacatccaaaatccgccacaacataatgctccaccaccacccccacaacactctaaactcgccgagttcctgcgcatccgcccacctaccttctctagctccaacaaccccgtggatgcgttggattggttgcatgccgtggggaaaaagctggacactgtgcagtgcagcgatgaggagaaagtcatcttcgccgcccaccagctgcaggggcccgcatctctatggtgggaccatttccaggctacgcagccagaggggcaacctattacttggacccgtttcaccgccgctttccggagaacccatgtgcccgccggagtcgtggcccttaagaaaagagaattccgagagttgaagcaaggcaaccgctccgtgatggagtatttgcatgatttcaacaacctggcccgttacgccccggaggatgtgcgggaagatgaggagaagcaagagaagttcttggcaggaatggaccctgagctgtccgtccgtctagtctccggggactatccggatttccaacgtctggtggacaagagcatccgcttggaagccaagcacaaggaactggagtggcacaagcgccgcttggcgaatttccgcaaccaacagggtgctaaccaaagggtccgctacaccaatccctatccagggggatcctcctcgcagcagcaacaacaacagcagcaacctcgctccgcgcctcgacctcaattcgtggtgcgcgtcccacagccgcagcaacagcagagtcagcaagggactcgtgcgcctcgtcctcctacgccaactgtgcagcctggccaaggccgcagggacgcttcaggtccgcagcgtctgtgcttcaactgcttcgagcccgggcactttgcggataaatgcccaaagccgaggcgtcagcaaggccaagcgcctccccgctccaacaacggtgggaaggatgtcattcggggtcgggtgaaccatgtgacggccgagaaggtgttgacaactccagacgtaatcgttggtacgttcttcattcattccatccctgctaccattttgttcgactctggagcttcccactcgtttatatctgtgccattcgtggggagaaatcagttggggatagaaaggcttaggaaccctctgctcatcaccacccctggaggggttatgacagcaaagtattatagtcctgccgtccctatagaaattcagggaattccttttccctcggatttgattctgctagacaccaagaacttggatgtgatccttgggatgaattggttggctcaattccaaggagtagtggattgcgcgagacgcactgtcaccctgtaccgagggccggaacaaccgattgttttctttgcacccccaacctctgtcagaagttcagaacttcatcagataggactgtcagaaatccccatcgtcagagagttcggagacgtgtttccagaagaactacccggtatgccgcccaagcgagagattgagttccggatagatcttgctccaggaaccactcctctgtacaagcgaccctaccgtatggcagcaaatgaactggccgaagtcaagaaacagttggaagagttgaaagaaaaggggtatataggtccgagtacttccccctggggtgctcctgtgatttttgtggagaagaaagacaagacgaagaggatgtgcgttgactacagagctctcaatgaagtcaccatcaaaaacaagtaccctcttccccggatcgatgatctgttcgatcagcttaaaggtgccactgtattctccaagatcgatcttcgttccggatatcaccaattacatattcgtgaagaagatattccgaagaccgcattcaccacgcgatacggactgtatgaattcacggtgatgtcgttcggtttaaccaatgcacctgccttcttcatgaacttaatgaacaaagtgttcatggaatacttggataagtttgttgtggttttcattgatgacattctgatatactcacaatccgaggaagaccatcagcaccatctccgtctggtgttgggaaagttacgggaacatcaattgtatgccaaacttagcaagtgtgagttctggttgtccgaagtcaaattcttagggcacgtgatatctgctaaaggagttgcggtggaccccgaaacagtgaccgccgtcactgattggaagcaacccaagacagtcactcaagtccgcagtttcttaggtttggcaggatactaccgaaggtttatcgagaacttctccaaaatcgctcgacccatgacacagttgttgaagaaagaagagaaatttgtgtggagcccgcaatgcgagaaggcgttcaaaaccctcaaagaaaagctggtttcctcaccagtgttaatcttgccggatactcgcaaggatttcatggtgtattgtgacgcttcgcgccaaggattggggtgcgtgctcatgcaggatggtcatgtggtggcctatgcctcacgccagctacggcctcatgaaggcaactaccctacccatgatttggagttagctgcggtggttcatgctctaaaaatctggcggcactatctcattgggaatcgctgtgaaatatatactgatcataagagcttgaaatacatcttcacccaatcggatctgaatcttcggcaaaggagatggttagaactcatcaaggattatgatgtgggaatttgtcacgtcctgataaattcatcccgaaataaaaatcattttctaaaaggaataatagaattaattaaaattcggaaagaaattggcaaacactaaaatacgtacaagaaaaattcgaatgtggcccggagaatttttgttaaattctccttggtcaaaaaggagccctcaaattttacttgaattttcagagcaccggttataattattaagtaacaaaaaccattatcaaagtttattaaaaagaacaacctaaaaataaatcctcttcctcctttgggccaagcccagcccaaagtctccctctcctccctctctttctctcttctccttctctccctcctcctcttgggcctcctcccctcccggcccactccctcctccctctctctcccgggctccctcgccctcctctcctcccgggccgcctctcggcccaagccgttccgccccctcccacctgggccgcctccgggcccaacccgagcggcgccccccctgcctgagccagccgcgtgcgcacgcgcgccgcacgcgcgctgacgccgcgcgcccgcgtgaggcccacgcgccaggccggccgtcgtcttcttcctcctcccgctcagcctcctctccctctccgggaaaacctagagccgttcctcctccaaatccgcgcaaatcaaaccatggattccaaaattaattggggggttttaaatcccattgattcctcttcaattccccccaatttcccccttggatcgtgcccccaatcgccgggaacgcccgcgttttctccggccgctttccatggccgccggccgccattcccgtcgccgttccgccctctcccgtgctcggctcgcttccctccgctataaaatgcaaccccctcgctccgttctatcgttttagccccctcccgcgatctcccgtggtccctagccctctccccgccgtcctcctctctctcccgtgccaccggccggctccagccggctttccctcctcgccggagcgccgtccggtcgcgccgtcgcctcctccagcatcgcagtggcctccccttccccggcttggcctccgtttcccgcggagacccccggagctgcgttcccgccgtcgccctttcctttcctccgcgccggccgcctccagccgcctctgtctccctgcctgagcaccggtcgacgtcgccaccacctccctcgcctctgcgacgccgctctcatccccggcatcacctcctcctcgcccgaatttcgccggaacaaccgtgccctcgtcgcctcctcgccggctccggtcgtcgtcgtcgtcgtcctctcgtcgttcccggtttcgctcgttgtggcgttcgtccctccgtcaagccgttcttgtccgtcgtccgcgtccgtcaagtgtgccgctgcagccccatcgtcgtcttcgtcctcgcctccgcgtcgtcaagcctcgtgccggccgcgtctcaccttcgtccaaggatcgccgccgaagtcgttccctcgccgtctgtctccgccgcgcccgttcgtcgttgtcgttcccacgcctcgtcgcgtggtggtaaggtctcccctcttgctgccccgtcctcgtcctttcgttgtcgcccgtgctcgttgtgcggttgtcgaccccggtacccgtgtaccggtgttggtagtcgttcgcttgtgcgtgtggtgaccgtgttagtgtgcccgctcggtagccgcgtggtttccacgtgtgcagcccgtgtggtgtctagtggagtccgtttgttggcccctcgcctcggttgacacacggggtccgcttccgtcaacccgtggaccgtctctgtgtactcggtctaccgtggtcctttaggttgacatgtggggtccgcatgtcaacagcgcagccttcctgtcttttccaggctagcgcttccacatgttttatagttgcaaagcttaattacaataatccgcaaatctccatgtaacagcattaaacttcggatgatcatatcttggtcatacgaactctgaatcgacccgttcaagtctcttaatgtttgttataacctaaagaaccctgtgctttctttttatgtattgttattgcttctttataggcttgtagctttgcttgtgtgcttcgcgtagcttttgtcgttccggaggttcccgaagcgtggttcgtggtcgtcgccgaaggttcggaaggccgttctctctgagcaaggcaagtcacatcatccttgagcatattgaatcccagtttataaaattattttgatttaaattaatgcattatcgctttatttaaattcctgcgttatcactgttttatttagccatgcctatttacctttgttatgaccttattattattgctattgttattattaccttgtttaccctagaataaacaaaaccccaactagtggacactctattcatggttccactagtatgaatttaggtagatgcttcgctgtttaattaggcaacattaggtggttttataactttagacttggggaattctcatatcacttggatactatggaatggttggcttatggtggaattggacatacccctctcttcctctttcaaagcccctaaaacctgtttttcggtggggtttgggtgcatgatagttgtgggaagtagcaccccggccactataaggattaagctcgggcctttgttgcaaagcactaccgtacttccacatgtctagtgggtaaggcttagtttgtggctcagtctggttataaacagaagtacacggatggagatggacgaagtcgggggtcgatggacatctctaggacaaatgaaggctacacgagctgcggcccggtagtcgagatgtcatggcacagggccggtgtcctgctgctgggggctcagtcctgcctacctgtcccgggggttccggccgtaggtggggttgggtcggtactcttgtttatggctaggatgggttgggaactatgtcacgtcttccgtccgtataccgtggtggtatgtggcacgtggttacacgtgaggaagatgtgtcttgtgggtaaagatgtacacctctgatcagagtataatctattcgaatagccgcgccctcggttatgggcaagccgagcaatgtacccaagttagtgttttaattcttaaaatttgctcaacaactaaaatgtggaatggttggcctgggttggcttgggacgagctgggacccagggtcgggttgccagttcggtctgaatcatcgtaggccttgggttaaggcaggttcgtgtgggtgcacggccttgattaataatactgtgtagctctaggatcgtctttttaaaattggctttgggcaactaagtgacttttaaatgctgtttactgcaaaacctaacccttatattattaccccttgtacccccttgcattaatcatgcatctgccggtgtggcttgctgagtactgtggttgtactcattcttgctcaatctttcccccccttcagtaagagaagctttggagatgaagtcctaggtggagtcctagcttataccccagttgagcgcctgtgaagatggagccgtaggcccgctagtccgctgctgtttatttttgattgtcaggccttaagtgcctttgtaataatgtaaatattatcgatataataaagatgtgtcttttatatcatgtttgtgtggtgtaccccggcttttcctgggacggggactaatacactagcgttcgggaaaaggcaattttctcggtcgcgtcaagctggtatcagagccatctcgactgtaggataagccaagtggataaaacctaaggacatattttataaatgaaactatttccgaaagtccctttttcctcctttcccctgtgctatttgcaaaatatttactctttcttccttcttcaaatttcaactagtactggatggttagttttgcgaagaagaagatgtcgccaattgtctgccgaagctccggaaggctgcaggatctgctagcgaagtggaggaagcagtgaagatcttggagaacccgtcgcagaacctaagccaccctctagggtagagtcgttagttgtgtgtttccttgcttgtgtgtgtagcgcgtggtttgcatctgtggggtgtgatgtaaccatgctaggttgtttgcttaatcaacttgcagaagaagtgaaacaaacagcacatcaacgagaagagttagttcctttaaggtcctgtctttagttctggtctattctttcctggcttgtttccactctcacctcaatccctgtaacagatgtttaacagagaaaaaggaaagaatgtcagcgggtatgcctcaagtaactcaagttttcaactcaatccaccactggcctcaagagagttaacaagggcacacccttggtccattctgagcatgctgcttggttcacagttaccattagttggaagtcaagaccaaaatcagtgtgtgtttgatcgagcatttgccacccaggtcaatgagcctccaatgccaaaagagcatgtccccttttgtcatgattgtagagagcaaggacactatgccctgaattgtccatgggtatatgccaaagaagccccttcctttggtttaacagggcagacatcgctaaaccagcctcctcgcaccaagtcaagcttgcagcctagtgtgcaaagtagagagcccaatggagagaatccattgaatcccgggaaatgctttcctcctagcctttcgtaccacgtggggtcacgtactaagcaagccaaaagcaagaagagtaagaatcagaagagaaaagcgccgatgcgaactgaagaagaagtacgtaagatggctattagcagcaccgaatggcctcccgcagggataactattcctagacgtcaaagaggaaataccttccgaggtgcacgacagttgacccagcacctcctaagccatggtggcagagtatctgatagtgaagggtcagatcaagtctcctcggatgatgaagatgagtctccccgacatctcggtgaggaagagatggaatcaaaggcatgcacccgttgtggagaaattggacacattgctagcaggtgtctcacactctgccctcattgtgaagaagaccatccaccaggggagtgtcccacccgcaaggtcacatgttttctgtgcaaaggtacaaaccatgtgcccaaggattgccaactcagtgtgttgttgatcaagaccgcagaaatccaacgaacaaccctacgattgtctcgtcagctagtcagctccaacagcaacatcgacgatatcatccacagcaccaatgctcctcctgctgcgcctgactctgcaacaaatcatagcaataataccttcagcaccaaccattctctgcaccgacagcctcagcaaagaattgttgtcgatggaagaagttgtgtctctccccgacctactccaggccgagcaaagggcaatcaatctcaggagggcgataccaagcagaagaccgttctctgcttcaaatagcaatcagaaggaagcttctcctgtgaatgatagcaatatgcagtcctaacacatcatcacagaaccaatcaaggatgcagtcactagaacaatgccagctatatctctccagaatcaaaatgagcagccacgtttgtggttttcagttcgctacttatcattgtgtaatcgggagtttgcagcaatcatgtaataaataaatacattcatgattataaacaatgagtttgttatggttatggatgattcatgttgaggatgcaatgtaccgatgttaagcaccttccctttttgtttaaggcaaggccttgtattcatgtaataagggagacatgtgtaataaaaacaagttctatgaggattatttcggaagatgttgatatgggattatgtgtataattgtttactgtcaaaggagacctagggtctcatttcagaggaactatgttctaacctcgagttaataaccaacctgatgatggaaaagaaaatcaagcgattaaccaaagagacatttgtttggactaagagtttcagatgtgtcttttttggatcaaaggcaacaaccgccagtctagcttttgacgaaccacttgaaggtttctctgaaaggcagcaggctcaagtaccacatcgtcaccagaagcatccacaactctcggagtgaaaagtacttagttgacaaaggtcgaaaggtgatcaaggtcaaaggtgtaaaggaatacgttgaatgctaactgaggacaacatgaagagaatagtgggaagtaaactgaatgtaaagaaagtgaatccgagttgcttgttcatgggagctattcccagttatgaaccaagtgatatgttcgaagatagtttacagaggtcagattaaaatcacatgtaacaacgaagcttcagatttggcaggataatgatcagacaataacaagtccagcagtaaagccatttgggaagacatcaaagcatgtcaagtgggataagttggttcttttagaaacataattcaaaggaaaagttaccgacccttgcatcgaatagcagaagtagctggcactcggagagcaggaaagctaatatgaggcagttggtgacaagttagaagtaaatgacaagcatggtaccctggtaatgacgagctgatctcgacacatgacatgaagtgggtaacttgtatgaggttgactccaaagatttgaactatgcgaagttctggaactgaagccccatcctcaagtgccgcaacccagtcgaagtcagctaaaggttcaaccagggacaagtcaggtgaagagaagattccatctgcaacaagggatcgagacaagcagcctagagtggagaagtttttctaggcaagtttgttataaaagacgcgacggaagaagtcagacaagaagagaagaccgcccaacctatcttcatgctagcctcctcgaatctccgggacgagattcttgtaaggggg

SEQ ID NO: 6282 - DNA, 4461 bp, Oryza sativa
ccgattttcccgtgcggacctattaagagagccgcatgcagaaatactaagtccctctttcctctctcacccactttaaaatttccactctttctctcctctcccctcccctctatccctttttccactttaaaatttccacgcagagcatctcctctcagtcttctctgtctcacgcctctcctctcctctctccactctcctctcctctcctcccgacggcggtagcggtggtggcgtgtggcgacagcagcggtgcgacggcggtgggagtaggagcgcgcaggcctgctccacgtggcggcggtggagggcgttggatccggcgggcggcggcagtccctacacggatccaacggtggtggccgtcaatgcaagaatccagcggtggcggccgtccccgcacggatccggcagccggccgccatctccccacgcgggatccagctcccctcctctccccttccttccctccctagatccggcagaggggaggggcgtcggcggcattgcggcgggagggaagcgcggatctgccggcgggtggcgcggaggccggcgggaggcaggcggcactatggccgtcgggcggaagcccactgccggattcttgggtttcgtttttttaaaaaaaattatgttatttcggatttttgttttcccgtggggatgcgccacccgcacgcaaaaatcatcattttcccagacccctaggtgcgtgtgggccgcctacccgcgcccaaaaatcattttagccctcacacaaaaatcttggttgtagtagtgaatggtaaaagtgaaggtgcaaagtgagagctagttgtcaacatgaggggtagaaacgatttaaaggagttggcagtggtttgaggctgtgatcctacttgtacttcactcaaccaagtatgagtggctgtctagtggcctcatgtagatgtttcctaggagaagatgagaggtatggtgaagtttgggtgtaaattggactttaactccctctctctctctttcattgtctctttgaaaatataatttaggatcaaagagatgattcaccaaggttgtttgtaggtatttggaaaacaaataggcccatatatagatgtttcctagaaggcttggagtggtagagtggcattttgggtggaaattcaatttaaacccttctctcaccttttgagaaataaaagaagatttaaatgagagaagagcagatgatgtgttggctagggttgtatgatgagtgggccccataaggacttggtcccacatttaagagagatgtagaaggagagaactagaagctctaaattttccatgtgttggcactatcacactaaactatattactctctttctctcatccatttaatttagaattaaggccgggggagggggggtgacagggagacagcaaggtagacaaggatttgatggttcaaggtgccaagttccaaagtttaattacttttgcttttaccatggtaatttagtaaagttgactagttaatctattgaccacagtccagaatactgtttacctaacttatggctctcattttatgaggttacatttcgaattagactaagccattgcaccagatgatagagtaaagtatgcttaacattttgacctagagattttgcaagatgagttatggtttaattttggtgaaggtgcaaagtaggctaattggtatgctgtttccagattttttagctgagttcaaggatttatttgggttaccaattgatgtgataaattattataactaaaatttctgggagcttagggtattgtttagtatttatgagaattttggtgggatttattgttgcctcatttatttttaggaattttctctttagacaaagcatgcatatgcaacctattatgagatgtaccaagaatatccaaaaacaatcttaaaagaataatatgcagatacaagcaagttctttttatctcaatttaggtttgcgtattttgatacctacctttcaatttgtttgatatttaacttaaatatatttttttagttaggttgaaaatgcaaaaccgagaagattaggtttctagtttatggtcaaagcaaaatttttgtttcaaaattttttaccacaagatttgtaaacttttacttttggacttagttttgatttggccagaaaaattatgtgttttattttattttagggagttatatgctctagtatgcttctatgttcaccaaaaacttttgaattcaaaatgttttaaattttccacaaaatttttccatggtgaaattccttgtatgttacaagttgatatgtgaaataaaattttaccttgtaaaatatgacttggaatagttttattaacttctcaataattaattatgctctcttaaattttcttgaaattttccgagctaaagaaataattttaataatactaacataatttcggtcattatttaaattgaaaaaacaatttaaaattctcttcatatcttttggctgaaaccaagccaactactatccctctccgtgcaggcccaaagccatgccaggtaaagtctatctcttttccttcctctccctaaatagaagccaataagtctagtttacatcggtctatgaaagagccccagttcctcccccccccacccgccgatgtcgttggtgctgatagatgtgatgcccacacctcagggatccgcgcgccatggtgagcagccgatgaatcttccgccatctcctgtccttccgtcgtctgacgaggtaaggttttcccccccgattacccccattgctacctaagttggtgattcattggtagatctacttgtggtttaatgtgcaagaatgcttggtagatctggttgttgttgaaagtgcaagaatgcaagaatgaatggtgtgaactaatgcatatgtcctggtatgcttatttcaaagtactgtgcatatgtgtattatacacaagttagcatgcacattgatctttgcctcttttgccgtaggccctagtatgcatatgtgtattataccatactgtattatgtacttataatgtgaaattatatgtggaatgctccactgcatatttgctcttggttaattagtttaggaaaaattgcaaatatgatcttgtgagaatttgtgaagtacatagaaggcaatttgttttgacaatgaagtatggtttgttgtttgttaatttagttctccgtaatactgcctaaatttaaatgtatgtttggtgaactgaaatagatatggttagtgatgtcattgttttttaacgactatttgtccttgtgagtaaggttgtcattcctcaggtttactgcctttagtgtggctatatgtctcccaaacctgagaaaacgaggaatgtgatagtagccgagaaattgatcatgtttcctcccccccccccgcctcttttgctttcctactaggttttgcaataatttttggcatgacaatcttaattatgtcccatagtctaaaactcacaaaaacatcagaaatccgctaagaataaattaagtaaagaacatgcatacacaaataatattaatcatgtcgtaataaattgctaaggtcagagaccatcggatgacacaatggacagtgctatggccttattaaaagcagcaagagaaattaaatatgcttgtgagcgcacacatgcacgacatacatagagttgagaccaacagatggatccactatagatcgccccatatggtcaacaatttattgaagataacattaacataacttggccataacttgaagcaaaacaacatattcttatgataggcattaagactggtagcaatgcaagcatgttgttttaggcttgtccttccatcttagcaagaactcccatttcgtccatcttagcaagaactcccatttcgtccatcttagcaacaactatgaaattaaaatatgaaaatcccattagcgcattagttaattttgtagtggaagtagagcataagatgtcttcgtgttgcaagatacatgcctgaagtcgtgagattggaagtgaaatcaacaaagcacattgaggaaaatgcatggaaggccacacatatgtattagtccacgatatgctacaaagtctgtatctacatgtaagaaatgcattaaatagagtgacattagtgaatttaccagaatcggccagaatacatgggaaacaacaagtgttcttgtagactgagtcggagccaccagcagcagtacaaccgaaacaacatgcttttgcctaagaggatatgcagcagccgcactgtgccgcggtggcggagtcgacagtgaggctcaagatgaccaggcacatgatcaccatcgaagtggtagtcctctttccctccattgcctcctgttgctgatgctaccttccctggttatcttgctatgtttcttagttttgtgttgagaggtgattcttgaatg

SEQ ID NO: 6283 - DNA, 3874 bp, Oryza sativa
  unsure (1)..(3874): unsure at all n locations
ctcaacaagttataccggaagaggaggtatgatgcatgatataaccaaaggaggctaggggttcttttgcataagctagcatttaaaaacagtagttgaaagtagtaaaacagttgtagtaattaagcagtactgaccaaatcactgtccaacgctacaccacgttgcaacaggcccaatcaaccacctgaactacaccagttcattaaactaaactaggggtgagactaatcacggtaaatctggttgatcgcccataaccgcgggcacggctattcgaatagttttactctggccagaggtgtacaactatacccacaagatacgattccacacatgtcaccatgccccgaagtatcaccatgatactgcaaagggggaaatcgtgacaagaccctccgcataaccctcccctaactatccacaccacgctaaggtttcactcccaccactcaaaaggcagtgggcggtcccctcttgcgccgcggtgaatccggcagctggacaaccggacaccccggctgacccaactccatcacgcccaccctcgccaccggtgcctaggaaagggtcgagctatacttcagatcaagcagttacccactcccgcttgtggtaagcacggtaagtctcccagggtttcccgtgaaccggtccttaattgccacgggtgcgaccagcaaaaccgtgcacccacagcccaccattcagtgtattttaattaactaacaccattgcggtggcaccaatccaaagctattgccaataatcaaagtcaatgctttaatgtgattccctttttgtgtactagtagaactaagcatggctaagcatttcctaaatcaacatctagtcattttaaaacccaagttgccaatggcataaggaaatcaatatatggctgagtagtaggacccatcccacgtgatattgtaaaagaatgcaacatttaatagaaatgcgagatattggtaaattgggtacaatatgatcaacgtattgcatgacttgccttgctctcgcactaatgagacctcagcaacgtcttcgagaaaccgcggatcgacgaaacggccaaaatctacgcgacaaacaaagcacacaagcaaaacatgctataagactactgaaacaggaaaccaaaccatttttaatggattcttcgcatttttcttgatttactgagacttgaatggacttaaacggagctcggatgaattacttatgaattttagaagataaactgtgtttattactataaaagagaagccttgatgtatttattgcgcaataagtcccaggactgacgtcatccaaaagggggcggcgccgacatgcgggacccacgggtcagcggctcaagggggaggtcggtccaccgtggaccaagtccacggggccgagggtggtacccggcgggtggaccccaccaggcggtggctcaaaggggaggggagggaggtgccggcctggctcggctcggcttcaaagccgaccggcggccatggcaaccggcggcgacgcgcacggtcgccggcgacggcaatcggcggcgcgggaagcgacggcggacggtgtataggacggcggcgtcgaccgaaggcgacggcgagcgcatgaagagaggcggcgcaaacaagagagaggggaagagggaggagaggggatcctcaccggcgagtatggcggccggagcggaggatgaaggtggcggcgacaacccggcgatgaggaggggcggacgggcggcggcagcacctacggagggagttgtgaaggattaggagtagagagagtgaccacggcagccaccattgttggccggagacgaatgagaatggatagctcaccggcgtgcgaggagaaccgggctccggtggggttcagcggaaaccaagcggcggccgaggtggctcacgcggcggcaatgctaatggcggcggcggcttggcgcagcggcggctctagcggctgcggcgcgcgaccggaggtggcggcaagcggcggcgctagtggcgagtggcgcggcggcggtaggaggcacgggagagcgtagcgaaaaggggaaaagggagagggggatgcagggaagctttataggggctcgagaggggcggacatggccgggaaaccccccgatttggccggcgacgtgggggggagagagagagagagtggggggaattctaatcgaatcccgcccatttgcaggcgcgcgcgcgggcgagaatggcggggagggcggcgacgtggggacgcggagcgggggtgcggatgtggaggaaacgggcggcgtggggaggtgggggcgccggcggttgcagctcggctccaaccggctggaggaggaagacggggccgacaggtgggccccacctgtcggtgacccggagagaggagggagggagacgtgggtcgggcccaacaaggaggagggcagcgcgggaagagtgggccgacggcctaaaggaggaaaagaaaagaggaaaagaaaaagattttcctgggattatttattgcggtttaatgtttttaattggttaaaattatttcgagagctctgaaaattccactaaaaattttgttagcgaatttcgacatgtagaactcaagaaaaattccacatgccaattccgattattatttgcatttattaattaaggaattagctctaagttaatcaaacaatttcttcgcgcaattcatttaaccatttttttaaagcaaggaaaaagggggaaacttcagggcgtgacaatacagttgatggatgtacatgtttgttgcacaatctctgaacaaactcttcatatctagtcctgcgtaccaggcaattttacatttgcacgctttcgccgatggacagaatagaagattttcagatacacttaggtcgtacccgtcaaatgaaggtaaaaggcaacgagtaacattgttttaagtgtactattgagtagtccttcataagataacttagttgtgtttgtagcgtactatggcgtagtagacgagttagtaccatggctggcttgcattccatgtgagtccatgttagtttagttaggctccccaacgtgagtaagtgaccgaataggtttagaaatggtatatttctaggtctagctagcttgcctatgtaggttaatatgtgtgtatattatcgcacaaggtcggaaacttttttgaaattcgatactgtacttcttacaaatactacctncgtttctatgaataacacacatgctcgtttttgaccgaaggatttgagaaacaaagaataaatcttatatttagtaattggatgccccaataaagcttccacgttagttaattgatggcataatttttctaaccccttccaatgccccaggtgatgactagtaatacataaatagaatggtggatttcgtattgaaaaaacacgttgaaaatgatgccactggaaacggataccctcatctcaatcgggcggtaagccccatctcaatcgggcacagcgtccgtcacaggctagaagtcactgatgtgaagagttatctcaatcgggcaaacggccatcacgaatgaatatatctcaatcgggccctaagtaaagcccgtcacagatagctttgacccagacgaccagtcaaactatagcccgtcacagatgacctatctctatcggaccacaactagagcccgtcacagatgactactaacctttatcgggcctaaactagagcccgtcacagatgatactcatctcaatcgggcctaaactatagcccatcacagatgactactgacctcaatcgggcctaaactatagcccgtcacagatgactactgacctcaatcgggcctaaactagagcccgtcacagatgactact

SEQ ID NO: 6284 - DNA, 10786 bp, Oryza sativa
tcgctctatatatatcgctcatatatatatatggaatacatatatatatatatatatatatatatatatatatatatatatatatatatatatatatatatatatatatatatatatatatatgcatatgcatatgtataaatacatatattacacatgtataatttaaagcacttaacattttatgtgcatatatattaccaaaatatatatttacactaaagtaaatgtgtacatctataaacatatacatgcatgtatagtacaattcatttgctcactagctagctacgactttgacgccggcattatgtcaaaagaagaaggaccgacgttatgaattgtcgatccgttgtagtagaattcaccctcgggattaaggacttcttcgttgatgaatctcatcagttgttcttgaacagccgtgatataatccttgtgtgggagattgtccctcatgtgaatacactatcattcgaaaaataatgacatatgaatatatgaaattaataaacagcaaatcgatacgcaatgaaattttgaatggtttatatatacgtataccgagctctcgtgtggtgtagatttgggttgataggaagtgggcatactcgcatacgtagtagccgcacaggttagttcccaggtcatgctttgcacactatatgagaaaggacaagagatttaatatacacttatattaactgtaactagtaatcatatataattagcatatgcatgatttaaaattgttaaaaattctaattatcatatgtaaataccacatgcatgatttaaaattgttaaaaattctaataatcatatataactagcatatgcaaaatttaaaattgttaaaaattctaataatcatatgtaaataccacatgcatgatttaaaattgttaaaaattctaataatcatatgtaaataccacatgcatgatttaaaattgttaaaaattctaataatcatatgtaaataccacatgaatgatttaaaattgttaaaaattctaataatcatatataataagcatatgcatgatttaaaacttttaaaaattctaattatcatatataactagcatatacatgatttaaaattttaaaaattctaataatcatacataattaacatatgccgtacaacaattgatttatatggatattcaatacatccaaaatattttacattgtgtacacaacaattacggcaatacatcggcggtgacggttgaccgcacgtacttcctcctcactattgttccttccttgtgttcgctacgtgagtaaagggtgtcttcgtttgataggaggatgctagggtcaaccgtcaccgtgaaagggggttgcccatcaaactgatcataatcctcgtcagtcttgtcctcaactccgatgatttttcttttgctagggagaaccacgtggcacttcggctcatcaggccctttgcccttctttcctttgctagacatgtccttcacataaaaaacttgcattacatcattggcaaggacaaaaggttcgtccgagtatcgaaccttgttaaggtcaaccgttgtcatcccactgtcatcaatcgttacgcctccaccaatcaacctaactcattggcaccggaacagaggaaccttgagaggtccatagacaagttcccatatgtcctcgatagcaccgtaatacgtgcaagttgtaccatcgtgtcccatggcatcgatacgagcagcactgttctggttcgtgctctttatgttttggtctctcgtgtagaatgtgtacccattgatctcatatccttggaatgtcgctatcgagccagatggtcccctcgccaggtaggcaagttgttggctaatcgtctcgttacccatgagatgttgtcgcagccacacgggcaatttatcaatgtgatgccgtgtaatccatgcatcggacttaccgatgtttctggcgggaactagagccaagtgctcctcgatgtaaggagccaccaatgaagattattgcagaaccgtgaaatgggctttacggaataaattgttgtataccgtcattactgcgttccttctgagagtcccctttccccgtagtttcccttcatggcgtgattcaggcaccccgattgggcgaaggtcttcgataaattctacgcagagttcaatgacctcctctgttccataccccttggcgatgcttgcctctagacgagcacggttacgaacatacttcttcaaaacgctcatgtacctctcgaaaggaaacatgttgtgtagttacacaggcccgagaataccgatctttttgacaaggtgacaaagcagatgcgtcattatattgaaaaatgaaggtggaaatatcaactcaaagctgacaagacattgcaccacatcattttgaagggcttccaatctatccggatcgatgaccttctgcgaaattgcgttcatgaaagcacattgctttgttattgttgcccggacattgtctggaaggataccctgaattataactggtagcagttgtgtcatccacacgtgtgacagtcatgagactttaggtttgtgaacttcttctccttcgtgtttattattcgctttatattcgtggaggacgtacaagaattctgaatagggtaactcccaaaatatagagttctttttccacatcaccacgtgaccatgttcgctatcaataggctggctgctaggcccctttccaaacactactttaagagctttcaccatagcaaacactattttctcactgcgatgtttaggcttcgtacggtggtccgccttatgttcaaagtgcttgcctttcttccgtacagggtggtttgcagcaaggaatcgacgatgacccatgtacacaaccttcctacagtgcttaagatatgtactttctgtttcatccatacagtgagtgcaagtcttgtaccccttgttagactgcccggataggttgctaattgtaggccagtcgttgatggttacgaatagcagcgctagtaggttaaactcctcctgtttgtcctcgtcccacacggggacaccttatttcttccacaacagtttcagatcttcgaccagtggtcttaggtacacatcgatgtcattatcaagtggcttggggccttgaataataatcggcatcattctgtacttcctcttcatgcattgccaaaattttggcaggatttcttatgtattaaccagatttggcaacaactaaacgtagatattttttggtaactttggcaaaaaatgatatggttgaaaatggcatcaaagtgaacaggccctaattaacttgttgacagctactccctccattccaaaatataaagtataaccacccttaactcaaagaccaagaaaaaattattatcatcttgtagtttgaatcatcctaataaatataatgcatgcatccaataggattagataacatgagagtaaaggatttaaaaaagtaataacttaatgaagaagatgtcatagttaattgcatgcttgcatgcatgccttatattatggaatagagggagtagtacctaattaagcatgtgtgttaatttattattaactagtaatctgcccgtgctaacgctacggcgacattcagaaatacaaattaagatcgatgaatatagttattatgttgttaattaaattgccacatgcataaaataacatagttattatcctggttcaaatggagtcattagtgacaacaaaccatggtaaaagcaaaagtaattaaactttggaacttggcaccttgaagcatcaaatccttgtctaccttgttgtctccctgtcacccccctcttaattctaaattaaatgaatgagagaaagagattaatatagtttagtgtgatagtgccaacagatggaaaatttagagcttctagttctctccttctacatctctcttaaatgtgggaccaagtccttatggggcccactcatcatacaaccatagccaacacatcatctgctcttctctcatttaaatcttcttttatttttcaaaaggtgagagaaaggtttaaattgaatttccacccaaaatgccactctaccactccaagccttctaggaaacatctatatatgggcctatttgtcgtccaaatacctgcaaacaaccttggtgaatcatctcattatcctaaattatattttcaaagagagaaagaaagagagagagggagtgaaagtccaatttacacccaaacttcaccatacctctcatcttctcctaggaaacatctacatggggccactagacagccagtcatacatggttgagtgaagtacaagtgggatcacagcctcaaaccactgccaactcctttaaatcgtttctacccctcatgttgacaactagctctcacttttcaccttcacttttaccattcactactacaaccaagatttttgtgtgagggctaaaacgatttttgcgcgcgggtaggtggcccgcacgcacctaggggtctgggaaaatgatgatttttgcgtgcgggtggcgcactcgcacgggaaaacaaaaatccgaaataacatatatttttttaaaaaaaacgaaaccctagaatccggcggtgggcttccacccgatggccacagtgcctcctgcctcccgctggcctccgcgccacccgccatcagatccgcgctcccctccagccgcaacgccgccgacacccctcccctccgccggatctagggagggaaggaaggggagaggagcggagctggatcccgcgcggggagaaggcggccggctgccggatccgtgcggggatggccaccaccgctggattcttgcgttgacggccactgccgctggatccgtgtaggggctaccgccgcccgccagatcccacgccctccaccgccgccacatggaggaggccggcgcgctcctcccaccaccactacgccgctgctatcgccaagagtggagagaggagaggagaggcgtgagagagagagaggactgagaggagatgctctgcatggaaattttaaagtggaaaaagggatagaggggaggggagaggagagaaagaggggaaattttaaagtgggtgagagaggaaagagggagttagtatttttgcatgcagctctcttaataggtccgtacgggaaaatcgactcattttcgcgtgctgtccatttaagaggaccgcacggaaaaatcgatttttcccagaagaaatgagttaccgcacgaaaaaattgatttttccgtgccgtcctctttaatggaccgcacgcgaaaatgagctggttttcccagaagcaacgagataccgcccgcacggaatctaaaaggtccctgtccaggaaaatcgtttctgtagtagtgattcatgaagttccttctctgcttgatcgatccattttctttgtttcttttttggcatagatcgaacacttgctggtgcgctcgtcggtgttcccggtgtccagagtgccaccatcgccccactttgccattccagtcgactcgaatcatctccagctgtaccattgcgccactgacgtcgccttggtcccaggagaacgacgcccacatatgatcaagccaatacgccgccacgaacgctgtcggtcgccgttgctctcctgctgcctctgcttctcttgccgccgagtcaccgacatgtgggcccggctgtttagccacttcattaggtgctaaggactttaattagttgaaattgaaatcttgtaaggttctttttgtaaaattgctttgtttgccatgtgggcttatggacctaaaagcaattcccctaatgcccggggacctttttgtatagggtttagggcttaccctaaaacatgaaattactatttcatgcattcattatgtcgcgaccgagaaaattaccttttcccgaacgctagtgtattaatccccgtcccaggaaaagccggggtacaccaaacaaacatgatacaaaaggcacatctttattatgtcgataatatttacattattacaaaggcacttgaggcctgacaaacaaaaataaacagcagcggactagcgggcctacggctccatcttcacaggcgctcaactggggtataagccaggactccacctaagacttcttctccaaagcttctcctactgaaggggggaaagatagagcaagaatgagtataaccaccgtactcagcaagtcacaccgggagatgcatgattaatgcaagggagtacaaggagataataataggggtttagttttgtagtaaatagcatttaaaagtcatttagttgcccaaagctattttataaagatgatcctagagctacacagtattattaatcaaggccgtggacccacacgaacctgccttaacccaaggcctacgatgattcagaccgaactggcaacccgaccctgggtcccagctcatcccaagccaacccaggccaaccattccacattttagttgttaagcaggttttaagaattaaaaacactaactttggtacattgctaggcttgcccataatcgagggcgcggctattcgaataggttttactctgatcagaggtgtacatctttacccacaagacacgtcttcctcacgtgcaaccacgtgccacatgccaccacggcatatggacggaagacatgacatagtttccaacccatcctagccatagacaagagtaccgacccaaccccacctacggccggaacctccgggacaggtcggtaggactgagcccctagcagcagggcaccaaccctgtgccatgacatctcgactaccgggccacagctcgtgtagccttcatttgtcctagagatgtccatcgagccccgacttcatccatctccatccgtgtacttttgtttataaccagactgagccacaaactaagccttacccactagacatgtggaagtacggtagtgctttgcaacagaggcccgagcttaatccttatattggccggggtgctacttcccacaactggcatgcacccaaaccccaccagaaaacaggttttaggggttttgaaagaggaagagaggggtatgtccaattccaccataagccaaccattccatagtatccaagagatatgaatattcacaaagtctaaagttataaaaaccacctaatgttgtcctattaatcagcgaagcatctacctaaattcatactagtggaaccatgaatagagtacccactagttggggttttgtttattctagggtgaaataggtaataataacaatagcaataataatgtcttaacaaaggtaaatataaatggctaaataaaacagtgataaagcggtaatgcattaatttaaatcaaaataattttataaactgggattcaatatgctcaaggatgatgtgacttgccttgctcagagagaacggccttccgaaccttcggcgacacccgcgaaccacgcttctggaacctccggaacgatagaagctacgcgaagcacacaagcaaagctacaagcctataaagaagaaataacaatacataaaaagaaagcacacggttctttaggttataacaaacattaggagacttgaacgggtcgatttagagttcgtatgaccaagacatggtcatccgaagtttaatgctgttacatggagatttacggattattataattaggctttgcaactataaaacatgtggaagcgctagcctggaaaagacaggaaggctgcgctgttgacatgcggaccccacatgtcaacctaagggaccacagtagaccgagtacacagagacggtccacgggtcgacggaagcggaccccgtgtgccaaccgaggcgagtggccgacaaacggactccactagacaccacgcgggttgcacacgtggaaatcacgcggctaccgagcgggcacacaaacacggtcaccacacgcacccacgaacgactaccgacaccggtacacgggtaccggggtcgacaaccgcacaacgggtacggcgcgacaccaaaaggacgaggacggggaagcgagaggacggatccttaccaccacgcgacgaggcgtgggaacgacaacgacgaacgggcgcggcggagacagctcggggatgacggaggcgaacggcgagggaacgacttcggcggcgatccttggacaaggcttgacgacgcggagtcgaggacgaagacgaggacggggctgccgcggcttgcttggcggacgcggacgacggacgagaacggctcgacggagggacgaacgccacgacgaccgggaacgacgagaggacgacgatgatgaccaccggggccggtgaggaggcgacgagggcagccagagcggctgcacggagaagaggcggcgctgaacacgccgctgcgatgacgatgacggtggcggcgcagcgagccgacgagccggggaggaggaaggggcggccaaatggacgttggcgacgacgaggatggagaggccggcacgggcgacggcggtctccagacgaatcaaagagcaggccggggtggaggtcgacgcggcgacgccgaaggaggagacggcgcggccggcccgcacctgagcggcgcggcaggggcggctggaggtggtacagtggcggcaacggcactggacgacggcgggaacgcgcctccggtggtcaccgcgcgaaacggagggcaggccggtggagaggaggcggctgcgacgctggaggaggcgacggcacggccggacggcgctcgggcgaggagggagaggcggctggaggcggccggcgcgggggaaagagaagggcgacggcggggaggggtgatacgaccacggggaggctcgggatgaggctaaaacgatagaacggaggatggggattccattttataggagaggagagggagccggccacgggggaggtcggaacggaggcgggaatggcgaccggcggccatggaaagcggccggggtagacgcgtccgttcccgacgattgagggcgccattcaagggggaaattggggggaattgaagaggaatcaatggggattaaaaccccccacttaattttggaatccccggtttgaatgaggcggatttggaggagggagcgagctagggtttcacgggagagagaggagccgggcgggaggaaggagacgaccggcgcgtgggccccacgctgtcgggcgcgtggtcagcgcacgcgcggcgcgcgtgtgcacggctggctcggctcggcctggcttgggcgcggcttgggccgagcggccggcccaggaggagtggagggaggggaggcccgggagagagaggggaggggagggagctgggctgggagggggagagaagaggtgggccgggaggaggaggagaggcctgggagaggagggaaagagagggaggagagggagactttgggctgggcttggcccaaaggaggaaggaggatttatttttagtttttctttttagtaaactttgataattgtttttgttgcttaataattatttccggtgctctgaaaattgaagtaaaatttgagggctctttttagaccacggagaatttaacaaaaattctccggaccacattcgaatttttcttgtacgtattttagtgattgccaatttcttttcgaattttaattaattctattattccttttagaaaatgatttttaatttcgggatgaatttatcaggacgtgacacattacttgatataatagcttgatgattatattgttctcacccttgtttttgccgaagccaggagtttaatcatataaattagtttcattccaacttagttcccaagtgtagattagatagatggtttaattctatagcaaaatattagagttggctcatcctattgcttctacagtaatagttagccaaaatcttgtaaatacccaattattttatgtaaacaaatcttcattggagccttaatcaaatgtatgcgatgaagattcagattgatgaacctgtatcaatctactgattcaggggatgattatcacgcccggaatttctatccaaaattccaaacgcttacatgtgcgttaaaccctcgtccaggaatcagccgaggcacacaataacaaattgataatagagtactatcaaataactaattaatatgcgcagaataaattattacagaggtggatagttcctctcaaagaacaaagttctacgcagcggaaaaaaaaacaaaagactaaaccaggaatataccattccaaaccaggagtcaatttagtcatcacagtattttcattaataatgagtaatgtgagactaatcacgaaaaacattgttagacccacccataaccgcgggcacggctattcgaatagttttactctgattagagatgtaccactgtacccacaagacacaactctacaacatgtcaccatgcacctcagtaccaccacggtaccttggaaaagaactgtgacaatacctctcatacaacacaactcaccacagtgcaccgttcgtggatcataatctccccctcataaccagaggcaacgaactccccagcgacccccacggacttctcgctgcttcacagtctggcaccccgtaatgaatcatgctatacaaaaggtaaagccgttgctcacgctggcttgtggttggcacggtaaatgtttcacaacagtagctcgtcaaccagtccttaattgttatgagcacgaccatcaaaaccatgtactcacaacccacctttcatcaggtttatgtatca

SEQ ID NO: 6285 - DNA, 26331 bp, Oryza sativa
tactgtttgacaccttttaagatgcatcgtaccaactcctaaaaagtcgagtaactgcggtataaaaggattttaaggtattgggcacttgatcacgcgcactttggcctaagcgaaaagtgcctaagtccctaaaagaacgtgacaggccacacctgaaaatatgggctgcagacatattaggcctaggccaaaaaatatgccttcgacaccctttaaaggatgacgcatgtaacatgctcccgagtaataaatcttccgggtaatatagaccaagtgtagctcatatgaatagcttctgatctgaatgattatcccttatgggatactccaaaataaatataataattgaatcccgactggcgcaagtattcggttgatagcccttacggggaataataattggtccagtctttgagcatagaaaatagactcatgactatgaatccatgtggaatgtatccggaacaagtccaaattggagatataatcctcacgcttgagttgatgagcccctgagcatatagcttgtccttctgtcatagtcaaaattgtctattggcaatagctgacgcagtcggcatggagatgaaatgaccaacatgaagacgaaattgctcatcagaagtaacggaagatgtcagtggtagtaaaaacagtgacaccaatcaaaggtaatgaagttgcataaccatggaggcgaagaaaccagtcggcaacagtcaggtcagctagcagtgaagatgtaggcgcccaacaacaacaaaagaacagtcggtggtgacaaaagcaaaccgacgatgaagacgtagacgcgcatcaacggtgatggcgaaatccaccaatcatgaagatgaagaaaataatcggcggcgacaaacgcatccgacggtaatgatgattagcggcaacagagatagccgactatgatgacgaagtttcccatcaacggcagcagagtaggctatgttgaagaggcttaacaagatgttgatgaagatgacgatgtcggtgatccagtcaatagcgatgtagcagccgatgataacgatgagatcctctatcggcagttgcgtagtaggtcaaccgtcaaggtgaaataataagtcggcgaaaacataatcatccattagcaacagcggagatgtcagggtcgatgaagcagaggtgctggagatgatgtcagtgacaataatccatcaaattaatgttatagctgttgtagatgcttcacttggaggagagttgatgatgttgtccaactcgtccaaaccgaaatatttgaagttgttggagtagaatgtctgttccgaagcaaagatgaagataatgactcctggagttgactcattggcttatataaaatttgtcaaattttgagccttatatttgtgtagcccccgactctttggttagttgggaaacaactgaacatagagtcgagaattatagcttcttgtcgtcgagtagtcattgcttgattgaagatatgtgttgaaggtgtccaagtagaaatcctgaatattggagagtcacttgttgtagtaaaatatcatggcattgcatgccgagatgtcgaggttcacaaagacgtcatggttggtgaagtagtaaaacttgcgaagtagcagcaatagagtttgccggtgccgaagataataaagatgaagtcgctccaccatgatgacaaagttgtattgccgtaatgaagtgaacacaagtcggcggcaacagaagcaaaccggtagtgaagacgcgtagttgtgaagataaaagcaccaatcggcggcagcataatcagtcggcgacggaagatgatgatgtccatcagtagtggtagctgtataatccagacgtagaggtaagggcactagtcagcagcagacgagacgaccggcgatgaagatgtagatgcccaacaacagcggcataataggccaatcaacactggcagaatcatgcagccatggaagtgaagaaaccagtcggcagccatggcaaacgtaggcagcttgtgttgaagatactgatgcctattagtagtgacagcgatgtagtcagccgtgaagaagatagcatcagttggcgttataacaggccagccgtgcaggcggtgacaccagtcagcggcggatgcggtggccggtcggtgaagacgtagacgcccaccaacggcagcataataggccagccgtgcaggcggaaacaccagtcggaggcggcgaaggcaagccggtcggtgaagacgtagacgcccaacaacggcggcataataggccagccgtgcaggcggaaacaccagtcggcggcggacgaaggcaagccggtcggtgacgacgtagacgcccaacaacggcggcataataggccagccgtgcaggcggaaacaccagtcggcggcggtcgaggcgagccggtggtgatgttctgactgatccattcctggagcgtaagagataagcttaaagccatgaatcccttttatgcatatctggatctggatcctgcagaacaaacatataggatgagtagtatctgatataaatataatactcgagaaaaaatcaagtattttaaaatatttataaatatgtatttctcctcttgtcaattttgatttccccgagcagatgactctgtacgtttaaacactctgtccgactagtcatagcccccaagcatcgggagtcggcctaggcatttcccaaacatgcatatgagtgacatgagttcgtcattaatggaacaaagtttcacggatcagaatttactactcaggtacttttgcaattattaagagcagaaaataaatttatctcatctctatgcttttgatttattccgaataatacttagcaccttgcgttactcggtccatccaacgagcccccgggtgctaggaatcggcccaaaggcaaccatccattggcaaaccaaacggaaagcataggaagatagaactccataactcgataggtacttttgtactcagattatgtcgcaagcaatcaagataaatattataaaaaatatgatataacatctgtagcccccgactcactactcaatggaagaccaattggtgtagtgaggcagaggaaaaggaaaaatatcatataaagaataaaataaatgatgacttagctttgtaatattccccttggtgatggcagaagtggccaatgtgggaacaaagtcgtccatcaataacaatgaagacaccagtcggcggcgacgaaggcggtcgacggtgaaagcgaagacgcccaacagcggcggcataataggccagccgtgtaggcggaggcaccaatcggcggcgacggaggcaggccggcggtgaagtcgtagacgcccaacagcggcggcataataggccagccgtgtaggcggaggcaccaatcggcggcgacggaggcaggccggcggtgaagtcgttgttgttatcagcaatggcggtggcgaagacaagccggcagagtggactcgcggccgatcgaccggaaagctgagacgcctcgagtccatgaccagcatcaatcgcctcaatagtgccgcgtaattatatgcgaacaacaacaaaaaatagcaagagattaatctgggattaaaaataaatacgataaataatgataaaaatcagattgagtttccccctgactgatttggatcaagtcagagaagaggagcttgaagaagtggtcgacggaaaggaagtgaaaactcccaaagcgaaaacgaagtcggcgactcatgaaattgattccatcgcgcttgttgataggaaactcgacgcaacccctacctggcgcgccaactgtcgaaacatgatttcggcaataataaaagggggtagcgcacgagatctaaaagtggatggatgcagagacaaaggatttagacaggttcaggccctctcaatgagaggtaataccctactcctgtttggggatttgaatccgccgggtgtagtatagatctgacgatcaggttgtctcatatgccccctagagggcctcctgcccaccttatataggatggggggcaggattacaagatagaaaccttaaccaatacggtatcggtttcctaaatctactttacaatattaccaaaccaggactttaggctgttccgtaatatataaggaaacgtaatacccgagccatgatctgttacatattccatagatataagttatcccctatgactagtcggataaccatgccgtatgggtatggggtacccataatatccacaccggtggagctggtttaagtattgttgctgccgatttcttcctcacagcagtcttctttttctgcaaaagtgagatttataagtgatcggctatgaatgaaataactgcaaaaggaaattagtatgagtggtttacccttgagaaatgagctagggtagcaggagttgggggagtttgcttgggtgaagccgatggtgttttttctgtatcacttactttggctgcagcttgatcgacatcttcttcgatctcttcttcatccagggcttgctcgatggatggatctaaagcaggcaagtcatcggctggcttaggtttgttcttcttggtcttcttcttgggagccagagctgattggtcaatagccaatgccttggcctttctcttcctgccaacatcggccggttctctcatctgtcgttgaagcagacttgaggtcttaggggcatggtagccgatgacaggaggagctaatccacctccgtttggtagaaggcatggagcatattctatgtccctgccgctattgctcttgcgaggaggagaagattctgttgtctgcaaggtaaagagagaagttagtcaagattcaagtcagctaataattattcaaacaaaattggcaaaataaagatgtacctgagggacaacatcaggaaataggtctgtcatgtacatagaagccgactgatggaatatatgttgcttccattcgccccaccatttgtcaaaattcctactcctgagtcttgccaactctatgttctcgatgctgcccagagggggtgatgtgcactagggttcccgatcttcctaaaggtcctgataaacaacggtttggacggagtcgcgacacagatcgacccggcttcttgaacgcgcacgctcttgagccccgcaatcgcagcaccacgtctcctctggttatcacccgtgtcgaaacgtggatgacctcgccgagaaggctaatccctgtttgccaatcgaagaacacaaacaagaacgggatagaaaaacaaccaaaattgcatatgaatgattaagctcacgagttggggtcttacaaaccgatctagcggcgaaactgttctcgacagattaatctaagcaaaacccaaaaacctaaagatgttggtgggtactgatatatagagtttaggtcgtgtaaacccctctcgacgcaaccctaatgggttccaacacgatacacgggccaaaggcccaaatacggtgacgcagcaccaggacagattctggacgtcaaattgttcggacaattcccgttgactcggaaagaatttggatgtggaaccaaaaccattggaaaggttttcttcttagctttccatccatataaagaacgccctaatccgagcacgtatgtgacctgggcgcccattttagtgtagactggtcctggactccgaattgcacccgacgtcgagttggtttgggcctccaccttgacttggacgtccccgatggtcctccatggctctaagtatttctccaagtgtctccttgtcccctccattgttcctaagcacaatataatcattaggtagcaagctattcttgaattcatacaaagaagaacataggaatgaactcacctctaaatttaattgtcgcgcacgagctcttgttatcgggccttgaatgaccattggaggattgttgtgtgtatctgaggtagtgatgtccgcatcagggggtcctgggatattgagtagccgatccatcatcagtgtggatgagatctcctcgcttcattggattttatcggcaaagaataagccgattggcgtctatcccattccaaactgtctagcatgggcaccaaacttgtatgtttcttccttgatggatgccgacaggaaggatgcatggactaatagcagccgagaagacttatctggacttgtcaaatttttcggaattgatatcctcaaatctgaagtctgctgggatacccaaatttacttaatcttcgtatgggaaccaaactcgagcatctctctggaagccttcataaaagctacagaaccaatccttgagcaattcagccgataactttgctccagcatcggctggtgtggatgcatattccccataggacatacacctgcggtgggtgcgctcttctccatcatcattggtaatcggctttaatcttggaaactcagcttctgtcatagctggccgattgacagctttcatggctaccaggtttagccaggtttgcagcaaccaccatggcccgcctacactaacagctgagcagacaacaattttagccgatgcattgttcagcatttgatacaagtagccgaggaggatcttgcctaaaggaaattgcctctttgattctaaggcttcagctaaaaactgccagttggttgtggggccgcaacttgatccacaaaaaaggaatttctcaagccacatcagcagaaaggccacttgttctcgggaggtggcagttcctttgcccatatatgctgctacataatcagaccagccacatatgctcttagttctgaagtcaaactggttcttggtgttcaagctcatgaggttagccgacgaggtcatatccaaaccgatgatcatggtgatgccaagcaaaatggggttcatcggcccttggttgaacaggaaagcattaatggtgttggaccaaaaataggtggcagcggccatcaggggttcatctttagctgaatttgctatggtaaggccaagtgcctggccgatgccgatttcgtcccaattgccctgcttgctacccgataccagtttatgccacacagaccaacttttctccgtagtggttttctcaagagaaggccaagacataaaggtgtttttccagtgacctagatttgggttggccaatctaaaagggatcctattggtttcagcgatgatgaactcggtgggatcaagattgccgatcggaccaaggaaataatggtgctcatgtgacagactcgggatcgtgtccagattggacaagtgctacagatgtaaacaagaatagagaagaagaaaataagatgaggcaaggaagaaccaatctattgcgaaagaagaggatctagccgatgggtacttaactctgcgtatttttccgatggcgcgacggatggactggcggaggacgacatctttgcgagcggatgcttggccggagaggaaatcatcttagggtcgtctggtgcacccaggggatcgccggagagagagaggacgaagttggcttaagcggtgaaaaaggagctaatggtgtgaaatttctcggggacgacggttagtatttaaagcagcgcgataacggtcggaaaaacggaagtgcgatattctctcggagatgagatatggcaaatccgaaacattaccaaatattccggacttggggtcatgtgttaacgaccaaatttggtaatccaagtatcagagatgaagataggatcgaagcggaattcaagatagaaattaatctagaaacagagtgaggatcggctaaagttcgaatcggctatgacaaggatcggcagaattcgagtcggactaggttggctgattcagccgataccgacaatgtgacgtggtacatgttgtcgggttgagttaatatgcttcatgaggattgccgtgcatggattgaatcctgagaaggcaattgtatctattaattaggatatttcatgtaatttccttagagatatgttcgggcaaaagtctgccgaaaaggattatggtatctttgtcgacgggtggcacccgtagaccggatatagagggtattggggtatgttggtacaaggatctacgtaatacgacatcaagcaaataaaagacaaggattatactggttcaggccccttgacaggtaatagccctaatccagttgatatgggattatatggtggaaaacacaggttacaaagggaacaatggaacatgacggatccagcaagatcgtggtcgagttggttcgactagatcccggcgatttggctccttgcgggctccgacttcgtaggctgtgacggttgtgttagctctgagattcgatgccttaggtactccctggggggtcccttttatatcgcaggtcaggcggtctccaagtagaaatcggagatatcagaccctatacgatacattgacgacccagtcttgtccgagtaggacttttcccatccgtagattctgtgaatgatttccttagtgtacgcaggaagtatccgtatgcgcgtgggtataccataccgatatgtgacgtatatcgaagggtaaagggtatgcctaacccgtaaccctgacagtagcccccgacttctgcttaaaatgagctcgtgtaaccattcacaacttctagcgtcgagactgttgtcgttcccagtgcgaggaccgtaaagacaagacatagtcgagaacaccatttgaagcccaacggtcacgagcgaatttgaactgaagtccaaaaaaccgccgcgcgtaacagacccagaaatttccggcgggcatctcagtcacgcccggaatttctatccaaaattccaaacgcttacatgtgtgtaaaccctcgtccaggaatcagccgaggcacacaataacaaattgataatagagtacaattattactctaattaataagcgaataaaatgtcattacagaggtagatagttcatctcaatcaataaagttctaagcagcggaaaattaaaagaaacagcgcaggcgactcctctccacaggcagcttgaccagggctacgcctaatcatccactccatcagcatcattgtagaactccttctctgatgaatgattgcaaggtgagtatacgacatactcaccaagccacgcagcaaatatgaaattgcacaggataacaaaggatggcatagtataatatcatttgcataaatagcatttaacaaatatttcagaatttaataaaacagttaaataacaattaaacaatattaatccaacgctatacaacataccctgttgcataggcccaaccattctgaacaaccaatcccggctgcacagttctatctccaaaccaggagctaaacaagttattaacatcatcatttaatagggtgagaagtgtgagactaatcacgaaagacattgttagacccgcccattaccgcgggcatggttattcgaatagattaaactctggccagaggtgtaccactgtacccacaagacacaacctcaacatcatgtcaaccatgcgtcgcgacacttgacaagtacccgaatagagattgtgacaataccctctatacaaaacaattcaaagcaatgcaccgttcccggatcataatcacccccttataaacaaggtatggactccacagcgacccccgtgggcttatctccgccacttcacagtctggtgctctactatgaaccatactatacggaaagtaaagctgttgcccacgctagcttgtggttggcacggttaatgtttcacagccgaaaatcgtgaaccggtccttaattgtcatgagcacaaccatcaaaaccatatgctcacaacccaccattatcaggttttagttggcaagttaatttattaatcaatcatgattaaccatcatgagctattattaagccatcattaaataatagtgaagcataagttatcccaatagtgtgctaatgtttccaagcatggctaagcacttatatctaatatccagctgaacccatatataaagctcaactagtcaagttacaataacccaaggtatcaaggaataaagtaatcaagaacaaaagagctataacaaacaataggttaattccacctaatgacattcaaaaataaatgcaatagttgaatagaaacaatagctttaaatgggatcaacatactcaaagggttgtttgggatctgtgtgacttgccttgctggccttggaattcctcaaaatcttctcctgcaaattcggactctccgagaacgtcggaatctaaagagaaaagaacaaaatcaccaaaacagcacacaaacaagcatgaacagtatatgtggatatttttaacatgtagatctcaattttagaaaaatttagagacctgaaccaactaaatccgagctaagatgaattagttatgaattttcaaagattaaatcggattaaatcatttatatagattttaatggaattatgacgcaataatgaattatttttgaaaaggaaaagatgattattacgtcagcggctagggttcacggtggaccgggtgcacggcgggggctcacgaaaacgaacggccgagatctaaccctatccaaacagacggccgagatctaatgggtctaccgcgactcacgggaagcgacgatgatgacgtcggcgatgacgtcatcaccggcgacggctcggatggtgcaagctcgccggcgaactacggcacgacggcactaacgaaaggcatctaccggttgcggacaacacggcgaactcacctgtgaccaaagcagcggcaacatggttgacacgagcctttgttgctggtgtggaggagttgttctgagcagggatgacctttgcgcggcggggcttcggacacttatcagcgtaatgtcctgggccaccacagttgaagcacaccccgggcttactgccttgctccctcttggcatgctattgctgtgacggagctgcaatagagcgtggagcttgattgcggatgttgttgcccgcgctgttgttgaagaactggcgctgcggatgaacaacaaacgaagaacctccctgtggcatagattggggtcccaaagcaagacgcggcctctgactatttccctgctgtgccttgaagtgagcaatccggcgtttcttctgctccatgcgattgtacttgtcctcctggcgaatagccttatccactaacttctggaaatcatgataatccccagtcatgagtgggtaagaaagctcatcatttagtccttccaagaacttctcttggcgctcttcatcagtgcgcacatcttccggagcataatgagccagacgattgaactcgtgaagatactcagtgaccgtgcgagaaccctgagtgagcgacctgaactccttcttcttgagggacaccactcccgatggtatgtgcgtcttccaaaaagcagcggtgaactcaagccaagagataggttcagcagtagtcctgttaaggcggaagtgatcccaccactcagaggcagggccatgcagctggtgtgaagcaaaagagactttctcctgatctgtgcactgaagcaggtccaacttcttctctatggtgtgcagccaatcatcagcttcaacaggattggtggtgctagagaaagtaggcggcctcacacgaagaaagtctaccagcttattctggggaggcgcatggttgtttccctggttctgctggttctggagttgctgcatcatcatattcataagctgtgcctgttgagccaggacttgagcaagcgtgggattctctgcattgttgttgttgttgttgttggggttggggccattcccgttgctgcgagtaagcaccatctggcatagagaggagcacaagaagagaaacaagggaaaaactacttagaatagggaattaattttactaacttaacttttattgatattaactgagtttcactattagaaaactgaaaactctcacacctctaaactcaccaacctcctaaaactagaaagcaaacaaagacatgcatttacatcccaccaatgatgtaaacacatgcaagacccactcacacaaccaaacttaaacaagcaaactaacacaacgatctaaggcaatgacttaacaaggcatctaggtcttccgggcatcggagttgattgaaggctcgttcggtgcgtccccatcgtcttgagttggtccccactcgatcttggaatgggtgcgcttggattcttcttcatcatcatcactcacattgacgaccggaggatccgctggggctggggtagcttctttttccactacacgaacctttggcgccaactggtagcgagggacgaatagagctctcttccttgcggtaagacgaaccttggccttctgcggtggtgcttctcccttcaatgctgctagctccttctccaaatgatccaccttgtcatctagcttgcaaatctttccccggttccggtcttcacgatcttgagcggctatcacaatctcaatgcgggtttcatccatagcccatagcatctcaaccaaatgccttgtggtagcatcattctcaatccctgccggttctaggtagctgccacggtcacttccctggggttgacgaggatggtaacggtactcggtgtcggccaaccgatcattgtaactttcgcggagctctcctatggcgatccttgccacctcctgacaagcatgaatgtagcttccccctccagcctcgaacatcaccgatgggatatcttcacgattactgttcaaggtgactttgacccagcacttctcttcatcacgatcatgagggatctgggcatacaaaggggcaatcccaaatcctatgaggaaagacatcgtacgcaactcctggacaaatccttcagtaccaaacaagtactcaagcttgtagcacagcatctaaagacaagtgaaatgagggagttaagtcatttatctagttaatagcacaagtttttgggttagcttgaataaagttagaaattcaaagtaaaaagtaaataaataaagcaaaccaagcttgcaagataagttgaaacagttagaaataggttcacaaactttgcacttttgaataacaggtatcaaagaaaataaataaaagagagttataaaatcgatatgctaagcttagttcattgcagcaaaattaaataaaacaatgttataaaacttttgatggtaaatgggccattagtacggtaatagatgtacagtactaacaacacaggaataataaataaattttgaatgagaacaataaaagaggtcatgaattgcatgtgccattagtttggtttaattaaaagagagagaggagaacagttctacttttccaatatctttagagggcttctatgggtaaccatttggcaaaacctagggtcaaggaggctccgataccaacttgtcacgcccagaatttctatccaaaattccaaacgcttacatgtgtgtaaaccctcgtccaggaatcagccgaggcacacaataacaaattgataatacagtacaattattactctaattaataagcgaataaaatgtcattacagaggtagatagttcctctcaatcaaaagaaacagcgtaggcgattcctctccacaggtagcttgaccagggctacgcctaatcatccactccatcagcatcactgtagaactcctcctctgatgaatgattgcaaggtgagtatatgacatactcagcaagccacgcagcaaatatgcaagtgcacaggataacaaagaatggcatagtataatctcatttgcataaatagcatttaacaaatatttcagaatttaataaaacagttaaataataattaaacaatattaatccaacgctatacaacataccctgttgcatgggcccaaccattctgaacaaccaatcccggctgcacagttctatctccaaaccaggagctaaacaagttattaacatcatcatttaatagggtgagaagtgtgagactaatcacgaaagacattgttagacccgcccattaccgcgggcacgactattcgaatagtttaaactctggccagaggtgtaccactgtacccacaagacacaacctcaacatcatgtcaaccatgcgtcgcgatacttgacaagtacccgaatagagattgtgacaataccctctatataatacaattcaaagcagtgcaccgttcccgcatcataatcacccccttataaacaaggtatggactccacagcgacccccgtgggcttatctccgccacttcatagtctggtgctctactatgaaccatactatacggaaagtaaagccgttgcccacgctggcttgtggttggcacggttaatgtttcacagccgaaaatcgtgaaccggtccttaattgtcatgagcacaaccatcaaaaccatatgctcacaacccaccattatcaggttttggttggcaagttaattaattaatcaatcatgattaaccatcatgagctatcattaagccatcattaaataatagtgaagcataagttatcccaatagtgtgctaatgtttctaagcatggctaagcacttatatctaatatccagctgaacccatatataaagctcaactagtcaagttacaataacccaaggtatcaaggaataaagtactgaagaacaaaagggctataacaaacaataggttaattccacccaatgacattcgaaaataaatgcaatagttgaatagaaacaatagctttaaacgggatcaacatgctcaaagggttgtttgggatctgtgtgacttgccttgctggccttggaattcctcaaattcttttcctgcaaattcggactctccgagaacgtcggaatctaaagagaaaagaacaaaatcaccaaaacagcacataaacaagcatgaacagtacatgtggatatttttaacatgtagatctcaattttagaaaaatttagagacctgaaccaactaaatccgagctaagatgaattagttatgaattttcaaagattaaatcggattaaatcatttatatagattttaatggaattatgacgcaataatgaattatttttgaaaaggaaaagaggattattgcgtcagcggctagggttcacggtggaccgggtgcacggcggcggctcacgaacggccgagatctaaccctatccaatcggacggccgagatctaatgggtctaccgcggctcacgggaagcgacgacaatgacgtcggcgatgacgtcatcaccggcgacggctcggacggcgcaagctcgccagcgaactacggcacgacggcgctaacgaaaggcatctacgggttgcggacaacacggcgaactcaccagtgaccaaagtagcggtggaagatcaacggacggtgacggcgacgaggttgatacggcggcgaccttcggcttgacgacgacggcgatgctccggagacctacggcagcgacggaggggcggacgaggtcagccatggcttgtgatcacgatggcgaccttcccgagtggcgacgacgactggagcgacggcgacgcacggctagaccagcggcgatgacggcggcgcacggctgcacggtgctagggctctaccggcaacgagaggcgaaggcgagggtggcggcgggtagcggagggcttgggggtccttttataggggctagggggcggcggcgaagtcccacggcggccggcgacgagaaggaaagttttagggttcgggaggaaaggggaatccgaatcgagctcaaatccgatgatttccaaagcgatatagacgatgcttccaaaaggaaaaaggtagaggagatctcggggatcctttcccctcaatcaatttcatcggatcgggaaaggggcgacggaattggatgggcggcggcggcgcggctcggctagggttcgggcgcgaggaagacgacgaccccgacaggtgggccccacctgtcagcggcggacgcgcgcgcgtgagcggcggcttggctgcgggccggcctgggccgaggagagagagagaggggggttttgggccgactttcggcccaaagccagaagagaactttttaaaacctttttcaatttaaattattcatgaaatgcaattccatttattaaaaatacttccttagctcaaataaatcccagaaaaatctaggcactatagaattaagcaaagtatttaataaaattttatctggcccaattttatattggattttattatttaaaattagatcttctcttctaggcttttaaaataaaatctaataattccaattaaacaacaatttatatatttgggatttttagggtgcgacaatctctctttgttccttggaattcgcaccgtcagtagtgcgtctatttaaaggaattttggggatccattttgaagtccgcccaccgtgcagaaaacatcccgcctgcaattgctcttcgtcttcttcgctgccacaagaaaccctagttcatcgacctaagccctttctccagcgatcttcgatcagtgatggatctcggcaaatcattctccaccagttgcgatcgaagactatattctctgcggttttctccctccgccttccgaatttcttctcttggttttaaacttctatggtctttctcttctccatttgaaccccaattctatcacctttcttagcatcttttctcatctttgcgaggcctacattggggtagagccttttcttgatctctttcgcttctactacgagctgcgttggatggagtccaacagggtatctggttgcgtcgtgttccgacttcgcgatggcttgaagtcgcgttatatccccttccagtgcccttcttctcgcagcaaatgtcggaataggtggttctatcttcagatcaaagattcagaccctgtcttcgttgttcccaaagaacaaccggacaagatttcgtcttggaccgcaaagccccctttgaccccctctctctagtcgtttatcgacattattgacgatctccgagtacgaggcttgtcggggtatgaagtcgctgcagacttcgttggtaggcggatccagccgctccaggctcgggcccatctagcctttgactattccgaaccggaggacgcgacccgggtttctcctcggggtatctttctcgcatttatcctgacatgctcttgttcgcgttcctcttgatttatcgagatttggttcttgattcgcaggtctgaacagcgaagccgtggaacgtcgtgtcggccaggtgatgatcagtggtccgacaacggcgagtaacatccccgtgcccctttgtgaaaagggggcggccgaacatgatgacgccatcaacgtaagtgttctcgataggcatcctgcattttcctttcgagatcacattgtgacttgattaagcgtaggctcttcctctgactgacatcatcgggccgctcgcggaccatcaggtggcggcgtctctgaaagagaaggtcgccaaggaggcgtctgatgctgctgctactaccactagtggtggcaatgttccgacaaaggggaggaagttctcctctgtaagcggacatcatcgcaaggcgtcaacccccttggtaagttatcctgtcgtcagatcgtacagccagaagaattacgccttacttcgcatcgaccgtttttcaggcctcggacgcgtctcccccgcctccacgacgacaacgtcttgtgacgattggcgagaagtaagtagacgaatcttaagcttccgtgattttattcgagtgttgtctgaaccgtggtcgtctcacagggcagcgcgggtgaaggctgtgcaagacaagtccggagggacctccggcgcatcgcccgctgcggcctcgacggatgtcgtgctcgcacccgggagccgcgaggtgacaccaagcggcccagtcagcgatcccgcggctggtcgtggtccaccagctgccgtcctcacctgggaggagctccaggtcgagatggggcgcctcctcgaggctggtgctcgcggcatcggccgcgagattgcagaggcgaggtcggaagcagcgttggcgaacgagcgtgctgactggctggtacacgagttagcggaagctcgtgaagacctcaagaagatgagggagttggtggccggcaacgagcgacaatggcaggggctcgaggaccgcctgtcggagctcgggaacaacctgtcggaaatccgtggctcgttgcgggtcacatacactggcctacaccagctcgccggggagtgcggcattaagtctaccatcctggcgaatcccgacgagttctcgctgacatcttctcttgcggaactggcgacggcgatgggggagatcccctccaagcatgcggccaggatcggggaggaaacgtcgaacgggatctacaccggggcgtgccacgtccccgcgtgtgtaaagctatcgcatcctgaagtcgatctgcgcgagatcttggatcaggcggcggctagcaacacgcgtaaggaggtgacaaaagaaatcggtgatctaggggaatctgttctccccctatttgaagagtaggacctcttgtacccccaagacatgctgtgtaaaactgaattttaaccgcctttgtgcgtgcaattatcattgtagtttactcttgtatgttgatcttgggagcttttgtcctttgtagagatgttgatgacgaggatgtccaggagcgcgggcacatgtgtcgcccgacaatgtggaccagacccttgctacggggacggagatgacgacgacttcctcaggttagtagtccgttcatcccttgatgccctcccgactagataaactatgttctcgaaagaggcgtatagcttgacttagttgttatcacattgagcagatctcgagaatgcccttgctggccaagatcgtcgtatccaatattggaagacgaaatttgaagtagcggaactcgagagaaccatgctggcagtgaagaaaaagcaggctgtggaaacgctccgaggtcgtgaggtgtggttcaactcatacttgaagagttgctgcacatccatggccagggtctgtagagaacttcgagtgccccgtggagatccggaggagtcggcggccagatacatctcacggctgaacggagcctgtgctcaactcgatggcatcggcaagcgtattgacgaggccttgaagcaggagtgtcgtcgatcgagctgatatgccggagggcacgtgttggcttgcctacgagatcatcgcccgcgcctggacctcgattgtctccatgagggttttgctcgttctcggaagactccggcggagatagaccatctggcgaggtcgatgtcgccgttggcggagaagatcttccagtctatggactggcgttggccttcttggtaatcttcgtatcctgtgatagatatctcaggaaaaaggtgtaatatagctctgaatttgcgtaaaaactgtaagaagtattttgtgaaatagaaaataaatctatctttaataaatctttcttactcctgatgtcgtgtgtaagagtgcgttctcagttcacgactttagtcagccgtttgagttgtacactctccctagcccccagccttgtcgtcggaggaattttctcggaggataaggctcttgtacctttgacctgccttggttgaataagctctgatcctagcccccagccgtgaagttggaaagttaatttccgatttcgcggcttggttaatacgcacggcgagaacccttacacgaccagatcttacatggtctttcgtctctacaggatctgacaaggccttatcggctctgggcgtccccagccgaagatcccttaggttcctcggaggccttgtcaagacggcgtaaagggacatgaggacaggtttcaacgctaggtgtcattagggtaagggatcatcgggcggaaacactttgactgtaatatgggcctaagaataggctttattgatactgtaaggtgtcttacaggtatggatggtattgactcatacatagaatttacgtagttggtcaatgttccaagaatttgctaactcgcgaccatcaccgtctgcgattttgaatgcgcctggccgcaagacttgtgtgattgtgtagggcccttcccattttggtgagagtttgtttcgccctgcttggctttgaactcgtcggaggacgtagtcgccgatcgaaagtatgcgtgctcggatgcgcttctcgtggtaacggcggagggcctgttgatagccgactgctcgaacggcaactcgttcgcgatgttcctcgagtagatttacatcgacgtttcgctgttcctcctagtcctcgtaggagtgcttctgtactcatgtactcggatgtcgtagctcgctggggagcatggcttcggagtcgtacacgaggaagaagggtgtttccttgttgtcagtgtggtgcgtacggtccatagtactgacgggagttcttcgacccattttttgtcatgtgacatgagcctgtcgtagacgcgggttttgatcccttgtagtactatgctgtttgccctctcgacttgtccgttgctttgagggtgagagaccgaggcgaagcatatcttgactcccagcccgatgtagtaatcctgaaaatcagcgctgatgaactgggagccgttgtcggttatgatggggtgcggtagtccgtatctgcaaaatatctccttgatgaatttgatggcgttgtcggccttgatttcccccgtgggtactgcttcgatccacttagtgaatttgtcgatcgcatttaataggaacctgtagccgccctgtcctcgtgggaatggcccaagtatatctagcccccagcacgagaacggccaagtaagaggtttagtctggagcgcttgagctggtagctttgtgtgtttacagtggaattgacaggcttcacatcgctggaccatgtggcatgcatctttaagggcggttggccaaaaaaaacacttgtcaaaaagctttcccgaccgatgttcgaccggcggcgtgtgacccacagatgccttcatctatatcaaggaggaggtgtctaccatcgtcggacgagacgcatttgagaagtaccctgtttggcactttcttgtatagatcgttgccgaccatacagtagattttttctttacgggttattttctcagcctctgtatcgtcctcgggcaactcctcgctgttgatgaatttgattagtggggtgcgccagtcgtctgtggtctcgatgtcggcaacggcgcgttctgcttttgtggcctccgagctaatgtcgggggtggccgagctgacttcgccgctaacctcttttactgatggcttcgtcaggatgtccagaaaagtgccgggctcgagcggttctcgtctggacgcacgtcgtgctaggtcgtctggctcgatgttgtcctggcggtagatgtgtcggacctcgatcccatcgaaccttttctctagcttcctgacttctgcgagatacttggataactcagggttagagcatttataatctttgtgcacctggttcacgactagctcggagtcccctttgacgattagtcgcttgaccccaagtgcggctgcagctcttatcccggcgagtagtccctcgtattcggctgtgttattggtcgccctgaagttgaggtggattgcgtgcttgaattgatctccggagggagatgtcaagataaatcctgcccctactccttggctgttgagtgcaccatcgaacgccattgtccacgtttcgttgtcgacttggttgtctgatttgttatcaggcatagtccagtcggctacgaagtcggcgagtacctgggacttgatggctgttcatggcgtaaagtggacattaaactggctcagctcgactacccatttcgcaatgcggctgacaacgtctttgtttctcacgacttcaccgagggggaaggaggagataactgtgactctgtgggcttgaaagtagtggcgtagcttccttgatgtcatgatgaccgcgtaaagtagcttttggatctgtggatatcttgtctttgcgtcgtggagagcttcgctgacgtagtagactggtcattgtaccttctctctctcgacaacaatgacggtgctaacggaatatggcgtggcggcaatatagaggaataattcttcattaggttggggagcaacaagtacaggggggtttgataggtagcgcttgagtgcaacaaatgcctcttcggcttcctgtgtccatacaaatgtcttgtttcttcagcagagcaaagaaaggttgccctcgttctcccatcctagcgacgaacctactcagtgccgccatgcatccggttagcttttgtacttccttgagtcttgtgggtgacttcatgttctcgattgccttgatcttctcgggatttgcttctattcctctgccagaaacaaggaatccaagcagcttgcccgacggtactccgaacgtgcacttctatggattgaacatgaggcgatatcgccggaggttgtcgaacgtttcccgcagatcgtcaatcagtgagtcgcttgtcttggtcttgacgacgatatcgtcgacgtaggcctcgacattgttgccgagctggtcgctaagtgcgccctagaccgtgcgctggaaggtattccctgcggttattagtccgaacggcattttcacatagcagaatactccgaatggcgtgatgaatgctgtcttctcttcgtcctcttttgccatactgatttggtggtagccagagtaagcatcaaggaagctcaacagctcacagccggctgttgagtccaccagttgtctattcgaggaagagggaagtgatcctttgggcacgccttattgaggtcggtgaagtcgacgcacattctccattttccgttggccttccgcaccatgactagattggctagccactctggatgaagtacttctctaatgaagccagctttgagaagtttgtcgagctcttctcgtatggcttgttttctgtctggtgcaaatctccgcagtctttgctttactggcttggcatcgggtcgcaccatgagtttgtgctcaatcacctccctggggacccccggtatgtcggacggctgccaagcgaacacgtcagcattatcgcggaggaaggtgatgagcgcgagttcctatttctcgcttagtgttgccccgatcttgacggtcttgtcggggttggcactggagagtggaacgatcttgattgcgccgtacggttttggcgccttgtttgtcttgcacactttctttggtggttcagtcgtggcgggtgggctaggtgtttgctcgaccatgtcgaggctccgtttgtcgcactgtactgccagctttgcgttcccttgaatagtgattgttcccttcggtcccggcatcttgagcacttgatacgcgtagtgagatgcggccatgaacttcgcaagtgcagttctcccgatgatggcgttgtaagctgtatcgaattcagcgacatcaaaggtgatctgctctgttcagaagttgttggcttggccgaaagtcacgggcaacataatcttgcccaatggtctgtatagtccgactaggtatggaatgtgatgtatagatagaatatctttaaagagactcgggttaagttccaaacttgtatgttaaggaaatatccgggatcctagttggttacgattaggtcatatctgcaactacctattccgttagggatatgagctgtattttgtaatacggactccttctcctatataaggaggggtccgggtgcctcttggggtacaacattctactcttagatcatacgatcaataatagactcggcggaataatccccagacaggagtagggtataacttcttattaagaaggcctgaaccagtataaacttcctggtcttcaaacccatcaacttttctagcttgatagccacccccttttagtattgccgaaatcttgtttcgtcatgtatcattgtcattttcatagccttcatcatggcgttgcgaatattgtgaatatatcaatggatcaacttgcatgccctaactgtgagcattcttaaaactccaaggtaaaaagagataaatgctgaagtgtgattcatgcatatgtacatattgctcctcccaaatggacatcatgcaggatcgggactaagacaacacattaaaggctctcatgctatacgcttcttgcagctgtagttaaacaagggcatcgagcagtagttcgataacaataagattcattggcaccaacaaaaccccatccattctaataaatatggcacgcatgtattttaagatttatctttgaccaagaattagtttaaatttacaaagatatttgatagaaaattagcatcatttcaatgtgtttttcaatacgaatacaacaattctatgtatatattactagtcatcaacctgtgcacttgcatgggctagaaaaattacgtgacatcaattaactagcatggaagctttattggtgcctccaattactaaatataagatttttcctttctttctcaattctttcggtcaaaaacgagcatgtgtgttattcatagaaacggaggtagtatttgtaagaagtacggtatcgaatttccaaaaagttccgaccttgtgcgataatatacacacacattaacctacataggcaagctagctagaccatgaaatataccatttctaaacctatcggtcacttactcacgttggggagcctaactaaactaacatggtctcacatggcatgcaagctagccatggtactaactcgtctactacgccatagtatgctacaaacacaactaagttatcttatgaaggactactcaatagtacacataaaacaatgttactcgttgctttttaccttcatttgacgggtacgagctaagtgtatctgaaaatcttctcttctgtccatcggcgaaagcgtacaattgtaaaattgcctggtacgcaggactagatatgaggagtttgtccagagattgtgcaacaaacatgtacatccatcaactgtatacatgcataggatatatacatacaatggaggtagccatttgagattgctagttagcgcatacgcgcgagttgctttcctagcgcatacgtacacgtgtctctcgtggagcgaacgagagaacggccgtacgacgctttcatcggaaacagaaaacgcgattagcgtctaattaggcgcagattaaccgagaaaactacgtctaatgcagttttagataatgatagtatgattttgtatatttctatttttttcaaagattttattaaagtaacagattgaaaagaaatctataggtgaaatcaaaattttaaaacttttaacccagatttggaacattgaactcgaaatttgaattttattgaagtcaaattttgaaaaatttcaacttttcatctcaaatttgaaaaactttcaatccagatttgaaaacattcaacctagatttgaaaactttcaacacagatttgaaaactttcaacccagatttggaaactttcaaaacagatttaaaatctttcaacacagatttggaaactttcaaactagatttgaaaacttttaactcagatttaaaaactttcaattctggtagaaagttttcaaattttaaatttgaaaactttcaacccaaatttgaaaactttcaaccaaaatttgaaaactttcaagtcaatatttgactgttaagttaaaataaaaaaactttcaattctacattttgtaaagaagtgtgagaaagattaaaaaaaatgggaaagaaacggcggaaaaaaaacgtgtctaaggtcagaaaaaaaaagtacgaaaaggagaaaaaaagagctcggggaggggatagccggcatgcgcgccagctaaattgatttagctggcgcgtacacgcccattagccatccccggtagccatttgcactatatccataatatacaagtaggcagccattcgcaccttatccataccaggacgatccatttgcaccttatccacattatcacataatgcttctgcctataaatagtagcagcaccttacattcaagaatcacctctcaacacaaaactaagaaacatagctagataaccagggaaggtagcatcagcaacaggaggcaatggagggaaagaggactaccacttcgatggtaatcatttgcctggtcatcttgagcctcactgtcgactccgccaccgcagcacagtgcggctgctgcatatcc

SEQ ID NO: 6286 - DNA, 1916 bp, Oryza sativa
attaatttcaaaatattaaaccttcgaatcaaattttatcataataaatgaacctatatgaaaaggttgtcgaaaacaaagttgtataacttattgagatatacctaacttatttttcttatttatacatctgagtttgattaacctatataaaatttgaatttcaaattatgacaaccttaaataatatttttaaatactaaatgatttcaactgaaaaaatcatcaacaacaaagttgtataactcatcaatatctacaacttttgttttggttattttgctacatgactttctttcaataatttgaatatgaatttcaaattatgacaacttcaaacaatattttcaaatactaaatgatttgaactgaaaaagtcatcaataacaaagttgtataactcatcagtatctataacttttattttggtcatttcttcattcggtaaagtaatagtatcattgttcataaaatgaacttatctctcttatagtttataaactatataagagatatgtacattttgtgaacaatgttacaaatcgctttgttggatgaagaaatgacccaaataaaagttatagatcttgatgagttatagagatttgatgttgatgaacttttcagttgaaatcatctagtacttgtaaatgttggtttaagttgtcataatttgaaattcaaattcaaattattgaaacggagtcatattgcaaaatgaccaaaacaaaagttgtagatattgatgatttatataactttgttgttgatgactttttcagttaaaatcatttagtatttgaaaatgttttttttaacttgtcataatttgaaattcaaacaacatgcttgcattgcttccagtcttaatgcctatcataagaatatgttgttttgcttcaagttatggccaagttatgttaatattatcttcaataaattgttgaccatatggggcaatctatagtggattcatctgttggtctcaactatatgtatgtcgtgcatgtgtgcgctcacaagcatatttaatttgtcttgctgcttttaataaggccatagcactgtccaatgtgtcattcgatggtctctgaccttagcaatttattatgaccttagcaatttattacgacatgattaatattatttgtgtatgcatgttctttacttaatttattcttagcggatttctgatgtttttgtgaggtttagactatgggacataattaagattgtcatgccaaaaagtattgcaaaacctagaaggaaagcaaaagaggcggggggggggggggggtgggaggaaacatagtcaatttcccggctgctatcccattcctcgttttctcaggtttgggagacatatagccacactaaaggcagtaaagctgaggaatgacaaccttactcacaaggacaaatagtcgttaaaaaactatgacatcactaaccatatcttatttccgtttaccaaacatacatttaaatttaggcagttttacggataactatatcaacaaacaacaatccatacttcattgtcaaaacaaattgccttctatgtacttcacaaattctcacaagatcatatttgcaatttttcctaaactaattaaccaatatcaaattttcagtggagcattccacatataatttcacattataagtatataatacactatggtataatacacatatgcatactatggcctaccgcaaaagatgcaaagatcaatgtgcatgctaacttgtgtataatacacatattcacagtactttgaaataagcataccaggacatatgcattagttcacaccattcattcttgcattcttgcactttcaacaacaatcagatctaccaagcattcttgcacattaaaccacaagtagatctaccaataaatcacaacctta

SEQ ID NO: 6287 - DNA, 23984 bp, Oryza sativa
tattggtgcatccaattactaaatatatgatttattctttgtttctcaattctttcggtcaaaaacgtgcatgtgtgttattcatagaaacgtatgtagtatttgtaagaagtacaatatcgaatttccaaaaggtttcgaccttgtgcgataatatacacacacattaacctacataggcaagctagctagacctaaaaatataccatttctaaacctattcggtcacttactcacattggggagcctaactaaactaacatggactcacatggcatgcaagccagccatggtactaactcgtctactacgccatagtacgctacaaacacaactaagttatcttatgaaggactactcaatagtacacttaaaacagtgttactcgttgccttttatcttcatctgacgggtatgagctaagtgtatctgaaaatcatctccttctgtccatcggcgaaaacgtgcaaatttaaaattccttggtacgcaggactagatatgaagagtttgttcagaaattgtgcaacaaacatgtacatccatcaactatatacatgcataggatacatacatacaatgcaggtagccatttgcaccatatccataatatactagtaggcagccatccacaccttatgcataccaggacgatccatttgcacattatccacatcatcacataacgcttctgcctatatataagagcagcagcttacattcaagaatcacctctcaacacacaactaagaaacatagctaggtaaccagggaaggtagcatcagcagcgggaggcaatggagggaaagaggactaccacttcgatggtgatcatgtgcatggtcatcttgagcctcactgtcgactacgccaccgcagcacagtgcggctgctgcatatcctctcgagcaaaagcatgttgttttggttgtattgctgctggtggctccgactcagtctgcaagaacacttgttgtttcccatgtattctggccgattctggtaaattcactgaagtcactctattcaatgcattcttatatgtagagacagactttgtagcatatcgtggactaatacatatgtgtgtctttccatgcattttcctcaatgtactttgttgacttcacttccaatctcacgacttcaggcatatatcttgcaacatgaagacatcttatgctctacttccactacaaaattaactaatgcgctaatgggatttccatattttaatttcacagttgttgctaagatggacgaaatgggagttcttgctaagatggacgaaatgggagttcttgctaagatggaaggacaagcctaaaacaacatatttgcattgctaccagtcttaatgcctttcataagaatatgttgttttgcttcaagttatggcctagttatgttaatgtttatctccaataaattgttgaccatatggagcgatctatagtcgatccatctgttggtcccaactatttgtatgtcgtgcatgtgttcgctcacaagcatatttaatttctcttgctgcttttaataaggccatagcactatccaatgtatcatctgttggtctctgaccttagcaatttattgcaacatgattattattatttgtgtgtgcatgttctttacttaatttattcttagcggatttctgatgtttttgtgagttttagactatgggagataattaagattgtcatgccaaagagtattccgaatcctactaggaaggcatagggtggggggggaggaaacatggtcaatttctcggctgctatcacattccttgttttcttagtcttgggagacttatagccatactaaaggcaatacagtcgaggaatgacaaccttactcacaaggacaaatagtcattaaaaaattatgacagcactaaccatatctgatttcagttcacgaaacatacatttaaatttaggcagtattacggagaactaaatcgacaaacaacaaaccatatttgcaatttttcctaaactaattaaccaagagcaaatatgcaatggagaattccacatataatttcacagcataactacataatacaatatggtataatacacatatgcatactagggcctacggcaaaagaggaaaagatcaatgcgcatgctaacttgtgtataatacagatatgcgcagtactttgaaatatgcataccaggacatatgctttagttcactccattcattcttgcactcttgcacattcaacatcaatcagatctaccaagcattcttgcacattcaagcacaagcagatctaccaatgaatcactaacttatgtagcaatggggggaatcggaggagaattaaaacctttcctcgtcagacgactgaaggacaggaggcggcggaagattcactggctgcacaccatgccgcgcgaatccctgaggtgtgggcatcgcatctatcagcaccaacgacatcggcagtggcaggggtggactagggctctttcgtagaccgatgtaaactagacttattggcttcgatttagggaggggagggaaaagagatagactttacccggctggcctttgggcctgcgtggagagggataggagttggcttggtttcagccaaaagataggaagaggattttaaataggttgcatatgcatgctttgtctaaagaaaattcctaaaaataaatgaatcagcaataaatcctaccaaaattcccataaatactaaacaacaccctaagctcccagcaattttagtttgaatttatcacatcaattgataacccaaataaatccttcaacacagctaaaaatctggaaacagcataccaattagcctactttgcaccttcaccgaaattaaaccataaatcctcttgcaaaatctcaaggtcagaatgttaaacatactttactctaccatctggtgcaatggcttagtctaattcgaaatgtaaccacatgaaatgagagccataaattacgtaaactttggaacttggcaccttgaaccatcaaatccttgtctaccttgccgtctccctgtcccccacaccccccccccccttaattctaaattaaatgtatgagagaaagagagtaatatagtttggtgtgatagtgccaacacatggaaaatttagagcttctagttctctccttctacatctctcttaaatgtgggaccaaatccttgtggggcccacatatcatacaaccatagccaacacatcatctgctcttctctcatttaaattttcttttatttctcaaaaggttagagaagggtttaaattcaatttccactcaaaatgccactctaccactccaagccttttaggaaagatctatatatgggcccatttgtcgtccaaacacagcaaccaaccttggtgaatcatctctttgatcctaaattattttttcaaagagagaaagaaagagagagagggagttaaagtccaatttacacccaaacttcaccatacctctcatcttctcattggaaacatctacatgggaccactacacagccactcatgctaggttgagtgaagtacaagtgggatcatagcctcaaatcactgccaactcctttaaatcgtttctaccgctcatgttgacacctagctctcactttccacctttcctttcaccattcattactacaaccaagatttttctgtgagggctaaaatgatttttgcgtgtgggtaaacggcccgcatacacctaggggtctaggaaaataacgatttttgcgtgcaggtggcgcacctccacgggaaaaaaaaacctgaaaaaacataaattttctttaaaaatgaaaccctagaatctagtggtggcgccgccactcctgcttgccgctgccgcctcctcgtcgtcgtcatcgtcgtcagcggcggcctccgcgccgctcgcctcggatccgtgctcccctctggccgcactgccgccgacgcccctcccctctgccagatctagggagggatggaatgggaggggaggggagctggatgccacgcggggggagggcgcccggctgccggatctgtgcggggacgaccgccaccactggatttttgcgttgatggccgccgccgcaggatccgtgcagggacggccgccacccgccggatcccacgcccaccaccgccaccacgtggaggaggccggcgcgcgcctacgcccaccgcagctgtcgccgcgcgccaccgccgctgccgccatcaggaggagaggagaggagagtggagagaggagaggagaggtgtgagagagagaggactgagaggagaagctctgcgtgcaaattttaaagttgaaaaggggattgaggggaggggagaggagagaaagaggggaaattttaaagtgggtcagagggaaaagagggagttagtattttgcatgcggctctcttaataggtctgcacgggaaaattggctcattttcacgtacggtccatttaagagaactgcacggaaaaatcgatttttccgtgccgtcctcttaaaaggaccgcacgtgaaaatgagctgatttttccaaaagcgacgagttgctgcctgcacggaatctaaaagggtccctgtagtagtgattaatcaagccaactcgccactgtgaacctcatctatttctcatagtgttccactatgcaaaccaccaaaaactacctcggaatctccaagaacttccacttactcttttcacccgaaggagtttcatccatgtcacgtattctctggtgagcttcaccgcactccaaccacgggaacatgaagttccttctctacctaatcaatccattttctttgtttctattttggcatagatcgaacacttggtggtatgctcgtcagcgttcccggtgtccagagcgccgccatcgccccacttcgtcgttcccatcgactcgaaccatccctggctgagccattgcgccaccgacgtcgcctaggtcccaggagaaagacgccaaaatatgatcaagccaatacgccgccgcgaacgccatcggtcgccgttgccctcctattgcctctgctccccagcaaccaagtcaccgacatgtgggccccggctatttagccacttcattaggcgtaaggtctttcattactagaaatttaaatcttgtaaggttctttttgtaaaattgctttgtatgccaagtgggcctatggacctaaatgcaattcacctaatgccaatggacctttttgtatagggtttagggtaggtcctaaaccctacatagaaattactatttcatgcattcattacttgatataatagcttgataagtatgttgtactcagccttgctttaaccctctctttgagaatcaatttggagtttttgctgaaaccgtgagtttaaacatataaattagtttcattccaacttagttcccaagtatagattagatagatggtttaattctatagagtttaaacattagagttggctcatcctatagcttctacagtaatagatagccacaatcttgtaaataccctattattttatgtaaagaaatctcctttggagccttgatcaaatgtatgctatgaagattcagattgttaaacctgtatcaatctactgatccagggcttgatacagtttaaacatgtcgattaccgaatctttaattttgggacctgacaaggtgtgtgggtgggcgcctagagcggccatcccgctcccccccccccgagccggccctgactacatgggccttaacaggccacatggcatcttatcatgatttctgggcttgatggtgacgaaaatggacgtcatagactgtatgacgacagaaggatcatcactagattaatgacgaaaagataagcattctttatataacgccattagagacgcatgataggtgataatatatatatatatatatatatatatatatatatatatataggacggctctttcatacacccaggtgtatgtacacccttttattaatggatgatccattagcattcaatttagctgtgaaaaaaattaataatattaatttccaaatgactgcatgcatgtggcatagctgcacaccggattgggtgcaaatttgaacaagatcgttggcatgcatttgctttcaaatttgataacgtaccttagatatccccaccttttctagtatgcaacagtatatactgttttttaagccgcagtatatatactctttgaagcgatgagcagtactatatactagttttttgtgtattagcggtgcataataaggagtaccttacatttttgttgtagcagtgaatatttctttttttaattagcagccgtatatactgatgcggacatcactacttcggatacacacaacaatcctccaacggtcattcaaggaccgataacaagagctcgtgcgcgacaattaaatttagaggtgagttcgttcctatgttcttctttgtatgaattcgagaatagaggggaacaatggaggggacaaggagacacttggagaaggacttagagccatggaggaccattggggacgtccaagtcaaggtggaggcccaaaccaagtcgacgtctggtgcaattcggagtctaggaccagtctgcactaaaacgggcgcccaggtcgtatacgtgttcgaattggggcgttctttatatggatggaaagctaagaagataacctttccaatggttttggtcccacgtccaaattctttctgagtcaacgggaattgaccgaacaacttaacgtccagaatctgtcccggtgctgcgtcaccgtatttgggcctttggcccgtgtatcgtattggaacccattagggttgcgtcgagaggggtttgcacgaccctaaactatatatatcagtacccgccgtcatctttaggtttttgggttttgcttagattaatctgtcaagaacagtttcgccgctagattggtttgtaagaccccaactcgtgagcttaatcattcatctgcaattttggttgtttttctatcttgttcttgtttgtgttcttcgattggcaaacagggattagccttctcggcgaggtcatccgtattttgacacgggtgataacctgaggagacgtggtgctgcgattgcggggctcaagaacgtgcgcgttcaagaagccggatcgatttgtgtcgcgactccgcccaaatcgttgtttatcagaacctttcggaagatcgggaaccctagtgcacatcaagtggtatcagagctctaggttcaccgtcaggttcgctcagtttctttgcccttgattagttttttttttcgcaattatcctagagtctacagaaaagccaaaaaaaaattagttgttagttaccttaacctagaccgtgtttagcctttgcatgattctctctcagagtccgtagtgttgagtttgagtcctagtttaagttcatgttgctggtctagtgtgtgttttagtctagtcatgtgtttgtcctttgtaaccctagccgctacctttcaccgtgtgttaggcttcatcctttgagagccgtttccgccatcataaacacccatccagataaccaagcatctccagaacaccctacaactccgctgccaccatatcccaattccaccgcaaaatagactaggttatatcccctctggaaaacctagccggaagccgaaacttcaaacagccataacttttgcatacggactcggaatcaggaaaaatttaacttttcggataagagaaaaaattttatatccgtttatccccgcctttggctggtttggcgaatccaaaattccaaaaattggcttgcaaaattgtctgttcgagctcacaagttcctgcaccttgtttatagtggtttcagaaaaatccataggccacatacctactccaattgagctttaacttggaggtgtgcctatttttgtgttctaaaaaaagaaaaaaaatatcaaaaaaataaaagaaaaaaaagaaaagttgatttccactagtgctttgagctcacgacgcgctccgttgagcttatctgccagttcggttttgtagtttttgctgaaactcgctgaagcttgcctgtcagtccttctttgctgtttactagtgtcatattctttgagccatctttgttatcactactgtctaggacacgagtagaccagcaactaagggcaagtgacttgggatttttattcagcattactatctgtcattggattgtgtaccactcataaacatatttttggccttcctagctccacatattacttctgaacagcacaggttcttgatcactgcaattgctgactacgccttccaggtatcctttgctttgctggtaagaaccttataagaccatggttaggaactccatattgctgagaatcgttgagaggcaccactacacctgcgtagtagattattagggataaccttcaccgttttgtttctgttttggtgtttcaatgtcaggtaacgaaggcgagaagagtccccaggattttgctgactgtgtcagccaagagcaactacgaactctccaacaaaatactcaaaaggacatcacggaggctgttgcaaagtctgtccaagatgccttcactaaaatcggcttcctaaaccacatggagaggttggacaagcggatatccactctaactgatcgggtcgccgtgttggagacaccttccaatgaggaagtggtgagtggtgacgacgatgctcatcctgaagacacggtgtatgattccagtggctatattgacgcaccggctacaaggcaagcatggctacgacgtcgtctacgcacaaaccgcacaggtatgggtggcactcgccaccaacaaggtaataataatgatcgtgtgcccgatgatccttatgctaaggttaagtttaaaataccatcttttttgggatatgatgatgctaaaaaataccttgattgggagatgacagtagaacaaaagtttaatgtccaccttgtacccgagcaacatagagttagacgagccagtagtgagttcaaggattttgctattatgtggtgggctgggttatctgatgagggggtactacctactacttgggaagaacttaaggtagctatgcgcgataggtttgttcctccatcttatcatagagatttacgtaagaaactgatgcgtttggaacaaggggataaatctgtacaggattactatggtgagctacagaagggtgtgagacgctgtggtatagtggagggggtcgaggatgctatttgtcgtttctacactagtttgagggaggaaattcagaacattgttgattataaggaatttaactctgtcaaccagttgtttcgatttgctatgcttgcagagaaggaattacaggggcgcgaccatcagggcaagagcaaggcaagcacatacactctgcgcacgacgtgtcgcgaccgagaaaattgtcttttctcgaacgctagtgtattaatccccgtcccaggaaaagccggggtacaccaaacaaacatgatacaaaaggcacatctttattatatcgataatatttgcattattacaaaggcacttcaggcctgacaatcaaaaataaacagcagcggactagcgggcctacggctccatcttcacaggcgcataactgggggtataagccaggactccacctaagacttcttctgcaaagcttctcttactgaaggggggaaagattgagcaagaatgagtacaaccacagtactcagcaagccacactggagatgcataattaatgcaagggagtacaaggggataataatctaggggttaagttttgcagtaaacagcatttaaaagtcacttagttgcccaaagctattttgtaaacacgatcctagagctatataatattattaatcaaggccgtggacccacatgaacctgccttaacccaaggcctacgatgattcagaccgaactggcaacccgaccctgggtcccagctcgtcccaagccaacccaggccaaccattccacattttagttattaagcaggttttaagaatttaaaacactaacttgggtacattgctaggcttgcccataaccgagggcacggctattcgaatagattatactctgatcagaggtgtacatctttacccacaagacacgtcttcctcacgtgtaaccacgtgccacataccaccacggcatacggacggaagacgcgacatagtttccaacccatcctagccatagacaagagtaccgacccaacccacctacggccggaacccccggacaggcaggcaaaattgagcccctagcagcaggacaccagccctgtgccatgacatctcgactaccgggccgcaactcgtgtagccttcatttgtcctagagatgtccatcgacccccgacttcgtccatctccatccgtgtacttttgtttataaccagactgagccacaaactaagccttacccactagacatgtggaagtacggtagtgctttgcaacaggggcccgaagaccggtccttatgtggccgaggtgctactaacaaaaccatgcaccccgagcccagcctaaaaccattttgagggttttgaatagagggggaggtgtgcatccaattccacaataatccaaccattccatagtgtccaagtgatatgaatattcccaaagtctagagttataaaaccacctaatgttgcctagttaatcagcgaagcatctacctaaattcatactagtggaaccatgaatagagtacccactagttggggttttatttattctagggtgaacaaggtaataataacaatagcaataataatgtcataacaaaggtaaataggcatggctaaataaaacagtgataacgcgggaatttaaataaagcgataatgcattaatttaaatcaaaataattttataaactgggattcaatatgctcaaggatgatgtgacttgccttgctcagagagaacggccttccgaaccttcggcgacgaccgcgaaccacgcttcgagaacctccggaacgacagaagctacgcgaagcacacaagcaaagctaaaccctataaagaagcaataacaatacataaaaagaaagcacacggttctttaggttataacaaacattaggagacttgaacgggtcgattcagagttcgtatgaccaagatatgatcatccgaagtttaatgatgttatatggagatttgcggattattatcattaagctttgcaactataaaacatgtgtaagcgctagcctggaaaagacaggaaggctgcgctgttgacatgcgaaccccacatgtcaacctaagggaccacggcagaccgggtacacagagacggtccacgggtcgacggaagtggatcccgtgtgtcaaccgaggcgagtggccgacaaacggactccactaaacaccacacgggttgcacacgtggaaatcacgcggctaccgagcgggcacactaacacggtcaccacacgcacaagcgaacgactaccgacaccggtacacgggtaccggggtcgacaaccgcacaacgggtacggggcgacaccgaaaggacgaggacggggcagcgagaagacggatccttaccaccacgcgacgaggcgtgggaacgacaacgatgaacgggcgcggcgaagacagctcggggacgacggaggcgaacggcgagggaacgacttcagcggcgatccttggacgaaggcgagacgcggctggcacaaggcttgatgacgcggagccgaggacgaagacgaggacggggctgccgcggcttgcttgacggatgcggacgacggacgagaacggctcgacggagggacgaacgccacgacgaccgggaacgacgagaggacgacgacgacgacgaccggggaacgatgccacggtgtcgaaggaggagacggcggcgtcgatcggcgcaccggcgacgccactggacgccggcgggaacgtaactccgggggtctccgcgggaaacggagggcaagccggggaaggggaggtgactgcgatgccgggagaggcgacggcacggccggacggtgcgcgggtgaggtggcacaggcggctggaggcggccggcggcgtgggagagagaggagggcggcggggagaggtggtgaggccacgggagaacgcgggagggggctaaaactggagaacggatcgagggggttccattttatagcggaaggaatcgagccgagcacgggagagggcggaacggcgacgggaatggcggccggcggccatggaaagccgccggagaagacgcgggcgttcccggcgattgggggcacaatccaagggggaaattggggggaattgaagaggaatcaatgggtattaaaaccccccaattaattttggaatccatggtttgaatgaggcggatttggaggagggagcgagctagggtttcacgggagagagaggagccgggcgggaggaaggagacgaccggcgcgtgggccccacgcgggcgcgcggcgtcagcgcgcgtgcggcgcgcgtgcgcatgcggctggctcgggcagggggtggcttgggccgggcggccggcccaggaggggagacctgggagagagaggggaggggagggagctgggccgggagggggaggagaggcccgggagagagaggggaaagagagggaggagagggagactttgggctgggccgagagagagagggaggactttgggccagacttggcccaaaggaggaaggaggattattttttttagtttttctttttagtaaactttgttaattgtttttggttgcttaataattatttccggtgctctgaaaattcaagtaaaatttgagggctccttttaaaccaaggacaatttaacaaaaattctccagaccacattcgaatttttctggtacgtattttagtgtttgccaatttcttttcgaattttaattaattctattattccttttagagaatgatttttaatttcaggatgaatttatcaggacgtgacacgacgccatctgcgggactgcccaaggccgtctcttttcgggcgtcccagccagcgggcaagcgaccagcagcatccggagcttctgcggcaccaaaaccatctccaccaccacgaccagcagagtcaagtaaaggttcctcgcaggtacccgccaagagtgcctcatctgtcacctcgacgggacgcattcagtgccaccgttgccaaggatttgggcatgtgcaaaaagattgccctagtcaacgggcctatgttgctacagaagatggctacatcaccacctccgacatggaagaggaagaggaggaagaagaagttgaggacgaggatggcgaagtttttggtcgtgatgacacaacggactacagaaccatcattgtgcagcgggtgctcagcacgcaggtacagcagcatgacaggttgcaacgccataatttgttttagatttttttcgtcatcaacaactgtcgtgcacgtgtgatcattgatggatgtagctgcaacaacttggtgagttctgatttggtcaataagcttggcttgactacatgtacacatccacatccttaccatattcagtggttaaacgattccggaagagcaaaggtaacacaggtttgtagggtttcgttttccattggctcatatgcagattctgttgattgcgatgtggttcctatgcaagcttgttcacttttgctggggcgtccttgggaacatgataatgatgctacacatcatggtaggagtaataaatacacttttatgcataatgggaagaaaattactttgctacctttgacccctgctgaaattgtagaagctgataaagaacgagctgctagtttgaaagttgatgaatctgaaaatcagcaagtggctaaatctgtttttccacctaaaaaggataagctttcacctagttctaaggttgagggaattaagttgaagggtggtgttatgcttgcaacgaaatgtgacattggtgatatttcaaatgatgatatgtgctatttcttgatatgcaaacaagccttggtttctttagatgatattgctagttcgatacctcctgttgttactaaccttttgcaggagtatgaggatgtctttccagctgagatacccccaggattgccacccatgagagggatagagcatcaaattgatttgattccaggagcatcattgccaaaccgtgctgcttatcgaaccaacccagatgagactaaggaaattcagtggcaagttcaagacctttaggaccgcgggtatgtacgtcaaagccttagtccctgtccagttcctgtaattttggttcctaagaaagatggttcttggcgaatgtgtgttgattgtagagccattaataatattactatccgatattgtcatcctattcctaggttagacgacatgcttgatgagttgtgtggctatattattttcacaaagattgacttgcgtagtggctatcaccaaattagaatgaaacttggagatgaatggaaaacagcttttaaaactaaatttggtttgtatgagtggttagtaatgccttttggtttgactaatgcacctagtactttcatgagcttaatgaatgaggttttaaggccttttattggacgatttgtggtagtgtactttgatgacatattgatttacagcaagtctttggatgaacacatggatcatttacgtgctgtttttaatgctctacgcgatgcacgtttgtttgctaaccttgaaaagtgcatcttttgcatggaacgagtctcttttcttggatatgttgttactccacagggaattgaggtggatgagtcgaaaattgaagccatcaggagttggtcggttccccaaaccatcacacaggtgaggagctttcttggtcttgcaggattctaccaccgtttcgtcaaagattttagtacttttgctgcaccattgaacgagttgacgaagaaaggcgtggtcttccattggggaaagacacaggagaagtcctttgacattttgaaggagaagcttacgcatgcacctttgctacaacttccaaactttggtaagacttttgagttagaatgtgatgctactggagttggcattggaggtgtgttgatgcaagatggtaagcctgttgcatactttagcgagaagttgcatggtcctattttgaattattccacatatgataaggaattgtatgctcttgtacgttccttagaaacgtggcgtcattatttttggcctaaagaatttgttattcactccgatcacgaatcgcttcaatatcttcgctctcaaaataatttgaatcgtagacatgcaaaatgggttgaatttattgaatcttttccttatgttatcaaacacaagaaagggaaagataatgtgattgcagatgctttgtctaggcgctatactttcttatcccaacttgaatgtcggatttttggacttgaatcaattaaagaacaatatgcacttgatcctgattttaatgaagtgatgataaattgtaaagagggacgtacttggaacaaatttgtgatcaatggtgggtttgtttatagagctaaccgtctatgcattccagttggttccgttcgtcttttgttgatacaggaagcgcatggaggagagttgatgggacattttggagctaagaagacggaagatgttttggccatgtatttgtcacatcctgatttttgtttcaggatttataaattatttaatgaattattattagaatttatattaaatgttcattaatttacaagtgaagttaaatgtgggaaataaaattttctaaatataaagcatggatggatttaattttttattaaattctccatggttaattatactctctggaatattctcggatttttcggagctcaattcctaatttttaatcttacaaagagcatttcagtaattacccacatattaaattgatcattaaatggtctaattataattttgttaagtactttgagtgtccaagtattttcaggatttttcttgaaattatttgagcattggaagtatttttaacgattcaaagatcatttcattgattaatttaattggaaaagtaataataatcctcctcctcagcttgggccattttcggcccattccttcctttccttcctctctctttcgccggcccaacctgagccgcctcctctcctctcagccaagccggaaaagtctacttttcctccctgagctactgttcatcttccagctcaggcagatcccgagctagccgtgccgtgcacagtgccgccgtctcttccttctaaatctcgcctccccgttgctcctttttccaatttagttgaggggaaatattcctcttatcctcctctatctttaccctcaaaaatcggagctaaccgttgagtatcttatccgaatcgaactcgttttcgagtttatctccaaaaccgagtttttgatttcccggatcgatttcttgcgggaggagtccgatctcttcaatccaaggctataaataggaccccctagtcctcctctttcgtttgcccctctcccgtgcctcgtagcgccgccgccacgtgctccaccccgccgtcgtcgccggccgagctccatccgcgtcgtgccgtcgcctccgtcgtcgccgccagtcgccgtcaccgccgtaaggtgcgccgaggtgtggagaagcccggccgccggagccccgaagccgccgatcgccggagccccgaagccgtcgaccgaagccgcgccgccgctagacctcgtcgccggccgtcatcgttcgtcgtttggttcgagggtgagtaccgttgggttcgtctcgtcgtcctctacgtgtaaatgtcctccaaagtcgcagccgaccatccaatctccggcgaggtcgtcatcttggttcggccgccattgatgaggtcatcatgacgtcatcatcgtttttctttttcctgtttttctaatagattaaatcttcagaaattcataactaaatcatcgtaactcggttttgagtggttcaagttgctaaattcatctaaaattatgatctacatgtttgtttactttttatgtattgtttatttggtttttattagtctttttcttcgttttgcgtgaaagttagtcgtttccgtcgttgcgaaggttcgcgagtacgccggaagtattcaagaagattaattgaagaccgattattgcaaggcaagtcacacagatcccaaacaaccctttgagcatgttgaacccgtttaaagctattattttatttcaactatgcattatttttgaatgtcatcgggtggtgaacctttccccgttaattaatggccgaagatgatcttattttcctatgggttataattcgattagcatgaaccttatatattggattggttcagctaaatgctatatgtaagtttgcttagctatgcttagaaacattagctaactaaaggggttaattataaactatattatattatattattattatggttatatttaatggtcgctcacgatggttaatcgtgtgatgttaattaattgataattaaaatctggttaaggtgggttgtgagcatatggttttgatggttgtgctcatgacaattaaggaccggttcgcgagctactgttgtgaaacatttaccgtgccaaccacaagccagcatgggcaacggctttaccttttgtatagcatggttcattatagtgtgccagactgtgaagcggcgagaagtccgtgggggtcgctggggagtccattgcctctggttttgagggggagattatgatccaggaacggtgcactgttttgagttgtgttgtgcaaagggtattgtcacgatttccccctttgcaatgccgtggtggtatttcggggcatggcaacatgtgtggaatcgtgtcttgtgggtacagtggtacacctctggccagagtaaaactattcgaatagccgtgcccgcggttatgggcgagttgagcaatgtttttcgtgattagtctcacacctctcacaataattatggatgttataactggtaataatttgcttagctcctggtttggagttagatctgtacagccgggtatggttgttcaggatggttgggcctgtgcagcatgggtgtgctgttcagtgttgattaaaatttctgattaactactccactgttttacttctcttaaaagttttgctaaatgctgcttttgcaaatgagcctatattatgccatcctttggtatccttgtgcacttgcatatttgctatgtggcttgttgagtatgtcatatgctcaccttgcaataatcaatcaacctcagttgaagaaaaaggatccagaaggagaagacgtttggcttatacccgagttgagctgcctgtgggagtggagccggagattcgctagattttattttccgctgcagttttcttcatggtgaggactaagtgcctcttaagtaagtatttagcgttttagttaatttgatgaatctgtatattaaattgtcagtttgtgtacctcggctgatttctggacgaggattttatgcacaaataagttcggaaattactagtgaatttctgggcgtgacatatttcttttggccaaggatgagaaaggatgttgacaggttcatggcacgttgcaccacttgtcagaaagctaagtctcatttgaatccacatggtttgtatatgcctcttcctgtaccttctattccttgggcagatatttctatggactttgttttgggattgtctagaactaagagggggagggatagtatttttgtagtggtggatcatttttctaagatggcacatttcataccatgtcataaaagtgatgatgctgttcatattgctgatctatttttccatgagattgttcgcttgcatggtatgccttctattgtttcagatcgtgatgcaaaattcttaagtcatttctggcgcacgctatggaacaagttgggtacaaagctattgttttctacaacatgtcacccacaaacagatggacaaacggaggtagtcaaccgcactttaggtaccatgttgagggctattttgaagaaaaatttgaagatgtgggaagaatgtttgcctcatatggagtttgcatacaatcgggcaacacattctactaccaaggtaagttcttttcaggtagtgtatggtttcaaccctcgtgctccaattgatatgttgcctttacctactagtgagagggttcataatgatgctaaggcacgcgctgaatttattttgaaaatgcatgagtcaaccaagttcaacattgaaaagatgactgaaaagtatagaattgctggtagtaaaagtaggcaagaggttaagcttgaaccgggtgatttagtttggttgcacttgagaaatgatagatttccggaattgagaaagtctaagttgatgcctcgtgctgatggcccttttaaaattgttgagaagattaatgataatgcatataaacttgagttgcctcccgagtttggggttagtcccacgtttaacatttcagatttgaagccatacttgggagaagagtatgagcttgagtcgaggacgacatcaattcaagagggggaggatgatgcggacatcactacctcggatacacacaacaatcctccaatggtcattcaaggaccgataacaagagctcgtgcgcgacaattaaatttagaggtgagttcgttcctatgttcttctttgtatgaattcgagaatagattgcaacctaatgattatattgtgcttaggaacaatggaggggacaaagagacacttggagaaggacttagagtcatggaggaccatcggggacgtccaagtcaaggtggaggcccaaaccaagtcgacgtcgggtgcaattcggagtccaggaccagtctgcactaaaacgggcgcccaggtcgcatacgtgctcagattggggcgttctttatatggatggaaagctaagaaggtaacctttcaaatggttttgctcccacatccaaattctttccgagtcaacaggaattgaccgaacaatttgacgtccaaaatctgtcccagtgctgcgtcaccgtatttgggcctttggcccgtgtatcgtgttggaacccattagggttgcatcgagaggggtttgcacgaccctaaactctatatatcagtacccgccatcatgtttaggtttttgggttttgcttagattaatctgtcgagaacagtttcgccgctagttcggtttgtaagaccccaactcgtgagcttaatcattcatctgcaattttggttgtttttctatctcgttcttctttgtgttcttcgattggcaaacagggattagccttctcggtgtggtcattcgcgtttcgacacgggtgataaccagaggagacgtggtgctgcaattgcggggctcaagagcgtgcgcgttcaagaagccggatcgatttgtgtggcgactccgcccaaatcgttgtttatcagaaccttttggaagatcgggaaccctagtgcacatcatatacttactccagaactaacgagtatatatatatactgattatgtctttttattggtacgcgcagtatatactactgcaacgagcgaatgagtatatactgttctttcacggaatgagtatatactgattttttttttggaacgagtatatatactgacttttctcggagtggtatatacttatttcttctccaatcggtatgaacagctactcggagtggtatatacttatttcttctacaatcggtatgaactgctctttggtcagtgtatatatactacattcctcattgaaggagtatatactgcttcttttttttatcagtatatgcatttgttattatttgagtatatattgtatgcactacttgttctgtcagtatactgcatgtactaattgtcatgtttggtcggtatactgcatcgtcctcgctaaaggaggttatactgccttcttgtttgatcggtatatactatgtatactactttttttcactcagtatataaataagtatgtaccagtatttcttagataagtcgtatatttgctatccatggaagctggatgcatatgcttttcagttgaatagaataattaatatgcttttcacgtgcaaattcagatgtatgcctgaatcactggcaaagtatcggctgttgcattatgaataaacctaaattaatgaaataccctagaagggcactgaattctgaatggacattaccagaccaaagaaaaagatcaacgcagactttcggaaactaagaacaaaacataacgggatcacccctcgatgtggctcatcgaagaatctctgcatccccacagacagatctcggttaacatcgatgggatcacgctgaccgcacgccggagagaggtggacaagaatgtgtcttcctggattaacaccattagctaggaatcacggttcaatgccgacgacaatgctgtcgccgcacggccacacatgctgggctgttctgtcatcagcaccatctacgtccacgatacatgcatctcgcatttgcatgcaccaaacaaattcgatctgcatgcatgcattatcgatttgcaacgtagaaaaagcaaatcaagaaaatcggaagaaggaaggacttgcctgcagtatagtcgatgttccagttccggacgacgctcaacgtcgtcttgatcgtagcatgggcctgcatcgatgccgtcgccgcacggccacactgacttgcccgaagatcaacggcgtcgttgtctggtcatagctcttcggccagccagtcgcctgcggatagtcataccgaaggcattggtaatggaagacgccggcgtagacatcagcagatgccacgaccttcgaatagccgatgggtcgcgccgccgtcgccttcgaatcgctgatcgagataacctgcggatcgatctatcgattctgtttacaaccacccatgagattttaatacgagctattcaaaagggttccggttattacggaataattcagattatgaggatttttttcgtaactaaaaatcaaaacgggctcggtatctggatccgcttgctgacttggtcggtggtgttcgctgatggacggtggatggaaccgggagtacctactcctgggagtatagaatcattatatatatatatatatggtgagactattctataccccccctccccctcaagagcccaacccactaccccctccttttattgggctcaaaacccacctcctaccccagtcaaagcatggtcaaaggacggtcaaatcgctgccatgtcggtcaaacccgtgtgctaacttcctcccacatccacctatttgttgtccttgtctcgtacgaacggtgcagtaacatgacgaccactatgcagtaacactgtaccttacttgcagtaatactaataaaatatagttaaaatatagtcatgacggatctagttttgtagagctttttttttaaagcattacggtgcaaacggttcaaaaatataatatgtggtgtgagagatattattgtttaaagatgtgaattcaaaagatatcacttgcatttacattttactagttcaaagtgggtgataggtcctgtacctgtgtttggttgttaccacctcttattgcagtaatgctattaagaaattgcagtaacatgcagtgttactttaaaagttatagttgttactgcacacatacagtaacgccatgatggaatggtagtaacacacaataaaaagtagtaacaataatgatttagtattactacttatggagagataaatttcaaaataccaatcttcgagaagaaatagtagtaacacactcgattactgtaaaagcacataaactgttacaactctacaggacacaaagttccatagttgtaagaagctaattagaagacaaatatatatgttattacaaaactcataacaagttactatgttttagtagtaacattatcgtataagtatagtaacacgtcacgttactgcaaaacatataggatgttactgcacttttgatagtaacatcgtagtgaaattgtagtaaactagaaatcgaaaaaaaaatatatgagttaaaagtctacatgctaaccatatatttgttactgcacaaaagtgtaagtgttactgcatggcagatacacgttaccacaagtgtatgcagtaacactattcaagaattgcagtaagatgctttgttactgcaaaacttataaaatttaccacactttcataacaatgttatgatgggattgtagtaatgtacaatagatagtaacaacacttgtggagagttaaattttaaaagaccaatctttgaaggttctctctacccttgctgtcgcgaccgagaaaattgccttttcccgaacgctagtgtattaatccccgtcccaggaaaagccggggtacaccacacaaacatgatataaaagacacatctttattatatcgataatatttacattattacaaaggcacttcaggcctgacaataaaaaataaacagcagcggactagcgggcctacggctccatcttcacaggcgctcaactggggtataagccaggactccacctaagacttcttctccaaagcttctcttactgaaggggggaaagactgagcaagaatgagtacaaccacagtactcagcaagccacaccggagatgcataattaatgcaagggagtacaaggggataataatataggggttaagttttgcagtaaacagcatttaaaagtcacttagttgcccaaagccattttataaagacgatcctaaagctacacagtattactaatcaaggccgtgaacccacacgaacctgccttaacccaaggcctacgatgatt

SEQ ID NO: 6288 - DNA, 27084 bp, Oryza sativa
ataggggctcgagaggggcggacatggccgggaaaccccccgatttggccggcgacgtgggggggagagagagagagagtggggggaattctaatcgaatcccgcccatttgcaggcgcgcgcgcgggcgagaatggcggggagggcggcgacgtggggacgcggagcgggggtgcggatgtggaggaaacgggcggcgtggggaggtgggggcgccggcggttgcagctcggctccaaccggctggaggaggaagacggggccgacaggtgggccccacctgtcggtgacccggagagaggagggagggagacgtgggtcgggcccaacaaggaggagggcagcgcgggaagagtgggccgacggcctaaaggaggaaaagaaaagaggaaaagaaaaagattttcctgggattatttattgcggtttaatgtttttaattggttaaaattatttcgagagctctgaaaattccactaaaaattttgttagcgaatttcgacatgtagaactcaagaaaaattccacatgccaattccgattattatttgcatttattaattaaggaattagctctaagttaatcaaacaatttcttcgcgcaattcatttaaccatttttttaaagcaaggaaaaagggggaaacttcagggcgtgacaatacagttgatggatgtacatgtttgttgcacaatctctgaacaaactcttcatatctagtcctgcgtaccaggcaattttacatttgcacgctttcgccgatggacagaatagaagattttcagatacacttaggtcgtacccgtcaaatgaaggtaaaaggcaacgagtaacattgttttaagtgtactattgagtagtccttcataagataacttagttgtgtttgtagcgtactatggcgtagtagacgagttagtaccatggctggcttgcattccatgtgagtccatgttagtttagttaggctccccaacgtgagtaagtgaccgaataggtttagaaatggtatatttctaggtctagctagcttgcctatgtaggttaatatgtgtgtatattatcgcacaaggtcggaacttttttgaaattcgatactgtacttcttacaaatactacctccgtttctatgaataacacacatgctcgtttttgaccgaaagaattgagaaacaaagaaaaaatcttatatttagtaattggaggcaccaataaagcttccacgctagttaattgatgtcacgtaatttttctagcccatgcaagtgcacaggttgatgactaataatatatacatagaattattgtattcatattgaaaaacacgttgaaatgatgctaattttctatcaaatatctttgtaaattaaaactaattcttggtcaaagataaatcttaaaatacatgcgtgccatatttattggaatggatggggttatgttggtgctaatgaatcttattgttatcgaactaccgctcgatgcccttgtacatactgtacagtgcaagaagcgtgtagcatgagagcctttaatgtgttgtcaagtcccgatcctgcatgatgtctatttgggaggagcaatatgtacatatgcatgcatcacacttcagcatttttgtctttttaccttggagttttaagaatgctcacacttagggcatgcaagttgatccattggtatattcacaatattcgcaacgccatgatgaaggctatgaaaatgacaatgatacatgattggtaacataactatcaacatttcagagcaaaatatggagcatttaggccaatcaaactttcaattttcttcgattgctgctcccttgatgcctcagattcatctatcactttcttgaaggaatccaactcttgcaacaacagcagttttgtcgcttctattggggcggctgagtcaaggccggcatagaaaaatttaagagtaggtatggccataacaaaatcgtctagcttagatatagcataaatggtgaaagataggcatagaaaaattcatgagttaggtatatgtatatttggcataatcatgatgagacagcaaaaatcataaattagctatttacccacgggtacatgacatagcacatagcaagactagtgagatataggcatcacagatttgttggagctagacatatagctagttgaggaattttggaatagcaaaattcatgggtctacttctatcaaaacccactcccctccacagcaaaacaaactaacatttgcgccctaaccatgtacatttgctcccaaatccatctccaaacaaacagaacaaactaacatctatcctaactatgtatacccagtaatagtactcgccatatctattcacatgcagagatcgccatatctattcacaagcagagaacacatatatagcacactcatcctctgtgaacactgcacatccgttttaaattttattaccgttccactgctgcagttcagctagcaagcacacactgttcgaagatctcaaggagagtccagtcgtggtcgagatgccctgcgcgtggcgttttaaattttattactgctccactccactccgcatttccactacatgggtccatttattgcgactttttaagctcatctccctccatcgaggagagcctgcccatcaagtcgtcaactcttcttcttttttttatagaaaaaacaaaactgtcaatatttcagtgctccacgcataaaaaagaagaaaacatttcacagctccagtttttctatggttcgaggtgtcaaacgtcgaatatttcactacgacagaaactaaaattggagacatcactacaaacgtacacactcatgctcgtccggtgtatataaggcgcaccccctcagttctactataaatgtacgcactcttgctcgtcgttgcaccgcacaagtacatagagcacttgcatgtgtataataggtcagggggaactggacaatatgcaaataatctctctggaggattcatcaagatcaatgctttgctttgcttgcccggtctcctagctagctaacagtctccatttgattgatgcttttatactaattaactaccgctactaatgctcttataccaattaagtatatgtgtatcaacatagttaattaattcaccttggagactcttgcttatgggtggtttatatatatgtgtctcatgagatgatcaaaactgtgaaggcagattgatgtttatttatccttctggctaatatgttatggccgattgagaggcacagttggagaagattacctaccacaatcctctcatcttgcgatttttgtccgttctcgtaggccaattagggatgcaaggaatcggggacttaatctaattaattaatgaaatggcaggacagtagtagacccttgctaatcccggccctctggccaattattcattgataattttgatattgacacaatccctaaaatttaactttgagacctgatcgagtgtcatgatcattgtattgtggaagtgttttagacaaatctactagcactattatatttttcacatatttccatcttcacatgtatgctcgtgtatatatatatatatatacacaacaaattaaaatgaatatttgcctgtggttaattagcacctcaactctcatggttcattttctcgcttgagataaaaattgggaataaattaaccgatattttccataccaaaattaagctaatatcgtcaacaatttttaaaatgaaaaaaatcatcaaatattgcgaatatactaatggatcaacttgcatgccctaattatgagcattcttaaaactgcaaggaaaaaaaagacgaaaacgctgaggtgtgatgcatgcatatgtacatattgctcctctcaaatggccgggagtattaatttagaaccgaaagatatcatttttgtcagtctcgtatttttcatgtaaatccgacacgcgattacggttggtgaattgaacttggtcatctggagcacttttcaaaaagtttcatttctgtacagactctaaaaaaactagttggcaagtgaaattctttagtttcactattatgaaaaggattattcctactgcacctacatccgaccacatcaagcagcatggtccagaccacgttgagcacatttgatcctaacgtatataggtccgataaagggaagcagcatggtcgacgatgtgccagactctaaaaaaaacctagttggcaagttgaattcttttatcttctctaccccggaaaatataaaaactcatgcagacagtacgaatccacacagcatgcacaatacttttgtaacaaggcatattccatcggtttctctctctgacaaaggcatgcatgctagtagtttggaataaaaaaaactaaggataaattaacactaccaaagtagttaatagtaaattcacacatgcttaattaattaggtactagctggcaacaagttaattaattaaatcagctccgtgaatgcagcctctgactcatccacaaaattcgcatgcatgtcgacgtggccggacagcatccaagaagcagatcatttgaacaaatccaagtagcttagtccatgttgcatatgatcaccagaaacccaagtggatcgccgatcaattagctctgtgtgttgtatgtctcaaactgtctctctaatagccaaacaagccatcactacaatagatcttattataggtgacgctcatttacgtcataaaaattgaatttcaagtcatgttgtgaaatctgtgatattcgtgtgacgaatatcattcgttacctattatgcgtcactaatggcattctataaagaaagcttatctttttgttactaatctagtgacgatccttctgtcgtcatagagtctatgacgtccattttcgtcgccattaagcccagaaatcatcataagatgccatgtggccttttacggcccgtgtagtcagggccagcttaggggggggggagcggtacagccgcactaggctcccaaatcgcaggggcccccacccacacagcttgtcgggtcccaaaattaaagattcggtaacctaaatgtttaaactatatgaacccctggatcagtagattgatacatgttcaacaatctgaatcttcatcgcatacatttgattaaggctccaatggagatttctttacataaaataatagggtatttacaagattgtggctaactattaccgtagaagccataggatgagccaactctaatgttttgctatagaattaaaccatctatataatctatacttgggaactaagttggaatgaaaccaatttatatgattaaactcctggcttcggcaaaaactccaaattgattctgaaagagggggttaaagcaagggtgagtacgatatactcatcaagctattatatcaagtaataaatccatgaaatagtaatttctgagtagggtttagggcttaccctaaaccatatacaaaaaggtcactgggtattaggtgaattgcgtttagaaccatatgcccacatggcatacaaagcaattttaaaaaaagaaccttacaaaatttaaatttctactaattaaagtccttagcgcctaatgaagtggctaaacacccgggctcacttacggtgactcaacggctggagaagcagaggcaacaaaagggcaatggcgaccgacggcgtttgcggcggcgtattggcatgatcatatttgggtgtctttctgctaggaccttggcgacgtcggtggctcaatgattcggccggagatggtttgagtcgattggaacgacgatgtggggcgatggcggtgctctggacaccgggaacgccgacgagtgcaccaccaagtattcaatctatgccaaaacggaaacaaagaaaatggatcgatcaggtagagaaggaacttctcgaatcactaatatagaaacgattttcctggacagggacccttttatatttcgtgcgggcggtaactcgttgcttctaggaaaatcggctcattttcgcgtgcggttcaattaagaggacggcatggaaaaatctatttttccatgcggtcctcttaaatggactgtatgcgaaaatgagccgatcttcccatgcggacctattgagagagccgcatgcaaaaatactaattcctctttcccctctcaccaactttaaaattttcctctttctctcctctcccctcccctctatccctttttccactttaaaatttccacgtagagcttctcctcagtcctctctctctcacgcatctcctctcctctctctccactctcccctcctctcctctccttccaacggcggcagcgccgtcagcgcgcggtgacagcagcggtgcggcggcggtgggagtaagcgcgcgccggcctcctccacgtggcggcggtggagggcgtgggacctagcgggcggcggccgtccctacgcagatccagcagtggcggccgtcaacgcaagaatccagcggtggcggccgtccacgcacggatccggtggcggccgtccccgcgcgagatccagctcccctcccctccccttcctttcgtgcctagatctggcggaggggaggggcgtcggcggctgtgcggccggaggggagtgcggatctgacggcgggtggcgcggaggccggcgggaggcaggctgcactatggcaggcgggcggcgggcgaaagcctaccgccggattctagggtttcgtttttttaaaaaaaattatgttttttcggatttttgtgttcccgtgggttgcgccacccgcacacaaaaatcgtcatgttcccagacccctaggtgcgtgcaggccgcctacccgcacgcaaaaatcgttttagccctcacacaaaaatcttggttgtagtagtgaatggtgaaagtaaaggtggaaagtgagagctagttgtcaacatgaggggtagaaacgatttaaaggagttggcagtggtttgagcctgtgatcccacttgtacttcactcaaccaagtatgagtggctgtctagtggccccatgttgatgtttcctaggagaagatgagaggtatggtgaagtttgggtgtaaattggactttaactccctctctctgtttctttgtctctttgaaaatataatttaggatcaaagagatgattcaccaaggttgtttgcaggtatttggacgacaaataggcccatatatagatgattcactatgttgtgaactctgtgacattcgtgtgacgaatatcattcgttacctatcatgcatctctaatggcattctataaagaaagcttatctttttgttactaatctatgacgtccattttcgtcgccatcaagcccagaaatcgtcataagatgccatgtggcctttcaaggcccatgtattcagggcaagcttggggggggagcggtacagccgctctaggctcccaaatcgcaggggcccccacccacacaccttgtcgggtcccaaaattaaagattgggtaacctacatgtttaaactatatcaatgtcacaccctgaaaatcgcctaatttaataattcagtttttaatgcatttttagaaattattttaaaaacctacaagctaaactcctataatctaggaaaaatttcaacataaaattgaactagataaaattttattaaatactttgcttgtttatctattttctagatttttctgggaattatttgagcaagggaagtatttttaataaatgaaacatcatttcacgaattattttaattgaaaaagtctttaaaatcctcccctaggccgtttggccgtttccagcccaacatccttctccctcgcacgtggccgtgcagcccacgccgtgccaatccaagccgagccgcccctcgtctcctctagtcgtcgacatgtggggcccacatgtcggggtcatcccgtacctcgggccgggccgagccgagcccgagcgccgccgcctctcctccgattcctcctcaaccggtcgtccccgagtctgattgcttaaggggaaatcatctcctccttatcctctccctttcccctagagtttcggaggtcaattttgcccgaataaaccaaatcgaattcgttttgagtttatctctccaaactaaccctagtttttcccagctcgattcctctcggttggagtccgatctctctaatccaagcctatataaagcatcccctagtcgtcctcttccgtttgccccaagtcccgcgtctcaccgttgctcgtagcgccgccgctgcgtagctcaagccgccgccgtcgccggcgactctccagtgacgtcgcgcggctgctagcgtcgtcgccgtcgctgtccgtcgccgccgccgggttcgcacggtggaggagtaccttggccgccccttcgccgtcgtcgcaagccgctggaacgccgccgccgtcgtcgagctgagccgcgccgccgttggtcctcgtcgccggtcgccgtacgtcgtcgtccgtcatagtttcttgcaccggtgagttcgcgtcgtcgtcctcttcacgtaggtgtcctcggatagcccaaccgagctctctatcgccggtggtcgcgtggagccgtgccatggccggcgatgatgtcatcgatgacgtcataaatcctttttattagttgaaaatcgattaaacttcggaaattcataactaaatcatcgtaactcgtattcgagtggttcaagttgctaaattcatctaaaatcaagatctacatgttaaaaatatccacatgtactgtttattcttgtttttgtactgttttgttgattttgtttatttgctttagtttccgatgttccggaggagagcgtttacgttgaggaaggttcagaagtgtttgaagaagctcaaggcaagtcacacagatccgaaacaaccctttgagcatgttgaacccgtttaaagctaatattttatttcaacttatgcattattttcgaatgtcgtcgggtggtgagcctttcccagttaattaatggccgacaatgactttattttcctatgggtaataaattgaatagctttgaccttatatattggtttgctccagctaagtgctatataggtataattgcttagccatgcttagaaacattagctcattaatggggttaatcatattacgatattagttatggttatatttagtggtagctcacgatagttaattgtgttatgataattaattgatacataaacctgattaaaggtgggttgtgagtatatggttttgatggtcgtgcttacaacaattaaggaccggttcacgagctactgttgtgaaacatttaccgtgccaaccacaagccagcgtgggcaacggctttaccttttgtatagcatgattcattatggggtgccagactgtgaagcggcgagaagtccgtgggggtcgctggggagtccattgcctctggttatgagggggagattatgatccaggaacggtgcactgtggtgagttgtgttgtgtgagaggtattgtcacagttcgtttccaaggtaccgtggtggtactgaggcgcatggtgacatgtggagttgtgtcttgtgggtacagtggtacatctctgatcagagtaaaactattcgaatagccgtgcccgcggttatgggtgggtctaacaatgtttttcgtaccaccataaatgaaaatactatgataactaaattgactcctggtttggaatggtatattcctggtttggaggtttgatttgtacaaccaggggttggttgttcagataaggttgggcctatgcaacatgggtgtgttgtatagtgtttatttaatattgcttaattacttaactgttttgctattctctcaaatgtttattaaatgttgtttatgcgaatgagcttaattatgccatcctttgttatcctgtgcatttgcatatttgctgtgtggcttgttgagtatgtcatatgctcattcttgcaatattcattctttagaggaggagtgcttcagtgaaggtgatgatcaggaggattaggctttgttcaggtcgagttgcttgtgaagtggagtcgccatagatgtttagtcttttgctttttttccgcggcgtagaactttattctttgagaggaactatccacctctgtaataatttactttgcgcatattaattagttatttgatagtactctattatcaatttgttattatgtgcctcggctgattcctagacgagggtttaacgcacatgtaagcgtttggaattttggatagaaattccggacgtgacaagttggtatcagagccaccttgaccttaggacaagccaaatggtaaaccttaagttgccttctaattattttggaaaatagaactgcccttctctattctcttataaattaattaagttggcagcacatgcaaggttatgtacaaaatttattaaattctactttaccaaaacagaaatttgttcttttattttgaaagaaaaaaaactttactgttcagggtattaaatagtttaattttctgaatttcattggttagtcggcactgtacatctattatggtatcgattcaatcaagatggcatcagtactactcatccctgttaatggtgacactgtaccgtgctcctggtagatcctaaatattttagttttaatttattcatttgtgtaaagttatttgtctctgttcaaggttgatttatgttccaaaaagaaaaaaaattgagtcatgtttgttccttttcttttattttctttttctttgggtccaatttaattaagtctagtttgtgcagctaacttaaaaatatgcattaattccttcctttccatgttgctttagatgcccatccgccgaaaaacttgatcgaggtgctaggattcgtcagggagctgagaatgatggcatttgaagtaggttacgaggttgcccccgagtatcgccagattccccatgaccccaacgaggagaagtgtcgtgttcgcgtgacgttgactagtgatcgtgaagaccttccgtcgataaagtttgaagctgagggaaaaaagtacagccatgtttgtcaggaaacagccttggtggccattggagagctacgtcatcgctttgatgaggagttagagtcatcagctttccagtatcacccacacaagccacatggtcaagactatagaacttacaactgtcccgaaggtgaaggtagcgccactgtgatgcacgccgtgtatatgcttagcgccatggatgcagtaggcgtggagcgagagaaagcagctcatgatagggaaaactggaaccgtggcaggatttgtaagttggagagcaaggtgtaccgtctgcagaaggaactagctgagcttaagggagaagcaccaccgccagcacccaagcttcgcctcaccgcaaggaagagaaccagtctaccacctcgtctccagttagcttcgaagactcgtgtggtgggagacgctgtgcctgatcatgctgaacctgtcatccatgtcttaagtgatgaggaagaagaggaagacccaaaagaaagagagccagctactccagaggaggaagatccatctcttcgttccgacgcaaggcgagagtagttgtctagttagaccgttgccgtagttcgctgtgttagtttgcttgcttaagattgcttgtgcgtgtgtgggtttagcatgttgcttacatcattggtgggatgtaactacataagtttagttcttttgcttgtcagagagtaagttagctggtgagatagtgttaattcaatttaaatgtaatcatacacaattaagagcaatatagaatttaaattaactaaagttctccgttctaagggtatctctctgtcattctttcattttgcccatgcttttcttcagatggtgaacacccgcactggaagtgaaagtggaagtggaaatggtcacaatgaaggagatcccacacttgcccaagttttggcccagcaaacccagttgattaatctattagtgcagcaagcgcagaaccagcaggcaaataacaacaatcaaccaccacctccgcagaacaagttggcagattttctacgtgtgagaccacctaccttctcaagcaccactaacccagtagaggcaggtgattggctgcatgctgtgggaaagaagttagatttgtttcagtacaccgagcaggagaaggtttcctttgcttcacatcagttgcatggtcctgctgctgagcggtgtgaccactttcttctaaacagagccgagggacagcctatcacttggcgggagtttactgctgctttcaagaagacacacataccatcaagtgttgtggcccttaagaagagagagttcagagcactcaactagggatcccgttctgtcagagagtacctccatgactttaatcgcttagctcgttatgccccagaagatgttcgcactgatgaagaacgtcaggagatgtttttagagggactgaatgatgagttgtcttttgcattgatggctatggattaccgggatttccagtagttggtggacaaggcgattcgccaagaagacaagtataataggatggaacagaaaaagcgtagtagccagaggccgcgcattgctttgggacctcaagctgcaccatacccacagggaggatcctcttcagttgctcgccctcaacgccagttctacaacaacaacactagtaatcacagcaacgataatcgtaatatggtcactcgtcatgtagcagctccaactcagaatcatcctgtcaggaaggaacagggaagcaagccaggggtgtgcttcaattgtggtgatccaggacattatgctgataagtgtccaatgcctcggcgtgtgaagaatgcacctgttcagaacaactccaatgctccagcaccgaaggctcgtgttaatcatgttgcagccgcagaagcccagaatgcacctgatgtggttttgggtacgtttcctattaactctatacccgcaactgtgttttttgattccggtgctacacattcctttttgtctaaaagttttgcgggcaatcatgggatggaagttattagtcttgggagacctttactagttaataccctaggcaatcaagtatcctcaacgcagtactgtccttccgttactatagaaatagaagaaatacctttcccatcctcacttatctttctagaatccaatgatcttgatgttatcttagggatggactggctaacccatcacataggagttatagattgtgctaaccgtaatgtgactttaacaagtagcaatgggcaaacagtgtctttctttgtgtcatcccctaaatctcacggtttgacattaaatcaagttgctttgcaagagatcccaatagtacgagactatccagatgtgttccctgaggatttgccaggtatgccacctaagagagacatagagttctggatagacttagtacctggaaccaaccctatccataagagaccatacagaatggcagctaatgagttagcagaggtaaagagacaggtggatgatttgcttcaggaaggatatatcagacccagtacttcaccgtggggagcaccagttatcttcgtggagaagaaagatcatacccaaagaatgtgtgtggattatcgagcgttgaatgaggtcactatcaagaataagtatcctctacctaggattgatgacttgtttgatcaactggaaggtgctacagttttctccaagatagatcttcgttccggatatcaccaacttcgaatccgtgaggaggtatacctaagaccgcttttacaacacggtttggtttgctcgagtgtaccgttatgtcgtttggactcactaatgccccggcctttttcatgaacttgatgaaccaagtgtttatggaatatctggataagtttgtcgtggtgtttattgatgatatccttatctactccaagaataaagaagagcatgaagagcatcttcgtcttgctttagagaaactacatgagcatcagctctatgccaagtttagtaaatgcgaattttggttgcccgaagtgaagttccttggtcatgtcatctcaactggaggagttgccgtggatccaagcaatgtggagtcagtgctaaattggaagcaacccaagacggtttcagagattcgtagtttccttggtcttgcggggtactaccgcaggtttattgagaacttctcaaagattgctagaccaatgactcgactgcttcagaaggatgtgaagtataagtggacggaagagtgtgaacagagtttccaagaattgaagaaaaggctagcggctgcgccagtgttagtcttgcctgatccaaggaaaggttttcaggtgtattgtgatgcttctagacatggtttggggttgtgttttgatgcaagatgggaaggtgattgcctatgcatctagacagttacgcccccacgagaataactatccaacacatgacctagagttggcatctgtagttcatgcattgaagatttggcgtcattacctttttggtaaccgtacggagatgtatacggatcacaaaagtttgaagtacattttcactcaacctgatttgaacatgcgtcaacgacggtggttagagttgatcaaggattatcatccaggtaaagcaaatgttgtagcagatgctctcagcaagaaaagctactgtaagatgttagaaggtcgacacctaccttgggagttatgtgaggaatttgaaaagttgaacttgggaatagtcaacaaagttttgtgccgctttagaagctcagcctactctttttgatcaagttagagaggctcaaatgaatgatcctgatatccaagaaatcaaaaagaacatgagaagaggtaaagccatcggctatatagaggatgagcaaggaactgtgtggctaggagaaagaaattgcgtgcccgataataaggagctaaaggatactatcatgaaagaagcccatgaaactttgtattccattcatcccgggagcactaagatgtatcaagacctgaagcaacaattctagtggccagcatgcgacgagagatagcagaatatgtggctctatgcgatgtgtgtcagcgagtcaaggcggagcatcagaagccagccggtctgctgcaaccgttgaagattccagagtggaaatgggaggaaataggaatggattttatcaccggtctacccagaacatcggtaggacatgattctatttgggtagtggttgacaggcgtactaaagttgctcatttcatacccgtcaaaacaacctacatgggaaataagctcgcagagctatatatggcaagagttgtatgtttacatggcgttcccaagaaaatagtgttagacagaggtagtcagtttacttcgaagttttggcagaacttacaagaagggatgggtactcgtttgaatttcagtgctgcctatcaccctcaaactgacggtcagacaaaaagagtaaattaaattctagaagacatgttgagagcctgtgttctagatgtcggtggaagttgggataagaatctgtcgtatgctgaattctcgtataacaacagttatcaagctagtcttcaaatggctccatacaaagcattgtatggtcgtaagtgccgtacaccgctcctttgggatcaaactggtgagcgtcaagtttttgggacagatgtattgcgagaggcagaagaaaaagtgaagattatccaagaaaggttgcgagttgctcagtcgcgtcaaaagagctatgcagacaatcgtcgtagggatttgactttcgaagaaggggattatgtatacctacgggttacgccgctgcggggagttcatcgttttcagaccaaagagaaattggcaccgcgttttgtgggaccttttaagattgtgagtcggagaggtgaagtagcttatcaagtagagttgcctctgtcaatggagggaatacatgatcgtttcccatgtgtcgcagttgaagaaatgtttgagtgtacctaccgaggaagcagatcctgagcgtttagagattcaagaagatttaacttatgttgagaagccagtcagaattttggaggtgagtgagagaaacacccagaatcgcgtcatacggttctgtaagttttagtggagcaatcattcagaagaagaagccacttgggagcgggaggatgaattgaagtcagctcatcctcatctttttgccagttcttctgaatctcgaggacgagattccgtttaaggggggtaggtttgtcacgccctgaaaatcgcctaatttaataattcaatttttaatgcatttttagaaattattttaaaaacctacaagttaaactctaataatctaggaaaaatttcaacacaaaattgagctagataaaattttattaaatactttgcttgcttatctattttctagatttttctgggaattatttgagcaagggaagtatttttaataaatgaaacatcatttcacgaattattttaattgaaaaagtctttaaaatcctcccctaggctgtttccggcccaacatccctgtccctcgcgcgcggccgtgcagccacgccggcccaatccaagcctagccgtccctcctctcctctagccgccgacatatggggcccacatgtcagggtcatcccctacctccggccgggccgagccgagcccgagcaccgccgtctctcctccgattcaacctcaaccggtcgcccccgagtccggttgcttgaggggaaatcatctcctccttatcctctccctttcccctagagtttcggagatcaattttgcccagataaaccaaatcgaattcgttttgagtttatctctcctaactaaccctagtttttcccggctcgattcctctcggttggagtccgatctctctaatccaagcctatataaagcatcccctagtcgtcctcttccgtttgccccaagtcccgagtcccgccgttgttcgtagcggcgccgccgtcgccggcgactctccagtcgcgccgcgccaccgctagcgtcgccgccgtcgctgtccgtcgccgccgccgggtttgcacggtggaggagtacctcggctgccccttcgccgtcgtcgcaagccgctggaacgccgccgccgtcgtcgagtcgagccgcgccgccgtttgtcctcatcgccggtcgccgtacgtcgttgtccggcgtagtttcttgcaccggtgagttcgtgtcgtcgtcctcttcgcgtaggtgtccttggatagcccaaccgagctctctatcgctagtggtcgcgtggagccgtgccatggccagcgatgttgtcatcgatgatgtcataaatcctttttattagttttttctattagttaaaaatcgattaaacttcggaaattcataactaaatcatcgtaactcaaattcaagtggttcaagttgctaaattcatctaaaatcaagatctacatgttaaaaatatccacatgtactgtttatgcttgtttttgtactgttttgttgatttggtttatttgctttagtttccgacattccggaggagagcgtttacgctgaggaaggttcagaagtgtttgaagaagctcaaggcaagtcacacagatcccaaacagcgcttttagcatgttgaacatgtttaaagctaatgttttatttcaacttatgcattattttcgaatgtcgtcgggtggtgagcctttcccagttatttaatggccgacaatgactttattttcctatgggtaataaattgaatagcttggaccttatatattggtttggttcagctaagtgctatataggtataattgcttagccatgcttagaaacattagctcatcaatggggttaatcatattacgatattacttatggttatatttagtggtagcttacgatggttaatcgtgttatgataattaattgatacataaacctgatgaaaggtgggttgtgagtacatggttttgatggtcgtgctcataacaattaaggactggttgacgagctactgttgtgaaacatttaccgtgccaaccacaagccagcgtgagcaacggctttaccttttgtatagcatgattcattacggggtgccagactgtgaagcagcgagaagtccgtgggggtcgctggggagttcgttgcctctggttatgagggggagattatgatccacgaacggtgcactgtggtgagttgtgttgtatgagaggtattgtcacagttcttttccaaggtaccgtggtggtactgaggtgcatggtgacatgttgtagagttgtgtcttgtgggtacagtggtacatctctaatcagagtaaaactattcgaatagccgtgcccgcggttatgggtgggtctaacaatgtttttcgtgattagtctcacattactcattattaatgaaaatactgtgatgactaaattgactcctggtttggaatggtatattcctggtttagtcttttgtttttttttccgctgcgtagaactttgttctttgagaggaactatccacctctgtaataatttattctgcgcatattaattagttatttgatagtactctattatcaatttgttattgtgtgcctcggctgattcctggacgagggtttaacgcacatgtaagcgtttggaattttggatagaaattccgggcgtgataatcatcccctgaatcagtagattgatacaggttcatcaatctgaatcttcatcgcatacatttgattaaggctccaatgaagatttgtttacataaaataattgggtatttacaagattttggctaactattactgtagaagcaataggatgagccaactctaatattttgctatagaattaaaccatctatctaatctacacttgggaactaagttggaatgaaactaatttatatgattaaactcctggcttcggcaaaaacaagggtgagaacaatataatcatcaagctattatatcaagtaatgtgtcacgtcctgataaattcatcccgaaattaaaaatcattttctaaaaggaataatagaattaattaaaattcgaaaagaaattggcaatcactaaaatacgtacaagaaaaattcgaatgtggtccggagaatttttgttaaattctccgtggtctaaaaagagccctcaaattttacttcaattttcagagcaccggaaataattattaagcaacaaaaacaattatcaaagtttactaaaaagaaaaactaaaaataaatcctccttcctcctttgggccaagcccagcccaaagtctccctctcctccctctctttccctcctctcccaggcctctcctcctcctcccggcccacctcttctctccccctcccagcccagctccctcccctcccctctctctcccgggcctcccctccctccactcctcctgggccggccgctcggcccaagccgcgcccaagccaggccgagccgagccagccgtgcacacgcgcgccgcgcgtgcgctgaccacgcgcccgacagcgtggggcccacgcgccggtcgtctccttcctcccgcccggctcctctctctcccgtgaaaccctagctcgctccctcctccaaatccgcctcattcaaaccggggattccaaaattaagtggggggttttaatccccattgattcctcttcaattccccccaatttcccccttgaatggcgccctcaatcgtcgggaacggacgcgtctaccccggccgctttccatggccgccggtcgccattcccgcctccgttccgacctcccccgtggccggctccctctcctctcctataaaatggaatccccatcctccgttctatcgttttagcctcatcccgagcctccccgtggtcgtatcacccctccccgccgtcgcccttctctttcccccgcgccggccgcctccagccgcctctccctcctcgcccgagcgccgtccggccgtgccgtcgcctcctccagcgtcgcagccgcctcctctccaccggcctgccctccgtttcgcgcggtgaccaccggaggcgcgttcccgccgtcgtccagtgccgttgccgccactgtaccacctccagccgcccctgccgcgccgctcaggtgcgggccggccgcgccgtctcctccttcggcgtcgccgcgtcgacctccaccccggcctgctctttgattcgtctggagaccgccgtcgcccgcgccggcctttccatcctcttcgtcgccggcgtccctttggccgccccttcctcctccccggctcgtcggcttgctgcgccacaaccacgtccggcatcgcaacggcaaggtcgccctcggcctcgcctcccctttgtccaaacccctcctcggtccatcgtcgtcgtctccgttcgttctcgtcgtcgacgtcccgtcgatcgcccggcttgtcgtctggctgcgctgccaccatcgtgggcatcgctgcggcgtgtcccacgccgtcctcacctccgtgcagctgctgccggctgccctcatcgcctccccgtcggtcgtcgtcttcctccttcctcctcgtcgtggcgttcgtccctccgtcaagccgatcgcgttcgccgcccgcgtttcgtcaagtgtgcagcagccccgtcatcgtcttcgtcctcggctccgcgtcgtcaagccttgtgccggccgcgtctcgccttcgtccaaggatcgctgccgaagtcgttccctcgccgttcgcctccgtcgtccccgagctgtctccgccgcgcccgtttgtcgttgtcgttcccacgcctcgtcgcgtggtggtaaggatctctctcctttcgctgccccgtcctcgtcctttcggtgtcgcccgtgcccgttgtgcggttgtcgaccccggtgcctgtgtaccggtgtcggtaatcgttcgtgggtgcgtgtggtgaccgtgtttgtgtgcccgctcggtagccgcgtggtttccacgtgtgcagcccgcgtggtgtctagtggagtccgtttgtcggccactcgcctcggttggcacacggggtccgcttccgtcgacccgtggaccgtctctgtgtactcggtctactgtggtcccttaggttgacatgtggggtccgcatgtcaacagcgcagccttcctgtcttttccaggctagcgcttccacatgttttatagttgcaaagcctaattataataatccgtaaatctccatgtaacagcattaaacttcggatgaccatgtcttggtcatacgaactctaaatcgacccgttcaagtctcctaatgtttgttataacctaaagaaccgtgtgctttctttttatgtattgttatttcttctttataggcttgtagctttgcttgtgtgcttcgcgtagcttctatcgttccggaggttccagaagcgtggttcgcgggtgtcgccgaaggttcggaaggccgttctctctgagcaaggcaagtcacatcatccttgagcatattgaatcccagtttataaaattattttgatttaaattaatgcattaccgctttatcactgttttatttagccatttatatttacctttgttaagacattattattgctattgttattattacctatttcaccctagaataaacaaaaccccaactagtgggtactctattcatggttccactagtatgaatttaggtagatgcttcgctgattaataggacaacattaggtggtttttataactttagactttgtgaatattcatatctcttggatactatggaatggttggcttatggtggaattggacatacccctctcttcctctttcaaaacccctaaaacctgttttctggtggggtttgggtgcatgccagttgtgggaagtagcaccccggccaatataaggattaagctcgggcctctgttgcaaagcactaccgtacttccacatgtctagtgggtaaggcttagtttgtggctcagtctggttataaacaaaagtacacggatggagatggatgaagtcggggctcgatggacatctctaggacaaatgaaggctacacgagctgtggcccggtagtcgagatgtcatggcacagggttggtgccctgctgctaggggctcagtcctaccgacctgtcccggaggttccggccgtaggtggggttgggtcggtactcttgtctatggctaggatgggttggaaactatgtcatgtcttccgtccatatgccgtggtggcatgtggcacgtggttgcacgtgaggaagacgtgtcttgtgggtaaagatgtacacctctgatcagagtaaaacctattcgaatagccgcgccctcgattatgggcaagcctagcaatgtaccaaagttagtgtttttaattcttaaaacctgcttaacaactaaaatgtggaatggttggcctgggttggcttgggatgagctgggacccagggtcgggttgccagttcggtctgaatcatcgtaggccttgggttaaggcaggttcgtgtgggtccacggccttgattaataatactgtgtagctctaggatcatctttataaaatagctttgggcaactaaatgacttttaaatgctatttactacaaaactaaacccctattattatctccttgtactcccttgcattaatcatgcatctcccggtgtgacttgctgagtacggtggttatactcattcttgctctatctttccccccttcagtaggagaagctttggagaagaagtcttaggtggagtcctggcttataccccagttgagcgcctgtgaagatggagccgtaggcccgctagtccgctgctgtttatttttgtttgtcaggcctcaagtgcctttgtaataatgtaaatattatcgacataataaagatgtgccttttgtatcatgtttgtttggtgtaccccggcttttcctgggacggggattaatacactagcgttcgggaaaaggtaattttctcggtcgcgacataatgaatgcatgaaatagtaatttcatgttttagggtaagccctaaaccctatacaaaaaggtccccgggcattaggggaattgcttttaggtccataagcccacatggcaaacaaagcaattttacaaaaagaaccttacaagatttcaatttcaactaattaaagtccttagcacctaatgaagtggctaaacagccgggcccacatgtcggtgactcggcggcaagagaagcagaggcagcaggagagcaacggcgaccgacagcgttcgtggcggcgtattggcttgatcatatgtgggcgtcgttctcctgggaccaaggcgacgtcagtggcgcaatggtacagctggagatgattcgagtcgactggaatggcaaagtggggcgatggtggcactctggacaccgggaacaccgacgagcgcaccagcaagtgttcgatctatgccaaaaaagaaacaaagaaaatggatcgatcaagcagagaaggaacttcatgaatcactactacagaaacgattttcctggacagggaccttttagattccgtgcgggcggtatctcgttgcttctgggaaaaccagctcattttcgcgtgcggtccattaaagaggacggcacggaaaaatcaatttttccgtgcggtaactcatttcttctgggaaaaatcgatttttccgtgcggtcctcttaaatggacagcacgcgaaaataagccgattttcccgtgcggacctattaagagagccgcatgcaaaaaatactaactccctctttcctctctaacccactttaaaatttcccctctttctctcctctcccctcccctctatccctttttccactttaaaatttccacgcagagcttctcctctcagtcctttctctctcacgcctctcctctcctctctccactctcctctcctctcctcccgacggtggcagcggcggcggcgcgcggcgacagcagcggcgcggtggcggtgggagtaggagcgcgccggcctcctccatgtggcggcggtggagggcgtggattcggcgggcggcggtagtccctacacggatccagcggctgtggccgtcaacgcaagaatcctgcggtggcagccgtccccgcacggatccggcagccagcctccttctccccacgtgggatccagctcccctcctctccccttccttccctccctagatccggcggaggggaggggcgacggcggcgttgtggccggaggggagcttggatccgatggcgggtggcggggaggccggcgggaggcaggtggcactatggccgtcgggcggaagcccaccgccggattctagggtttcgtttttttaaaaaaatatgttatttcgaatttttgttttcccgtgggggtgcgccacccgcacgcaaaaatcattattttcccagacccctaggtgcgtgcaggccgcctacccgctcgcaaaaatcgttacaaaaatcttgcttgtagtagtgaatggtaaaagtaggtggaaagtgagagctagttgtcaacatgaggggtagagacgaattaaaggagttggcagtggtttgaggctgtgatcccacttgtacttcactcaaccaagtatgagtggctatctattggccccatgtagatgtttcctatgagaagatgagaggtatggtgaagtttgggtgtaaattggactttagctccctctctctctttctttctctctttgaaaatataatttaggataatgagatgattcaccaaggttgtttgcaggtatttggacgacaaataggcccatatatagatgtttcctagaaggcttggagtggtagagtggcattttgggtggaaattcaatttaaacctttctctcaccttttgaaaaataaaagaagatttaaatgagagaagagcagatgatgtgttggctatggttgtatgatgagtgggccccataaggacttggtcccacatttaagagagatgtagaaggagagaactagaagctctaaattttccatctgttggcactatcacactaaactatattaatctctttctctcattcatttaatttagaattaagaggggggtgacagggagacaacaaggtagacaaggatttgatgcttcaaggtgccaagttccaaagtttaattacttttgcttttaccatggtttgttgtcactaatgactccatttgaaccaggataataactatgttattttatgcatgtggcaatttaattaacaacataataactatattcatcgatcttaatttgtatttctgaatgtcgccgtagcgttagcacgggcagattactagttaataataaattaacacacatgcttaattaggtactactccctctattccataatataaggcatgcatgcaagcatgcaattaactatgacatcttcttcattaagttattacttttttaaatcctttactctcatgttatctaatcctattggatgcatgcattatatttattaggatgattcaaactacaagatgataataattttttcttggtctttgagttaagggtggttatactttatattttggaatggagggagtagctgtcaacaagttaattagggcctgttcactttgatgccattttcaaccatatcattttttgccaaagttaccaaaaaatatctacgtttagttgttgccaaatctggttaatacataagaaatcctgccaaaattttggcaatgcatgaagaggaagtacagaatgatgccgattattattcaaggccccaagccacttgataatgacatcgatgtgtacctaagaccactggtcgaagatctgaaactgttgtggaagaaataaggtgtccccgtgtgggacgaggacaaacaggaggagtttaacctactagcgctgctattcgtaaccatcaacgactggcctacaattagcaacctatccgggcagtctaacaaggggtacaagacttgcactcactgtatggatgaaacagaaagtacatatcttaagcactgtaggaaggttgtgtacatgggtcatcgtcgattccttgctgcaaaccaccctgtacggaagaaaggcaagcactttgaacataaggcggaccaccgtacgaagcctaaacatcgcagtgagaaaatagtgtttgctatggtgaaagctcttaaagtagtgtttggaaaggggcctagcagccagcctattgatagcgaacatggtcacgtggtgatgtggaaaaagaactctatattttgggagttaccctattcagaattcttgtacgtcctccacgaatataaagcgaataataaacacgaaggagaagaagttcacaaacctaaagtctcatgactgtcacacgtgtggatgacacaactgctaccagttataattcagggtatccttccagacaatgtccgggcaacaataacaaagcaatgtgctttcatgaacgcaatttcgcagaaggtcatcgatccggatagattggaagcccttcaaaatgaggtggtgcaatgtcttgtcagctttgagttgatatttccaccttcatttttcaatataatgacgcatctgctttgtcaccttgtcaaaaagatcggtattctcgggcctgtgtaactacacaacatgtttcctttcgagaggtacatgagcgttttgaagaagtatgttcgtaaccgtgctcgtctagaggcaagcatcgccaaggggtatggaacagaggaggtcattgaactctgcgtagaatttatcgaagaccttcgcccaatcggggtgcctgaatcacgccatgaagggaaactacggggaaaggggactctcagaaggaacgcagtaatgacggtatacaacaatttattccgtaaagcccatttcacggttctgcaataatcttcattggtggctccttacatcgaggagcacttggctctagttcccgccagaaacatcggtaagtccgatgcatggattacacggcatcacattgataaattgcccgtgtggctgcgacaacatctcatgggtaacgaga

SEQ ID NO: 6289 - DNA, 3992 bp, Oryza sativa
aggcgcagaagatgcgcgagcgcgagcagaaggtggcgctggcacagaagaccgcagacgtggagtcagcggcgccttagtttacaatgggattgtacgtgtctacttgggtgggtcgtatacatatttacgggtgtagtgaacatgtttctcagtgtagttttacagtacagtggcatgcataaattttgtacgagattgtttcaaattctgtatgacattgtttcattatatggtactagcacgcagaaaaagcaagtgctatagttgtatcaacaaagagaatactagcatatacattcacaagttcttcacttcatgacttcttcccagtgctggtaaaacctttatactactagctagtctacaagataacaagacagaagggaagattgtaagccgccatgaaggggttgcatattaaaatgccatttcacttcatatagagcacacagttgcttggcaacatgcatgcctgtgcagaaggagcatgtgctgatatgcacacctggagcagaaaagagggatgggactacggaagcacaagcatgcatgcaagaaacgacagggataaaatagtttcatagtataaaactagtaaaaaacaaaacaaactaatccctccaactccatgtctccatgcatgctgggcagtgcatcttggcatgtggcgacggtcgccggcgtcgtggtggccgacaggccgccatccggtccaacggcccagcaatgacttacaagaccaaagagggcatgggcccacaagaccgtcacgcacgcatgctacggcactggatgatggaccaacaaggtgatcgctgtcgtcgcctgcaccaacaccaagttgaatccgaatccactgcaatttttggaggctgtgcgctcatccagtcaccctgagcatagatgacaaaaacgaacacaccaaaagaaaaacaaatatgggcccaaacatcatggaatatattcacattgtcatggaatatggaattcttgtacaagatacaggggaatgacactttttttcaccaactatcaacttattctgccgtagtactgtaacatgaacctaaaacacagtgtctgccaactgccattgacggaggtaccaactaacattttactcgatctctcccttttgtcaggtcttggtgcttcatcatctcctagagaacttggacacgaggtacactagaaagaagcagacgagagcgaagaggattacatgaaaaagatggttcgaaccattctgtatgattttcttgtttattctcctcatgttattcttgacgcctgcctgggcctttgtcagagtcatttgctgcaaacaagtgcaatatgcacattagagaccgagcacaaagcgtatttcaagttttcaacacaaactagtgtacatcttattgcagattctagtctacacatgttctcgacaaacagagaaaggaatatgccagacaagtaattttggatgatctagggcattttatagagtaaagcctcatttcgatggaccttaatctgggtccatcaaattcctggcctataggtgtgctaacatggaaacttctcatgtatatgtggcctagtccccttttctttttccaaaaactatcgaccaacaagatgacaatggagagaagatcagaatgtgattccatttaggcacgaacatcctgctaagccctgatgaatcccctaatgattttggtaaaaatcattaagttaaggtggatacacatcttgtcatatgatcaaatggtttcgcgaaaaatcaataatcagacaacaagatgtgcgaactcgatattttacacgactctctttaccaattctgccccgaattacacttaaaacgactcaacagcttaacgttggctgccacgcattacttgactgtaaaactctcactcttaccgaacttggccgtaacctgccaaccaaagcgagaacaaaacataacatcaaacgaatcgaccgattgttaggtaatcgtcacctccacaaagagcgactcgctgtataccgttggcatgctagctttatctgttcgggcaatacgatgcccattgtacttgttgactggtctgatattcgtgagcaaaaacgacttatggtattgcgagcttcagtcgcactacacggtcgttctgttactctttatgagaaagcgttcccgctttcagagcaatgttcaaagaaagctcatgaccaatttctagccgaccttgcgagcattctaccgagtaacaccacaccgctcattgtcagtgatgctggctttaaagtgccatggtataaatccgttgagaagctgggttggtactggttaagtcgagtaagatgaaaagtacaatatgcagacctaggagcggaaaactggaaacctatcagcaacttacatgatatgtcatctagtcactcaaagactttaggctataagaggctgactaaaagcaatccaatctcatgccaaattctattgtataaatctcgctctaaaggccgaaaaaatcagcgctcgacacggactcattgtcaccacccgtcacctaaaatctactcagcgtcggcaaaggagccatgggttctagcaactaacttacctgttgaaattcgaacacccaaacaacttgttaatatctattcgaagcgaatgcagattgaagaaaccttccgagacttgaaaagtcctgcctacggactaggcctacgccatagccgaacgagcagctcagagcgttttgatatcatgctgctaatcgccctgatgcttcaactaacatgttggcttgcgggcgttcatgctcagaaacaaggttgggacaagcacttccaggctaacacagtcagaaatcgaaacgtactctcaacagttcgcttaggcatggaagtattgcggcattctggctacacaataacaagggaagacttactcgtggctgcaaccctactagctcaaaatttattcacacatggttacgctttggggaaattatgaggggatctctcagtgctaagcctgaatgatggttatagtgtacttttagagttctcgtacaaaggtttcagattttaaaacgagcagacatcaaattccaaataatcaattatgattaaatgtacgattctacaagcacttcacttccagaaactactattttatgaaattttaacatgatgccgctacagatagactagacaaagctcacaatgtaagtaatacccaggataccaacatacaaggccgaattcatggtaacttttagacatgcgttagtgcataatgaatcaactacagtgcatgggatgggatgactgaacatgactggttaagtgacaagagattgaggatcagcagattgtgtttgaagaaacattacactaggaaccttgcgatcagtgataatctatctgctaaaaaatgtccatgtgaggtacaataggcgtgccatatcaacattccgataactcaatctaaatgctattcaggatttggcccaaactgtctcgcagacaagttacttaccagctgagagatgaaatcattttggtacttggcctctgtttggatctcttgggcaacctgcagcaccaaattaatggcttgtttagaatcgattgaaagaatatgaaaaaagcttatgaacataagtagatcatggttcaattactcccacatagcatcacgcaatttcacaacaactctagctcgccacaccggtttcatttagacaccaaattttgactaccttccacaacagagtttgctcatacagattcataacaatacttacccctcttagcttacggacttgcccacgaagtccgacaatatggtcatccaaatcagcggtaattgggtcgatctggagcgaaatctcgctggagcttgatgatgcagccggcctggccgtcagcccttccctgcagaaccgaacattaggatcaggataaccgagacaaaattggaaagtccaagagggaaaacg

SEQ ID NO: 6290 - DNA, 4956 bp, Oryza sativa
tgccccttaattactgtacaggagaacatcttcagttcttcacttgatcatgggttaatcaaagtaagagagttcagactttcagagagatgagtacgtagtatatgtgtgtgtatgtgcatctctttgattatttcagtgtgtgcgcgcgcaagaatatatatatgcgtgagaacaaagtttttttttcccttaaatataatgaacacttgcgctgtctcgagcttagtcaaaattaaagtaattaaagaggattttcattatttcatgtgtagacgtttccctactcttttcccctcgtgaatttctgtgtcatagaactaaataatccctccatcccaaattaaatgactttttttaaaaaaataaactcggcaacttttaagtattaatcatattaattatatctatactaaatattatgtatattatattattagatttatattttaaatcacatgtgttagtttcatattcgttgggaacataatgtgaaatgaattaacggtacaaatatatcgttgaaaaccatataaaatatataggtcttataatttgggacggagtaagtatgagctatatatatggtcaacaacatggttacatgtattaatcagaacagtttgggcaaataataagtccatgacaaattggatgcacaaggctaataaggaaatgacatgtcatttaatactgtgctcaatacataaccaatgaattgaaaacatttaataaacaaattaagccaaatttttgcgtgcgtgcatatcatgtatagcaatgaacacgccattgcctgctcatagttcaccattagtctttaaaaaaggcagaagttcaatattatttccaggacatgctccgtaggtctgcactttggctcgtccgggccctactagcttatgtaacataagtctacataatgaactatgtacatatctggcttttttattttttaagacaacacaaattaactttctttgacaaggctctgatcaatgatgtcaggaatttcctagccttgtcaacgaaagcagactagtaataataagtaagtttgcaatacattatatactaaggctgtgtttagatccaaactttggatccaaacttccaactttttccatcacatcaacctgtcatacacacacaacttttcagtcacatcgtaccaatttcaacccaaacttttaactttggaaggaactaaacacagcctaagcttacgtttaatgtgattcgtggccttaataatgccgtattacgttgcatgctgcttgatcgattagatattagacgtcggcacaagtgaataatctgtatacgtcttcatgctattattgtaacgttgttgctgtactgctatgtattgcagcaggcggaatgtgtgtatagaggatcaatatatatattcatgcctgaatgctgatctatcagccgatattttagttatatatggaggaaattgtattcctctgaacatattccgcatgccatgcttgtttcaactcagcaaacagatctcagttgtgagctatatacctgcatatgaatgatcatattgcttcctatatatccatttggcacaaactcactccccatttctctcctgttttagctcctgaactatatattatcatctgtagtgtaattaataaacatgcatgttactagtaattgaagaatatgttcagaagcttcgagaagaacaattgaagaaaagagaagagagaaacttctcacctagattttctgtcaaggaggaagtcagctaagctttcttccaatacctgcagtggcaggtgctgcgtgcacacaaatgaaaccagctactacgagccagcagttttgttcactttttagtgcatgatgaagtagacttaattatagtttagttccgtagtgcaagcttcctaattcccatcctgatgctcgttggtcgacatgactttttcaccactatgcttctcttccattggagctagcttctactgattgttaattaattactgtcaaattagctatagtttactttgcaaatcctacgctgacttcgagagatgctgcctttattagtggcagatggcagtagttcaactgctatgcaattgccactgtccttgtgagaggacatgaaagcatatatgcaatcagaaagtaataaggttgtggaagtctctgcagtctgtacctaagctactgtataaaatttcttaatgaggctgaagagtagaagctacattctcctaggttctttctgtattgtcattctgcactaaccagctttgatgcatggcatctttcagaatattagttaacatgtctcttaagcatgccgtgaaatattttcaattccattttaattgaggcagtgacagattgaaagttccatgatcattcatcactcttctgcttgacaactgaataattaagattctgtcaatcttactacttaacctcattgcatcgtttgatccctgcctttgcatggattcttcactaaagcttggaatcagtcgagttctgcataacttcgtcgtgagattgtcaagtggatggcattcattgaaccaacacgacagaatcacagaaccttatctttgcctatgtaatagctagctcgccttattttctggtctcctgatggatacacagcatgtcaggatgtcaccccaagactttgctggaattttggatagatgtgtatctgcttgtctgattcctgtgtcaccttggaaacaaacagggcatgtcctaccatgtaggacaagcttcatttcattgagtgcattgcatatttgcatatcagatgatgaacaaactacagagcgtggtgattctttgtccctcccttgcttgtttgtgtgagtgagcgatttgctatgcaactggagacctggttgcatgagcacacatttttctcatccttaaaacgtgtgcttgtgttgtggacttgtggtaccatgagcttcagtttctcattcacagtcctctcctatgagcaatgcaaggcagagacatgaacatccctgctgcacctgcaacagttaacatattgcagatgcaggcacttgctctcagtgtatgtattcgtgcaaatgttgaccatattaacatgatacatgtccaaaacttaattaatccatgctaatgttccaaatctgttcagagtaaagccagccgggcggtaaaaaaggatgaaaactgaaatgcagataggagaaaaggacacctctgctctgccattgctatcatcttttttaccatggcgcgcacacacacatacagagagagcatcgcaatgatggaagggaggacgcccagatagcaaatgtgcacacccaccaatccatgcaccccatcacagccagattcacaggtgatatgcagcaagaagagatgagatgagagccatctctcccattcttttgaggcgaaatcaagcgtgcctcttcatcacaacaatgacacaatctacgaaggaagaggcaagcagggccccatctttttcatgctctgttcatcactgtgcagcatctcagcatcactagctaaactctcttcctcctcctctgctgccgctgctgctgcctttttttggtgaacacttgagcctttccaagaccacagaagcaaaatggatccatccatccatccatcaccttgagcaatgcaagttgggatccatgcattggccccagcaacacaatgaactaataattggattagggcagtagtacagtggtacacactgccttgcctttgcaatgaggagaccccacaaatggggtttgaatcaggggaggattttgaccaccctacagtgccacacaaccacaacactaacatttgacacaaaccaccccagaatgcagctgttgtcaccaatggcactctcctattctacctaattcagatgtagcttatcagtttataagctcaaaagatcatatgtgtacttagaagatagtgatactagttcagtagtggcatgtaggagggctcagtaaaagtgggcaaaaagattctgagtctgtacaccagatgaaaacaaatgtcaggaggattggtttaccctagtagaatgcactgcaagttgctagtttggtgagtttgaggcagcttttttttcacttcttttcctctctaccttggctggatgtgtgtgtcactgtctcatttcacaaatatcctgagataaattggctgtcacaatttcatgtggttctctccagccacgaagtccatggttcttgggtactgaaatgatgaggaagattccctacacatctttcagagagaagagagaaaagagagtgagagagagagagagagagagagagagagagagagaaagctcaagcttgggatcaggtaaaatagaatactccccacaagatcaaatgcctcttgtgcaaagataatgcaaacaatcaaattgccagagtttttttttttttgaagtgaaataaagatgaggcggggggggggggggggggggcaagaattgattcaatcttgtcctgttgtgctactatcttaactagactccttgttttcttctcctcatcaccttttgtgtgtttgtgtagtggctgtcacctgtgtgtgcatgcatgcatagcaatagcattacattgcaatattgcatttgcacaagatgggagcatgcagtgcagtgcagccccctcctgctgtagatctgtgcaaaacattgatgcctttattactacatatctttctgagctaggaggagccccaatcatgtgcttgtcctagcatgacagcaacttggccggccttctgcacaatcacattgtgtagttgtagttctgcaggtttgcaacgcattaataaacggcgtttggcccattgtttaactcaaacctaacctgccactttgctgataaattgttgttcatccatcatcctagtgcctcgtgagcactggattgg

SEQ ID NO: 6291 - DNA, 6574 bp, Oryza sativa
ctccctccctctatctctagagttaagggtattttgatcttaaaactctttaaagtggtattttattcggaagacattgtaccgaatggtattttatcctgtgtattatagtaagtggcatttcattaaaatcctacaaatgaagtggcacatgatctatttgctaatggagttgacaccttgccaagtgaggattcgcccatgattatttgtattgaaattatctggatatatacctgaaagcaacagtagttaagaaaaaaaaagaagtggtaaactcatttgaaaaaggtgataataagataactatcgaacaattggtaactcgtacattaattgttgaaactgatttttttaaaaaaatcattggattttctaaaaagatattaaactttttttaaaacacattgatctgttggctgtcaggttcgcaatgtcaagattcatggatatattgaaaaagataaaatcgttaaggccggtagatatattattggattaatttgtaactacaggtaaattaattgataaaacttagtatattttctgtaatttcatcagatttgctaaaaactgttaatttttttaaaacaatcgatttgtggaccaccataaagatttgtggtgcaaaatatggaaacaaaccttgttggttattgtgcggtgtgcctccactggtagccaacttagtaacactgtgtgtattcttttatacattagttgtatgctgatgacattacgatttcttttttaaaaaataacatcagaagttatatagttagtctcattttcattaagctaagttagacggataaatcaaaccaaagtttcatattaagaaaagaataaaaatatgatgaaacagggttctgtgtaagaattccttagagttcatgcatacgcatcctgcattagccactactaaaaatccgagaatgagtcatgattgatagcaccatcatcatcggacataacaaatacactttcttctcccatcctttccgctctactttgctatgccaactactcttctctcctccttgtgattgctttgctcatccctcttcgctgccccactataaggtatagggtgtcgttttgaatcaagtcttaaatacttctatatcgaagcagggatttaggtcgtactacttcatttttattgccctaaaaacataaatataaattcatattagtcagttatactagggtttggtgtttccaatcagcattgtcgtttttctattaacatcagtatgcttctgctccgataggtttgctttagacactagcataatttaatagggcaagaattgccgttttccgattgatatcgacatgtctctgttttcatagttctatttatgatattataacagagagctactattgtatttcttttatgtctgtctgatttcattctatttcatggtaggttaggtcccgtttagttacctaaaagtatttctcaaaaacatcacatcgaatttttaccatatgtatggagcattaaatatagattaaaagaaaaactaattgcacagttatggaggaagatgaatcttttgagtctaattagtccatgattagccataagtgctacagtaatccacatgtgctaataacggattaattaggctcaaaaaatcgtctcgcgatttctaggcgagttataagattagttttttcattcgtgtccaaaaacttctttcaacattcggtcaaacatccgatacgatataaaaaaatttttcattttgcgaacttaacatctcaatcgatttcgaccaatctagccgctatgtgcactccttttcctctgctggttgcccacgagagcctatcgcctattcgcctcctccgctcctcaaatcccaatccccactcccacctcactccccccctctcttcgcctccctctctctctcctccgccatggtcatggacaagtccagcctcccgccgccgccgccgcctcccgcctcttccgcttccgccgccgccgcctcttccgccctcaaagccctgaacaagtcatcctacaagatctccaagcagacctcctcgtcatctctggcttcgatgaaggcatcccaatcgccaccgccgccgccgccgcatcctcgccgcccttctcctcctccgctcccgccgccgccggctcctccttcgtccgcccccgccgcggttgaccacccgccgccgcaaccgcctgtgtacaacatcgacaagtccgacttccgggacgtcgtccagaagctcaccggctccccctgccacctcctcccgcctcaggctcagccgccggcccccgccgccgccgtctccatgctccctccccagcccccgcctcctaccatcatggcgcctccgcccccacccccgccgtcggccattccgacccgcctccaccgcatccggccgccgccgctggctccgccccgcccgccgcccatcctgcagccggcaccgcccgcgctctctccgcttccgccgctgccggccgtctgcatgacggcggagtcccccatctcggcctacatgcgccgcctccgcgggatgccgtcgccgatccacgtgcccacctcgccgctcgggttcgggtgcctgccctctccacggacgccgccatcgcccggtgtacccatgccggccaccagcccccgcgtccgcgacccgtgaccgagaaccagccatgggtgctcctgctgctgctgctgctgcttccaatgtgtagatatggccggtgtaggagagatctggcgaggcggcggcgacgacgaaaggaggaaggagcaatacaattacaatgtgttagcttcaccttaaaatcttagctcaattttttttagcatgttctacctaccttataatattttgttggtgtatatggcgatgaattgatcatgtttggctaattttgtaacaagcttatgcaatatgtagtagcaaaactcaaatctttatatgcaaaatttatttagaagaatttcatggaagatgattgttcatgatctgatttcttaaggtgttggtgaatcatgatcctacatgccttgtactggaaatgttttgaactactccgtaggttaatttgtttgtgtttgtgaagtacagattacacctcagaagctgatcaaatctaagctcggtgcagatgccaccagatgtttgagcttggtctttgatgagtgattggtatttggatcattgttcatgacagattttgttctgtaggcgattgcaattatgcttcgatttctggtgtgatatcgacattttttgttttgttttctggtgtgcaatgtggccatctaattatggctacatgtggtgtaaagcatatgtttggtgatacatcgccgttcagctttgccttttctcctgttaatgatggatttcatttgtttatcgtgagtatcagagcctttgcaggttgcacgctctagaaattgtatgaatcattatatcagcagcggcaagtttcctatcgccagtgaggtaaatgatacaaagtttatttacttgatcacattgacatcttgtaatatggaaatgtgtgaaagaaaattttaacactctagctgatgcttcaataagcacttaatcaattggtgactgacaagtattaagtggaaaatatcacatttttctattctcgattttcactttcagaagcttttgacttcagtgaattagtggtgaagtgtcgagctgtcgacattgcaaaagtggtcaaggactcatgggtgaacacggagggaacatattcgaggtacaagtatatggcctgagcacacttgcttatcttgagctcaaacggaggtgagcttgtgagatattcaacttaagggaattttactgtgtgtcaagttgattgaaaagcaacagccgaaaatcacaggtgtccatttctgccatcacatgaaatccattttaaagagatgatgaaaagatacaggtgtatatggtctgcgatgcaacatctgttctgttatttggtccctttgaattttcgttcttccccgctagcctgtgcttttgttgccacaatatatttcttcctgacattattcgttgtttttgtccatttgttagcttgacgccacccttccgatgttttgctatccaagttacgtggtttcggcaaatcatgcgaacctgcgtaaggtttgaacagcatgggaaacacttgcagctgtatacaattgtttagttcaaagagtctcatttctctgtaggcgttcgtttgtgccaatgactacaggtttgcatccaaattgtatgtcagatctgaagtaacctgtttttagaattaaggaattcatgagtttaaaaacagagaaaaaaaatcatgaaccaactcatctcccacccataaactcagaaaatctgtaaaagtaatatcacaaatcactagccaggaaactagaagtgttaaaggcacatgcgaaactgcccagatgagtggtgtactaccaaatagctgttggtgcttgggaggaagaagtaatggtagaacatgacatgtcctatctgtcccggcatgaaaatcaattcacactgggagcctcatgtgcaacggcaatctttactgcgatgggaagaaatgcatagctgggctttttttctcatggagataaatgactgggattctgtagccaacaactcaagtacctctccattcattccggtttcaggcaatttaccatcctctacactctccactgccttggctggcagtgcttccaaacctgtgcttctttctctgattcgctctgcctacccaatctagctgccaaatggctgcacaattgcactgccattgcactcgtcgttcaagcttgctctggaaccaaacagctactggaggtactcagtctgaaactgcaagacggcggtctgctctgggtcttcacaaggatgtcaaggttggtcgtctgtcagaccagtgtgccatttctagccaagactaaaccagaagccagtgccatcccaaacagagcatgtagccgaacacagtaatactttgccatgaaaatcttgctgttgtcctgaaattgtaatgtcaaccttataaggtgataccgaaatggggacagttttttttaaaaaaaaataaatgggagagtggtatgagagacttacttcatggtttttcagcacatagtccacaacccatttgcccacagggagtgtcaaggcacaaaggacctgaaatacaatagaagtaatggttgagtttagaaagtaagaactggtttgggatcggtatctcaacatgaagcagtaaggaacattggctcacagtgcaagctgatggaagagatttgctcatgccaaaagcagccaaaagaacataaagcgtgacaaccccaagagtcactaatcttgatcctgttttggtgccaattcttacctgtttgtaggttcaaacatacgagaggtaaacgattttttttttcaaagctgcacaagtgaaatgctaaagctaactttaggcgttggtcataatcataaatagagaaaattaccaggggagacattttcccaacagcacgatctccatcaatctacaaaatatcagactccatcactgacaacaacaataatattcatagtcatcacagcacattgctaaattatgccaaaggaattatacctgatgaaaatggctgcagaagagtatcagggtagtcgtcagcccaactagaatggatgaagcaatgactgttttactgagagggagaagagctgttccgctgtaattgaagcatctcaagacaaataatgtaggtgcaaatggccattatatccccttggaagtgaaagtaatagtgggaaccttcttgctttagaggatacctggaaatgtttctgctgctgtttgagaagtagaaagctgtggttgccaatggaccaaatgcagcaaaacataatggttcacctagtcccctgtaacttagtcggaatggtgggcactacacaaagagaaaatacaaaagaagaaatgtctgagatattgaagaaatcgaggtgaaacatagtgaactgctaaaatgcttcagctttagctgttagtagagatagcttcttgcaaaatggcacattttttatgtgctagagttcatgatgattcctccgaaaaagggtagaaaaatttacctgataaacatagccacagatgattgcacaggttaccgataaaatgaacctggcatccccagcttgggcaaaggcccaaaatagccccataaatccgaacaggagagaaatatttgcagcatattgcgtcatcgttcgactgcagagtgcattacgatgtaacatgttttcacttctaaaacaatggttgcaaactatttttaaaaaacaaaagcttgcatagtagttgcattattgcttggtattagcagtacctgccaacgatgttaacaacagattccttcttgttcttatcagccccagtatctgaatcgtaaacatcattgctgcaatgaaatcaaactctcaggaacaagtgagcatgataaaacgtaacaatggatcaatagtgattcccatgttagctttt

SEQ ID NO: 6292 - DNA, 24193 bp, Oryza sativa
ggactctagtctcctcttctaatattccttattttttaattccaaatttcagttatttcctaattgtatttctatatggactctagtctcctattctaatattccttattttttaattccgaatttcaactatttttttcttaattgtatttctatttggactctatactctacctctaatatttcttatttttaattccaaatttatgttatttcctaattgtatttctatatggactctatactctacttctaatattccttatttttaattccgaattttagttatttcctaattgtatttctatatggactctagtatcctcttctaatattccttattttttaattccgaattttagttattttctaattgtatttctatatggactctagtcccctcttctaatattccttattttttaattccgaatttcaactatttctaaattgtatttctatatggactctagtctcctattctaatattccttattttttaatccgaatttcagctatttctaaattgtatttctatatggaatctgatttttctttttctctgattaatatgagaatttctagatcatgagagtgaacgtggtggctcctttttctatccctttaataatataatagattccggtcggcttctctttgccggtcaaaaaaatgtcaccgatccctttccaaatacgagtacttatcactatttattatatttgtttttttaattttgattactcgtagcaatgtaacgttctttaattatgaatcatcatttaaaaattattaatgattaaagttgaaataccgataattaatagtgacaagtaaatgagtacgacgacaacaatagacagatgatggggcattcttgaaagtccctcctccttattctagttgagaacatccttataaggcaacattatacacatgttcatgttatctagcaaccccatcgttggcttattcgagaaataagtcaaacaatatatttgcaaatgaaaataatttataaataaattttttatatatgttcttaacgatctaaaagtaaagactgaaaaataaactacgataaaaatgccccaaaatcaattctaaatttaaggctaaaaatttaaattttggctgataaacataagtataagcgaaaagatgtggcagtttggtcgtgtgcattttttattagtgtagagattggacagtttttgttgtttaatgaaatctttcactatactttaaacaagtaaatgggcgcagagggatcatagcataaaaccgatttgcctttagtgatttttctcactgtatgatagtcccgactacctgagcagtgacttcttgctgtagtatggtttgtacgataggggctgttaagattatagataaaataagggagtagctatacaacattcgacagttttttaaatagaaaactttcaattgtaactactatgtaattataatgtaattacattgtaactactgtgtaactacaatataagtcatctgtaactaaagaaataactctgaaaaaattgatggagcaattggttagttgaacgagcattcaagctgcaagtctcaggttcgatcgatagcaaatccgtaaaataaaccttatcaaaatttgatatttgctaaaattttagtaagtttgtaatattgtcaagttttgataggatttcttatgtatttatgaaagtttggtaataaaactaaatgtatgcatcgttggcaactttaaaaaattgacaagatttgaaatggcatcagtttgaaaaaccactgaattattatgctgtactgaatcctgttcaaaaaaaattatgctgtactgaatcaattggtactactgattctcttactgtataattgtacctggctacctgagcagtgatgacttctttatactactgttgtatactagtttgtacgattgctgcttctgaattaaggccgagtttaattccaaacactgaaccaaaaaacgtcacatcgaacttttctacacatataaatttttagcttttccgttaaatcgttctaattccaatcaaaattccaatttagcgtggaactaaacacaccctaactgtacggaaatactgaatcacaattactgattcactgaattaattggccgtgtggaacgcagcttggcatggcgagcgcgctggagacgctgtgcgggcaggcgttcggcgcgaagaagtaccacatgatgggggtgtacatgcagcgttcgtggatcgtgctgctggcgtgcgcggtgctgctgctgcccatgtacatctacgccgaggacgtgctgctcctgacgggtcagccgccggagctgtcggcgatggccggccgcgtctccgtctggttcatcccgctgcacctctccttcgccttcctcttcccgctgcagcgattcctgcagtgccagatgaagaacttcgccagcgccgcggcgtccggcgtcgcgctgtgcgtccacgtcgccatcagctggctcctcgtctcccgcttccggttcggcctcgtcggcatcgcgctcaccctcaacttctcgtggtgggccaccgccgccatgctcttcgcctacgtcgcctgcggcggatgcccggagacgtggaacggcctctccctcgaggcgttcgcggggtgtcatgctatggtacgtacgcgacgtgaaaccgagaacgttcaattctcgtgtgatttggtttctgtttgatttcacgtttcgtacgttttttgcagttgctgacagaatttgtgtgcttaatttgcagcttggagaactggtactacagaatcctcatcttgctgaccggtaacctcaagaacgcggctattgcggtcgacgcgctctccatctggtaagtcagtaccaagttcctgaatcaatctgacatgcgtctgattgtagctaacctttatgtcttctcgtggacagcatgacgatcaatgcatgggagctgatgattcccctggcattcttcgctggaaccgggtacgtacgcacgcactgccttcttctcagttctcactcgatttgcttacgaaactcgaatataccgaactaaagcagagcacgtgtggcggcgtacgtgtttttgttgtggtttgcagggtgcgggtggcgaacgagctgggcgccggcaacgggaagggcgcgaggttcgcgacgatcgtgtcgtcggtgacgtcgctggtgatcgggctcttcttctgggtgctcatcgtgggcctccacgacaagttcgcgctcatcttcacctccagcgacgtcgtgctcgacgccgtcgacaacctctccgtcctcctcgccttcaccatcctcctcaacagcatccagcccgttctctcaggtaaagtacacacacacctgggccgttgggccttccttttctacatgggccttcagttcccagctgaactggtcataaatgggccggtcatatacgtgcaggtgtggctgttgggtctgggtggcaatccatggtggcctacgtcaacattggcacctactacctcatcggcatccccatgggcattctcctcggatggctcttcaaacttggcgtcctggtacctatgccactatgctacttgatttctgaccagttcaagttaaaccgtgaaaatgttagccatctccggcctgaccatttctttcgtgaaacctttaatttgcagggaatttgggcgggtatgatcggcggaaccgcagtgcagacgctaattctggccatcataaccatccgctgtgactgggacaaggaggtgaacaaaacgatcaatccctccacacagcccaagaaaacgatcaaatgccgtagcgacttgaaattttgacattttttggctgtgttattttgcaggccatgatcgcaagcacacgcatggacaagtggtcgcaagtccggtgatgggagaggacgcacacgttcctgagctaatatgctcgtcaccagattctgccatacgagaggacaagatggtcgcgacgagtgagctgattaactgcataggtgaacagtggacaagacgattcttcatcacctgctcttgttggtctctagtattggcttcgttgcgtccaaatttatggtattggtcttctggctaccgaagagaatttaccatttcggctggccgagtgaagtaacgtatgtatggcaaatggtgacatgtgaagattgaatcgatcttatctaaagtgatttcaccaaccgtattccttctacaatcttcatcttggatttttaccctgcatgctcgccgtattggtggacgtagctgccctgaaaaagaaaattttcaactaccgttggtattcaagacgaattgccatgtaggacgccatcatcctactggtatctctaaggataatgtcagcatgagagttgacattgaagaacgggatagaaaggtgcatacgaacaatcgcgtgcgtacgtattctttgactggatacattctctgtcactgacattcacggagtgcatcggccggtgtatcatatcacttcttcgtttattccatttttgcaactggcaagcctagcacacagtggagcagcatttctggcaagtgaccagcataattaatcactaatcagtactaattatccccattaatctgagaggtactgttaaggatatcctaaaatgttcatgatctaccggaatattaaacctttgtacccgataaactcaaacaagaatcgacgatctagagtagtagagtacttgtttgctaatagaaaattgtgcaaggtagtttatcgttaatttgtattactacaccgctgcacaattagaacgaagcacaagaaaaaaaaagaagaggagaaaacaaaattcaaactcggtttaacgcgtcagaatcggagttctccttgctcccatcggagccggacccgctgggtgtctcgtcctgagctccggcgaccgggtgaacccttttgctgccgccgtgctcctctccggcgtcccagtccgcccggctctgcctctgccacgacaccgatcgccagagcgacgtcagccacctcggcgtcctctccacgctgtccgggtacccggcgaggctcgcggcgcgccggtgcctgcggtcggcggcgagctccttcatgacgtgctccggtagcctcagcgtgtgccggtccggcgcggcgtccatggccgactgcgtcctccggtagtgagggtaccctgctctgtcgaattcatggtcgtgcgtcgcgccgaagtcgatgacggattccggcgtgaaggtggccatcagggacgcctcgtcgagctcctccgactcttcctcctgcaccgcctcctccggcgccgtcaggtcggacggcaggcggagctctcggcggcggcgagcgacaccggtggcgccgtgaggttggcgcggcagagcgggcacgtgacggcggcggcgagccaggggtcgatgcagtccgggtggaacacgtgacagcacgccgggagcacccgtagctcgtcgctgtccgcgaactcggcgaggcacacggcgcactcgagcggccccgacttcgccgccatgcgcgccttcacgtcgccgtagaccgccgtggggaacgcctccacgacctccttgtcgaggccacgcgaggcgcgggacgcggcggcggcgccgccgacgggctgatgggacgccgtgctgcggaacgcccggcgcgggggagcgcgcgcctgggcgcagcggttgatgaggacggagaacacggtgaggaggacgaaggcggtgatgagagccacgagcacgacgacggtggtcggcgtgaacccgccggccgtggcgctccggtggtgtttgctcgtgtcgtcgttgctctgttgcgccaggcaagggcggaacgccgacaagagcagcgtcacgaggacggcgagcgcgatccggcggtgagccattgccgccgtctccggccaaggtggggtggatggatgagccgctcgccggcggccggagagggggaggtttcgagttttcttttggaaggaatggagtaacggaggtgttaactacgacgcggatggtgtaacgcgcggacgtcagggatggctgcgtggcgagtgggccccaccagtcagtgactgcggggacgagcgggcggtgccgctgactccctcactggctgttgccggtggaaatcagctggaagcatttttcgtgtcaccgtttcacgcgtgcctggattttggtcagagttccatctgaacaaacaaacaacaaacctcttggttacagaatcaacacgtcgttaatgtactaatccatatgcacaacttacatgtacggtgatcatgaatgatctgatggctccgaaaattcctagccaacaagaacttactgtgggttcagtacatcgagtagcaatgccgctgtcttttgcacgcaacgttttgtgcccccgacccatcacaaagacgacgggaaagtgcccaaaagtcgccaatatgcagcgattggacggcgcctggtgtggctgggtattcttcactttccgacctatcctgccgcccatgtcaagcatgtagcatgcactcgcgttacaatccctacatgtcagcttcgggattactgacgccatgctctgagagatcccctcataatttccccaaagcgtaaccatgtgtgaataaattttgagctagtagggttgcagccacgagtaagtcttcccttgttattgtgtagccagaatgccgcaaaacttccatgcctaagcgaactgttgagagtacgtttcgatttctgactgtgttagcctggaagtgcttgtcccaaccttgtttctgagcatgaacgcccgcaagccaacatgttagttgaagcatcagggcgattagcagcatgatatcaaaacgctctgagctgctcgttcggctatggcgtaggcctagtccgtaggcaggacttttcaagtctcggaaggtttcttcaatctgcattcgcttcgaatagatattaacaagttgtttgggtgttcgaatttcaacaggtaagttagttgctagaacccatggctcctttgccgacgctgagtagattttaggtgacgggtggtgacaatgagtccgtgtcgagcgctgattttttcggcctttagagcgagatttatacaatagaatttggcatgagattggattgcttttagtcagcctcttatagcctaaagtctttgagtgactagatgacatatcatgtaagttgctgataggtttccagttttccgctcctaggtctgcatattgtacttttcctcttactcgacttaaccagtaccaacccagcttctcaacggatttataccatggcactttaaagccagcatcactgacaatgagcggtgtggtgttactcggtagaatgctcgcaaggtcggctagaaattggtcatgagctttctttgaacattgctctgaaagcgggaacgctttctcataaagagtaacagaacgaccgtgtagtgcgactgaagctcgcaataccataagtcgtttttgctcacgaatatcagaccagtcaacaagtacaatgggcatcgtattgcccgaacagataaagctagcatgccaacggtatacagcgagtcgctctttgtggaggtgacgattacctaacaatcggtcgattcgtttgatgttatgttttgttctcgctttggttggcaggttacggccaagttcggtaagagtgagagttttacagtcaagtaatgcgtggcaagccaacgttaagctgttgagtcgttttaagtgtaattcggggcagaattggtaaagagagtcgtgtaaaatatcgagttcgcacatcttgttgtctgattattgatttttcgcgaaaccatttgatcatatgacaagatgtgtatccaccttaacttaatgatttttaccaaaatcattaggggattcatcagcgccatgcttggattagggatgcatttagttaaaaaaatagattagggatgcattattatgaccagttcattctacttgtcggttctaggaacaagctttgaaactgtgtattttgtgagttttgatgactcatgtggactaacgactttgtatgtgtacgaactcaaatcttcttttttttacaacttgtacaaactgaatctaattccgatatttgcaaccaccactgaggtcgtcgccgaaagttttctttttataattttataaagcttgacgtggtcatatgaaatttgtagcagtcaacttttaaccgaacaataatgcgcagttgtttactattatgaatcatcaatcacgtggacatgtggtggttgccttggatcaattctttgtctatatgtcacgtaagttacgtacgctagatcaattagaataacctcttcgcgttgtttcgtcactgctgctgcacaattagcaaaagtaacaaataggcatgcttgtaaaaagaatgctagtcattgacattgaatccttgagttaatgtgaatatggctggcatgaatctgaaaagaaagaaaagcagacatcagttggaacaatagcgcactgaatttgttacctgttttatgggcttcataatgggctgattctgtttcagttaggcttggaaatatggaataagtacagtttgactccctgaaatgaacacggaatctaaatcgtataccttatccgcaatactagaaatcttgacctccgaactgtctaaaccgatacaatttgactcccttgatgattttggagggcggtttcactgacgtggcgcacacgtgacaatgttgacctggtcttcgtaccacgcggcattgacgtggcgcttatgtagcattaaatttttaaaaatatgcgggagccattcacacaaaaaaaaattatgggacccactgacatgtgcgtcccacatgtcatcctctatttatcctttcttcttcctccctctcctcccttctctatctctccctctttctcttcgtgcgtgtggagcggcgtctggatcggcgtcggcaacggtggcaggcgatggacggagcggcatcggcgagcgggcggccgctggagttgcggacccagaggccagatccgcccctcgcttgcttcctcctcccaatagactgcgccatggccggcgccactgcgccgccgatcgtcaccgatgacctcttcgaccatgtgcggcaagcgggtgcgagagcggcggcgctggcggcggtggcttgtcgcggtggaccacgatggtggtggtgccgtcgacggcatcgtgcagccatgcatgaggagctcaggagggaaaggcgagagagagaaagagagatgggagagaggaggaagaaaaaagggtagtgagagagaagataacatgtgggacccataattttttttgtgtgaatgacaaatgggccccgcatgtattttttaattttaatgccacaaaagcgccacatcaatgccacgtgggacgaagaccaagacaacactgccacgtgtgcgtcacgttagtgaaaccgtcctacaaaaccactaagggagtcaaattataccggttttgacagtttgtgggtctggtactgcggatgagggatacaatttagttttccgtgttcatttcagggagttatagtgaacttattcctggaaatatcgagtgtccggcctgctttataccatcaggttacagaagtaggagaagtttagcagtaatgggcctctgtattgactggcgcaaatatttagatgaagtaaaggcccacgcattctgtgcacattatgacaactccttcggcctgagcataaaaactgttaacaaaagaacagggaataacctattttttgccaagtttttttttctaaaaaaactatttggcctccctcatattttgctcttgattgaatcgtcttcctcatcttagcaaaccgttgcaaatcgacttttttgatgtttaggaagtggtttttaacgatgtgacacgttgaccatcgttgacccgctaagtaagcatgtagacccgcacgtctaggactctcaagtctcatctctccttttttttcatctctccctgagggcggtagggaaagtattctatcccatccgctgccttgcttctccttcatagcagcttgggttgctccgtcaccgatctgctgccatcacagtagctcatagccagattgtcggtgacctcggcctgggccctcgggcgtagggacgatgcgggatagaggatttgtgccaccagccttaggggatagatggaaaagaaaaaagagaaaggaaggatagatagaagagtcgctaacatgtaggtcctacttgctggttcagtgaaaagccagttcctaaactactgaaggagttagtttacaccggtttttgaagatgacaaatgcgttatacccgattttgtagttaagatagatgattaaaatgggtgcaagagatagaagcaaaatagatttattccaaataacaattattccattatctaaaaaaattccaaataacagtagggatattgccgcgtgtgagttgtgacagccatatttaactgctaggtggaaaccaatcgctgctaataaatctgatcaagctgatgcttactatgcagagttcaccgggcaaatgggcctaaacttgtaacgccatcacgccgtgtacctccttgaatgcctagcatttctaaccggagaacaagccgctgcgttccaaattgtgtccaatgatcaagttcgtttctgactttatagtgatagagatcttgatgcatgtatatatgaaacatagtggaacacgccacgaaatgccgattggtttcgtgccataacagaataaccttactgcgagaaaccacgaatatgcagtgtaaatgcgtttcacgagtccactgcacataagcactttcgcagaacacaagaaaggatcaccacggtcgcgctgtgtatgagagcaatatccctgcacgaatcatgtatgtatgtgcgacctactagttgcattgcgtgcatagccatggaccatgatgggatcgatcacagttcacacagagctcagctagccatgccgggacgaacaatcatcgaacgacgcggctctgtcgtgtcctaggtagcacaagtggtgtgatataaggccaatgcctgatgtttgaagcgacgggcacgacgacctgcgtactcctacgtcgtacagattatgacacgaatcattccaaggtggaaactgacccgaaacgttggtgcgttccttgtgtcttttttactactccattgcacccatcgcatgattgacgacggcgaccacgacatacgatcgatcgatcgcttgcatgacgcgacgtaccggtcggcgcctcacacacacacacaccggctcgatcgcgttcattattcaattcagtaaccctcatgattcggctggctcgaataacctgacgctgccagtgccacgctgcataacctgcaactcgatctgcatctggctccatatcggtgtggaagttgtagcggacacttctccgtccagaccagagggtccttaattgacaccggccacgcatccactctcctgtagtagtctgtagaccgatccaaaaccaagtttccgatcgatgctctgcgcccggcacgctgggccgcgcgcgcaggagctgaggcgcagctgcaaaccgcggacacgaaacaggaggtcgggaaagtggtattcgcggcgtaatatagcccatggcatgtgcggaagccgcccgcagcagcaggacgatgcgatgagccaagccgccgtataaaaccgcgcgatcccgcgtgtcgtgtgatgaggcgcgcgcctaggcatagcgaccgaccacgcacacgcccacgcacacgcccgcgcggccgcagagaggccaggccccaaggccgcgtacgtaggggcccccgcgtgcgcgtggcagcgcgaggacgtgttgtgcggtaaccaaattacggtcgatgccggagagcgattcgtttctcgcgcgagtcgcgagtcgcgagcaggtttcacttatcgcacgataatcacgcgattatcgcggttatcgtgcttattgtggggtacggtaggagaaatcgacgatatggtttggatgaattttgactaaatttaaaatcccggaaaaaataaaaaaaattgaaaaaaattaaaaaaaaaatcatgtaagtagttcttgatttgtaattatcaatggtgaagaatttttttgaacagagtaagctatattcaaatttgagggcaaaccgagaatagtttacaaattggaaaaggaaagagaatattgggccttaagtatcctacatattcttccaattattctcaatttctagttttctacatatattcaaccgtattttttatttttttcccctatttattttgcatttatatgatttcagttacatagcccgcgataaccgtgcgaataccgcagttatcgcggtaaaccgtgcgattatcgtggtgaaaccgcgaaaccaccgagttttgagttcgaatttttggatgtgatttttgtgcgattttagacgattatcacgcgattatcgtggttatcgcactaccgcggggtggtggtaatctcggcccaaacgataaggtaaaccctggtcgccagtgctccactgctccttgtacggcggggtcagcggaactctgtgggcgtcactgttcgtcacgttggctagattccggcagagaggcagggtccttttgctctgccattttgtgaccggtgtgtgtccgaacgctgcacgaaattacacatcagaaagagtagtatatctgtgactctgttgtgacgacgcgagtatctgacgaccacgtacgtactccgtacacgaaccgagctttaaatcacagccgtcgagatttgcacaaggcataaaaaaaaacacgggctcgccagtagaaaaataccactgcccggtcaattggcgccatgctgacataacggagactgtaccatgcattgccagccacacattggaggtagcaggagacaaacatgcgcacacacatgcatgatcgaacactattggttctattttagtaccatactttacaaggttcgaagtgttaggagcttgactaggggtaagaataagatagattccctgatgtaccaactcaatcctccatggccaagacaaattctctagtagcatttggttttatgcatgcctgcaggccgagctatagattatggtatgattcccgtgccgacatcggttgcagttaacaaaccaatcttctgtagttagatggccttaataatctgctacttctgctatatctactggattatcatttagtgaactagcttagttagcttgtctgttgcatgacttctaattagatgattcagatttggttgcttagctgcagctggcctgtgatggcagcattcccagcctatagcactgcctgatccaagcgagaagagtcgtattaacatcttacagcctcttcattgtcaccgtaaacaacagaatgcatgcagacccaccagtagattaatttatgtccagttatattttttaaataaggtgagaggatgtgtaacatactacatgaatggttgaggattgttcacttgttctaccaaccactttgtgacactatcttggtcagtttgttgtatgtatatttgtactttgtaactgggcataccttttcaagaatccggtgtcgatcttggaatttggcacaacactatgcccggggtcctccgggcgaaagctataggaagaatctttgaaatgtgcaagtacatcgaaagcatttacctgaccaagtgaccaagttgcaaataaacttaagtctctgaacgaaaaaggttgcaattaacaaacttgctagggacttcccaaaggaagcgttgcaaaatccatttattttaagggcagagaggaccccgggagtacgtaggacgctgacccgagacggcagcggttagcaatgcttccaaacttcgcaattcacacttgcaaaaaagaccatcaccaaaccaaatcctcggttacctacttgtccgtccaaattaatcccccacaccggatctctccaagatttgcactgattaacaatattgttcgagcatgtcgtcgtgctgcgtctggtaatgcggcgcatactgcagcaggtatatggttttcttcctcacctttgaactggagaaatgatgctatatgtcaagagagctcagctaacacagctgttttgcctttgtttcgagagaacggtatggtttggtgcataatagggcatgggcagaatggaacaagattgccgaggattacgttaaggatatagtattaattagcgcctacctataacgtaggagctgcacgaccgaattgacattttgtacatgctaaacaacaaactaggtgtcgcacgatttctggaacattgcatgaacaattagatacacaaaaaagatttgggtatatcttcgtttcattagataattggcaatagttaagtatatctgagatcgtttgtgtaaagataagaattcgtaaaaccatgtgtgtgcatagaggttttacgtacaggttcgtgcctcccgcaagataatatccatatattttgtttgtatgcatatacctaaactatatccagattatatgaagtacaatgtgtatatagaaaactctaatctagatctagccgatcataacttttacggtataatatactagtaccggtatatactagcagtataaattaataaaggcaatgttgaaaatttgatagaaaattttatacgataatttttgtaatttgcggttcagatttaatctaattgtaaatgcccagtcctagttctctcgtgtattaatataaccatatgaaagtattttgtgacaactgtattaattaattctattttcacatattacatccttgagatgcacttgataatttactaatcattatattaataaattattattttaccactcataaaactggtgtataataccggataatcactcttccagattttgtctatggactactatacacatcagaaaattttgagaagatatagtatgtcaagtcgagtagtacgatggtggtttgtttaattttagcaccatttatttgatatgttatcgtatagtagtaacactcgatcggtcagaaatggcttcattctagatgactatgtgaaatataattttgtactacagccacttggacgctctgatttattgacacggattcgtatcttttcaccaatcataatttctagttttatactacgtaaaaggagaccattgatgttacgttcagaaccaaagacgaccaggtaaattacgcgtaggaatgttcttatcaccagctgtagtatgagattttatccgagaaatgttaagctgtcactgaataacattttgggtctttatcctactctgaaactctgatagacataggagagtgcttgccagttattgctagccagccagctttatcagcattggcagcaatcaaattcatgcaaaaagaacaaagcattggcgtcatatagtttcatcaaggaaaactgaagcaaaagaaaatgcctggttgccgtacggttgcgtcattgtaagcatttcagtctcgatctgagcagattctcccggggaaagcatccaggctaagctttcagcatctccagggcacaccacgtacccgagagataatggagttcttttagcatcgccacaactgcatccagaaactgatgtgaattgaacaaattgttttaggtacttataattaagaaaggtctcattacattccaagcgtgacacagcagaaataataatgcttcagtgcagtatacctgaagaacagaacaaaatgctttcttcaggccaatccggtgttctgcccctggtttgaactagcttccggcaatatatttggagagcggtttcagttctttcatgggcttgatctaacgtgtccatgaggtcaataatttacaaattgcaagggaacatttgttcttattctccagcatctgtgataaacagtctaaagtacttgtcgtcgtccatagactgatcaactatgtgattagtatatgcactgccaactgttctttttcaatcttgttggggattccaatggaacctgtgtgccgtacgtctttctactgtcttttggaaacaggttaacacgttcttcctggaaaaacaaaaatactacttacagagaagtacgtgttactgaatttttatatgcaaaacacccgtcccaaaaagatgccaacggttgttcagctttgtgcatgaaactgtggcataccacagaggttatggtcctcaagttctccctgcctagctgccgttagacaaaagttagaaacgaacagatcgaaaatgataccgaataagaaaaactttgtgcatgaatgcatctttcgctttcgtttttactgttgctgatgcggctatttttgttggggttagacatgatggggcgcaagttgagccatgctttggcgaacaccatcacgaactgtgcctagatcgatgaatgtgagctccctagcgtacgtggcatggaccccaacacttcaacgagagtatatctgtacatcacaagcgtacatagaagttgaaacttatcgtgccgaatcctcatcctcacggctaactatctagtcataatgtctcatctttcagtacaaccctgataataatatatgattattaggaaaatgtctatactatcggttagaatacgtaatacgtgttgaatatactaattatatttagttacagttggagtacttgaagttagaatatgtgataggggtaaatgtgaatagtacgatcctgagtcatatatttgttatttttgttccccttatataggttgaatttaaacctatatgtttaaggtgtgacatgtcgcatatgatctatcatactccctctgtttcaaattataagtcgttttgttaaagtcaaattgctttaagtttgactaagttttttaaaaaaagtaacaacattttctacccaacacaaatatattatgaaaatatattcaattatagatttaacaaaactaatttagtgttgtaaacattaatatatttatctaaaaatttggtttaatttgaagtaatttgactttgacttaaatcaaaacgatttataatctaaaatggagggagtattaaatttaatgtgccaagatttagcattagtgccttaatctttgttacgttgtgtaatttcctacgtcggactcaggatgatcccatctcacagattttatgcgccaatcagctgtaaaataatcacactacacaaatttgtactacttgtagtacacctaaacatattcctttagagaagtgacatatcatagccgattctttgcaaactcagtgaagcttctttccaaggaaagcgacgggtgatacagacaagtagacatacttgtacaagagggtaatcgtaaatttgatgccgattgaaacatacaagacagtagatcaagccagatcacctttgtaggcggatgaaagccacatgcatgcaaacactgtagtgaaagacgatcacaagcagaattctccaattacgagtccaacaatcaagcagaaatgtacgaaatatatgtgaacagtaaaaatcaacggacgcagtgagtaatcagaaaattcagatcgactcatggctgcacaagatgacctgtacgtgtcgcttgtttgccacgccccctccgatcaccgtgcagcgcagaatgccagaatctctcgatctgagcaaccggcccgccgttccaattcgcgcctgtgcgacgtacgcctctcccgaccgggtgcgcgcgccgcgccgcgcgttcttcgccaagttgccacccctcttgcaggccgcgttaccgcatcaaacaagccgcgccacccgatcgatcgcccgcgcgcccgcgtgccgagccccgtccccacggctccgcagcaagcaagcagatcgcgccccgcccgcgtgcgtgcccgtgcccccgcgcgcgcgcgtcatcttgctttgcttccgctctccgtgtaaatcattgcgttttcccttcccgtccccctcgcgcaaaaggccgcctcgcccctcgcgcgtagcgtacgtggcccccctccccccgcgcgcaatgcatgcgtgcaccactgcaacttgccccgcaccgcgcgcgcgcgcgcctctctcggccacacacctcgcgcgtccccttataaaaacggcggcgcccctcgcgtcgctgggcaactcactctttaattcgcctccccctgaatcgtgtgcgtatcgtatcgtggcgtcgtcagttcgcgaaaaaaaacgcccgttcgttttgccgggtgcgtgcaggatggcgttagaggccgtggtgtttccgcagggccatttcggctacgggtgcggaagggactcgccggcgtacgggatgccgtggtgcgacgtcctggctgctgccggcggcggcggcggcttcggtgagttttacggagtggacgagtgggatgaccagctgcaggtcgcctccgtggatgagtgggaggtggcatccaaggataactcggatgcttccacggagggcaaggcggcggcggcggagcgggcggagccggtggccgccgggaggaggaaacggaggcggacgaaggtcgtcaagaacaaggaggagatcgagtgccagcggatgacccacattgccgtcgagcgcaaccgccgccgccagatgaacgagtacctcgccgtgctccgctccctcatgccggcgtcctactcgcagagggtacaacactaactacgcatgcttcaattaatcgcttttacgcatactgttatgattcgttaatcatcattaaatcgaatccattttctgctcagggtgatcaagcatcgatcgtcggaggagcaatcaactacgtgaaggagctggagcagctactgcagtcgctggaagtccaaaagagcctcaagaaccgcagcggcgccatggacgccgccggcgattcccctttcgccggcttcttcagcttcccacagtactccacgtcgcctcgcactggctgcagcgccgccgccagcgccgggagctccggcagtgcgagcagcgtcgtcatggacgacacggcgggctccgcggagagcggccggcagtcggcggccatcgccgacatcgaggtgaccatggtggaagggcacgcgagcctcaaggtgctcgcgcggcggcgaccgaagcagctgctgaagctggtcgtcgggctgcagcagctgcgcatcccgccgctgcatctcaacgtgaccaccgtcgacgccatggtcctctactccttcagcctcaaggtaaaaaccaatcgacaatttgcacctattttactaccacgactgcatgcttagttagtttaggctagcagcacagacaaattaagcgattggaacgtcgcgggtgagcgaagattcgctcccatttttctacaacgccgatgataatgtcatcgctttcgtttggatgttaggtggaggatgattccaagctgggctctgtggaagacattgccaccgctgtgcatcagatcctgggcagcattcagcagcaggaggccgtcctctccatcagctgacgccgcgatcgatggagacgacaaccgagacggccgccatgtgaagcctctgcctcgtccgtcctggaaatggaaccatggcgcctcgatcgatagcttgttagcttgtaatgtgtgaatgtgattgtaccctagccaacagagtgctgcatgcatgcagtatctccggcgaccttaatgagaaatctataccaacattttgagctcttgtaaacgtacgtacgatgaccacttttgtcttgatggaggtgttgtgcactagtacctcttgcttaactgctaccttcttttttaaaatatattacgtcattgattttttaacaaatatttgattacttgtctttttttacaaatataaaaaatctaagttatggttaaagaatatttgatgattataaatcaagtcacaataaaataaatgataattatatatatatttttaaataagacgaatggttaaacgtattttaaaaaatcaatgacgttatatattaaaaaagggagtactacttgccatttgcataaaaggagggtgactctaaaaccttacgccttctttgaaatggagggacttcaagggtttttcataggctatacactaatgatatatcgaaatttttgtgttctgaaggagcccttgggcgatggtgttcttaactgatgagggtaaaaccattaacacataattaattgagttttaattattataaataaaaaaataggtttatttgatattttaaagtaactattatatagaaagttttaacacaaaacgtctcgtttaacggttttgaaaatcatgctaacaaaaactaaggtagaatctagatcttaattagaaacgaaaatatcatgaaaatagttatgagaaatccagaaggcaaaattgacagcattagtgcaatacctaaagtcatgaattttcaagtgtaaatctgaatctactcattcacaaaaggggaaaaaatcacatacgctaccaatagccgattgctttattcaacgtatagattgattttggatttaatttctttgagatatatcacgtacatttttttctaagtttcttgaaactaattggttacaaatcttgaactgtcctttatgatgtaccaagagatactatattttctagcgtagaggtactataaaataacatcgaaaattgtgataactcttgataaaaaaagaaccgtgcaatcactcatttgattagcatttgaggtatacggctttgtgtcctaaaaagacctgtggcccatttgcatgcatccatctctgtttcggttcacatgaactctgctttctctgctttagagtgcatctgtcaggagctatatatgactggtcgaacagcgtggcatccatgcagtgcagaggccgaatgattgcccgatgatgtgatgagctgcttcttttctcgtgataaacagtaaataatcctcatgtgtgtttggttctgcggtttggtcgcaggagtacataatgctcttcagacaatcttgctctcagggtgcactagcctacagagacaacatgagtgatctgcggcagagactagagattccattgacccgaaggacataagttctgttactaccgtataatctaggactccatgaattcttgatgtccaatgggcgtttgatcggacttgttactaactggctgttcccatgtacgtggatttcagaaaaagaatgaaccattttttcttcctctcgtaatacttgagtaagtttcagactgtcagtgagcctcctattatgcaccccacgtttctcctcacaatataagtactgctacgtactctctccgtcccacgtaatgtaaatgtaaaatgaaataagacacatcctaatactaattaactaatactatgaacctggataaatatctatccaaatttgtttttagatagagggagtacatcttatttctccggtacaccaatcggacaaaattctgagcaaaattcttcgactggtaattcatatcaaccttctattgacgatatagatctaccgaaatatactgtctattaacaatgcaatgactggttctgctcaagtacgttggaaaactcggatgcagtatattcagagtagcttcaataaggcactcgagaaggatgaggattaagtagtcgtatacaaacttgactgcgaggtgctagctgtacgtggccacgtcagtgtcgtgtgtaagctgttgagaaagatgaggattaagccgtgcgatgccccgttttagccagcaggtcgttgccggaacctggggcctaacagctgatgggagtactcagacaagtggcccggcagcttaccgatgattggctttgtagtttgtgtagatcagctcttgcgcacctgtacaactatgtcttgatctagccaagtagcagcaaaacggcatcaagctgttcaagcacaggtgcactgcatcacacggccaagttgtggttgtttccacatcagattagtaagcagctcactttcaccgcggagaagcgaggccaggaaacaatttgattcacctggaaattaaactttccagctattttcacatcacagtaatacagtgtaccggctagcttaattggcacccacaacttgtgagaactttcgtgctgagctgatgcatcgatgccttgaaagctaaccctgctttgtttctatcgatcagtctgaaggggaggaggttccttgcgaacattatatgtgctccccccgtcaagcaaattgctgggatggagtggaagaagtggctggcaaaattccaaattttacactgtgctataatgacggcatgtgaaccatctggagtagacaagttgattgattgattgtgtgcgtcagtgttcttaaaaaagaaaaaaaaaagaatgaatgatttcgcttgttaaggggagcaaatcttttgcgtatactaagagttggaagtttacgttttgactacatttattctacgatgatagttaccatatttgagaacgaagggtgtattgttcaggtaatattccatgcatcagcgctaatttgctgatattgacatgttgcaagttactcgtatgtcaaacctcaaaccaaaccaaaagaaaaaaataaataaaaagtgaaacaagcggtttacttctaggcctggattgaacttgaattggatcttccgtcctggcccatacaaactcctcgtgttctaccctcatcttttcccggcccagtactacttagttgggcctctttaaactcaaacgaactttagactgtccacactcaaccacccgtttcccccaactctctcttcttgacgcagtgacgttctcagactctctcagtgtctcacacggcaccatctcgtctggtgttcaacttgcagcgtttccgtatagcgagccatccaaatttggttaaggtaattagtgtaccgtattttctaggcaaaatttgctattggacactgaaagattgcggtttttactgtgagacacccgaagatcatgtatttgctcgtggacactgtaaaaaagtgataattagctgctgaacactcctcacattattttattatttccggttaaaatgaagagagagagttgtgtaagtaccaaaatacccacttacacttcctctcacttcttttcttttcccttcttcttcttcttctttggggcgacgacggctggcctgagccgggacggctgggccacggccgggcggcggcggcggtgcatcgccgggggcggcggcggcgcatcaccgggacggctgggccacggcggggcggtggtggcggcgcatcgctaggacggctgggcggcggcggcggcgggcttgacttcttcgcatcgcgctcccacgccgctcgcctcgtcgacctcgtcacctcgccgtggcccgcccgcgtcgtcgccgcctcgtcgtcctcgctggcacaccttcgccgtggagctctgcccggtgtgccgcgacagagaaagagaggaactgaggaagagatgaacagagagaaagagacgaagaagaacaacagagaaagagagattgacaagtgggcccacgggcaaatttgtctttaaacaaagtttaataggagtagtgtccagcagctaattaacacccttttaagtgttcataaacaaatacacgattttcgagtgtctcacagcaaaaaccgcaatctttcgatgttctgtagcaaattttgcctattttctaacggtgcctacggattttatccaactttacatgaaagaaaaagcgcgttcaagatttagactgagtttagttccaaaatttttctttaaacttccaacattttcatcacattaaacttacaattttagcgtgaagtaaacacacccttactacgcatatcattttaatttcaactaaacttataattttagcgtgaagtaaacacacccttactaggcatatgcaacaaagccgcttcacgtgcattctgaacaagcgaaagctgttgtctcactcacatgtcacggcatcggacatcggtaaagcaaagggaaaaaaagctagggctgcaggaatt

SEQ ID NO: 6293 - DNA, 3954 bp, Oryza sativa
gtggcaactagcaatgaccctgttctaaaaaatataaaaaaataaatagcaatgactctgtccctagcgagattttttttaattttttattaaaatatttacagaaatatttttttaaaaaaacgcacttctagaaggtgagagtcgagtagatttgtaaatttccggaacagtaaaaattgtctttaaaatattttactaaaaaaatgtaaaaataaaaaaaaatctccctagcgaaccctgttgagaattgaactggacgacggttttgccgtggaataagttcactttgggtccctttatttgtcacccattccgattttcgttgcttgaccgcaaaaccggatacgatccgtcccccaacttatgaaaaccgggcaaacgattttccctcggcggttttggctgacgtggcgcctacgtggcttatttgactaggtcttcgttacacgtggcattgacgtggcgcttacgtggcaattctacctaaaaaataataaaaaccatgggcccacatgtcagctgcacacaaaaataattttaaaatagtggggcccacgtgagccccacatgtcagtctcactccactcttcttccctctcccttctctcttcatcctcacttctctcttcttcccctctctctctcttcttcgcgggcagcggacggcgcaggtgggcggtggagcaggcgagcgaggcaggtgggcgagctccggcggcggcggctcggcgtgcgccgcggcggggatgaggaggccggcggcggggtggccttggccgggtgccttggtggacttggcgggtggcgcggtggccggacctggggtggtgggcgccgcggcgggggccggggtggagggggtggtcggcgcggcggcgagcgtcttcttggaggagaccggcggcgtggtggtcgccgccgccgcgggggtgggcggagatggcggatttgggcgggaggtcgccggcccgactcactccccgccctccacgacgcgctcgccaccacccacaaggagcgtcgcaagctcaggcccgatttgggcgggaggtcgccggcgacggtgaggtcaatggaggaggcggtggcatgttcaacgtcgtgccggggctcgacgggaagcccggctccgtctcgctcgagctcgggagcaagcctgggtgcttcttggtcgccggcgccggcgcgaaggtgcaggttggttgcaggagccgcggcagcgacgggttaattaattctttgatcctttctatgctcaatttagtaattagcatggcaaatagcagttgaatgggaaaatgagtttggtttacatgtacactctgcctctcagtgtttactggagtagcagtgttgttactctgcaatgtcggctctttatcttgccattcttttcttagaaagagtatatacctcttgatgcagttgagtatactggaggagaccggcgacggcgaggtcaatggaggaggcggtggcatgggcaccgacgcctagctcatctccgccgagcgccgcagccagggccacagccgccggagccgtgccaccgtcgctagagaggagaggggagagagagtcgaagagagggagatggggagagagagaggaggaagaagagatggctgagaatgacatgtggggcccatgtgggtcttaccattttttttattaatttctatgtaaacctgacatgtgggtcctaggaggtttattattttttggaattgaattgccacgtaagcgccacgtcaatgccacatcagatgaagaccaagtcaaattagccacgtaggcgtcatgtcagtcaaaaccgccgttaaaaccgccgagggatctcatctgcactggttttgacagttgagggacgtgttgtatctggttttccggttgaaggacgaaaatcggattcgttgacaagttaaggaatatatgatgaacttatttcttttgccgttcggttcgattgattgggtcaggcccatcatctgggcttatggataggccgcgttggcgttggcgtacgtacttccggcccatcaccgaatcgatctcatgcacggctgggccatatccatccattaagtagccccgacactgatatatcgatcaatcttgaggcatttgtaaatttaccactatttttttaattttgtaaagagattattcgaattacagttccagtgtcatttcataattttctctagtggtagtcttataataataatttaaagcagtggcaaatttataattgttctcatcgatctcttgatctctcgagtttatcctgagaacatgtcctacttgtgagttgtgactgagtcaaatactcaaatcccattttagacggataaacaacacgaaatatcacatcttatagcaggtacagtaacaggctataaatcagctgtaaacatattttaaacagataaatgaggagagagaagagtagcgggctatagatttatagccagttgtagcacggactctaagacaccggatgtgtataacaggtgggaccagatattaatagtgtagtatataactattatataaataagctattagattgactataaataaattaaagttagtagttgactgtactattaaacttgctcttatgcacgtaacactcggtaactgatgacgaagagtcttgtctgacgcgagttttcgtcattgaaaaataatatcttcgacgctactaaacgtctaccactacaccaattagaccagaaacacacgctaattaatccaatcttatctcaatgatgatcaaactacacactttgtccccgagcagaatcgggatccagtagatcacgcacgaacgcaggcagcatactcagtgtgcattgacagtcctgcccttgcccggtcaaagacgagcttttcggtcaaagcaactccccgtgcgtgctctccatatttaaaaagctagaaagcgaccggagtttaaacaaagcgcgcaagattacggcttcacatagccactaagagcaagtttaatagtatagaccactattagcttcaaattatttatagtcaatttatacaatagttgtatactatactattaatatctggtcacatatattatacatacattatgtcttcgatttcgtactgtgcttttctatctctttgtttatctctttaaaatatatttatagctggcttatagcctactgctctaaacccccacccacctcgtaatctcttgggacttgtctttacgtacgccaacctcctcctctcgtcgcgtcgtcccctttgggaacacatatttttattcccatggagctagctatggttgcagttgccgattattccatagattaagattgctttgctttgcttgcttctgtgctcttctgccgcttttcacttcactctttgcttcggcccgtggtccagccagtgcggtgatggattctgtggtcgtacggtcccgtgttgctgctgtgattgccctcctgtgtgtgtgagatactgtgatctggggccatgaaccttctgatgtttgcttttgtacttaaaaaagttcattaaggagtgattgccatgtgtgtgtgacggaattggaaagctatataccaacgctagggcgatacgtggctggatctgaaaatgatcacgacccatgcagaactgaacatgtgaatttaaacactactactatcgatcaatcacaaagataaatccaggtgggcagtacaaatccatgacaattcctagtcacaaacagaccgacatatggcacgcaagtgcaaaaggttcagctgaaatatccacggcatgagtcagctgatggctccctcaaaatccataatggaaaaccaattgatagtgcggtaagaggaaacataaaatatgatatactatttgtgaggtttcaatgaaatatcattcagtgcaccgataaaatatcacttggcacattatctt

SEQ ID NO: 6294 - DNA, 3734 bp, Oryza sativa
ggggggggggggcaagaattgattcaatcttgtcctgttgtgctactatcttaactagactccttgttttcttctcctcatcaccttttgtgtgtttgtgtagtggctgtcacctgtgtgtgcatgcatgcatagcaatagcattacattgcaatattgcatttgcacaagatgggagcatgcagtgcagtgcagccccctcctgctgtagatctgtgcaaaacattgatgcctttattactacatatctttctgagctaggaggagccccaatcatgtgcttgtcctagcatgacagcaacttggccggccttctgcacaatcacattgtgtagttgtagttctgcaggtttgcaacgcattaataaacggcgtttggcccattgtttaactcaaacctaacctgccactttgctgataaattgttgttcatccatcatcctagtgcctcgtgagcactggattggttcagagcagcagctccagatccagagatgccgcccatttgagttgtccttctcctttgtttggtcacttgggcagcatcaacttgtggattgtcttgtccccgcaagaacagtgctaatgcacagatcacacacttaacccactgcaaacaccacatgagaaagagagtgaggaaaaaaagaggacagatgaacaggagtccattggtgttgagattatggcccataatttttttgtgcaatgctgaatactcctttatttgttctatatataatttgatgatcattgcctgaggagtgcttggtgtatgcaactctctgcatccagcagttcactgcacattttctttgggtcatgcgtttggcatctgttggctaatgagaatatttagggcccctttgaatcgcagggtagaaaaaacggaggaataggaaaaacataggattctgacaggaattaaagtgtaaaacagaggattgcaaaacacaggaaaaacacaggaatggtcgtttgattcgagcgcaggaaaaacgcaggaatcggatgagagagatagactcaaaggaaattttccaagaggttggagctcttgctaaatttcctccaaaatctacatgcaatgtgtcattccataggaatttcataggatttggaaagcttcaatcctttgaatcaaagggccaaataggaaaatttcctataggatttgaatcctatgaaattcctacataaatcctttgattcaaaggggcccttagagtagaaaagcttcagtcaggtatgagtttccatcaaacagacagaaatgtcaagctaatgagattagatcttgccaacttaaatgctagtcatgccagggaaatgtagttggctagaagatgaataatggtcttttgcaagaactgaaaatccctttcttgtcccaacaagacatttgatgtttattacgatcactcataaactgtttcaagaattgtcggtgatttttttaatttaattcatctcaagttttggaaatgaacgagcaaaatcagtcaccagtcacaactgacaactaggttcgatctaatcagcaaagcctaaggacaaatcaagagtataacttcttccagaactatttcatgatgtgtacgagataacgagatatttattctattatcaagaaaatctagtgatgtacgagaaatcactgactaatttactgcgagagtaaatccggtattttccaaaagtataagtcatggttcagattacagaatatgttcttgcaaaccatctttcacaaatacaaagccactttgcttttcctttttcctataaagcaatatactttgctgatgttttgacaaaagatgcgcttacagcgttccatcaagagctttgacatttgcagtagatgattcccagtacaaaacatcagatagagagaaggcaatgagggtgaatagcttttctgggatttagtggagcacttcacttctatgaggccttcatatttcatacaacatgtggacactctgttcatgtaatcttggatatttaggaacatgacactactactacttcaatcagaaaagttgatgtgacagaaaaaataaataaaaccaaggtgttgacacaccataaagtaagcctataaatccaatcttatcactgttcacaagcttggatgattgcaaagccctactactgccataggcccacattggaggaagtagttagcagttaaacttgtgcttgatcgttctataatcatcagaggaaaaaggtttcctgaccaaactagtagtgattaaaaagcttcccaagtccagcagccatatgcagttgtattgtaccttataactgacaagatctgattaaaaactgctctaatgtttctgcacatatggaaacgcacgcctaactttcagaagagattttgcctgatgcacacagaaaaatgatctgttcccatgcatgcagtcttgatggctatagaaaaggagtatcttcttcacctattgctaagattggagccactgaactggtagaaatagggaaaagtcagcagttaaaaaaaagaatcaactttgtgccatcatttctctcctttgccaagcataatgcgtctgaaaaaagctataatttacgtcgtgtttgacaagagctaagacaggatcatcattgacaaccctgaaagaacactgcaagagaagatgtgtggaccatggatgcagttcccaaatatggctctcaacatagaaccacaaatgcaggtttaggtaaacacaatgcaaaagcaaacgcaatggaaatggattcagaggagggtgtaaccagaagaagaaccccccaggttttcagtattaaagccacaagtaatcttgagttcttgacatgaactgtctcctgattacaagtctcttgtctgaacctgaattattaccccagtggtaaactggtaatagctctgttcatgtaaatagtagtagaggcagtaataaagtttacacatatgaaaacgctgtaccaaatggcgtatagcccttgcagctttctgcttgggtgaatcaatcacagtccccctcattactactcctgcgtttgaaacagcccaagctttgcgctttcttccacatcagtctcattcaatcccgtggccggatcgcagcttgttgcgagcatatgagatattgagatccgcattcctcccagatctgaagaaactaaaatgttctttcgttttcttaagccggagtggcaatagtagccaattatttgacaagatgtttcagagatggcaaagggcaagaggagatccatctatagcctcaaatgtaccatcaccaaaaaaagctcagttcagcctcggatgatcagaaagaaaaaaaaatatcagtcgagatctcctgattttaagcacaaaaatttcggacatcttgctttgacaatgagtggctgcatctctcactttcagagaaacctatcaccctttttttttctttggccaaagaatggacagacaccccaagaaaccgaaagagaaagaaccaaaaaaaaaatcatcagaataacattgcacagcatcacatcttcatcttgagatacacacagggagaaatggtcaagggagccaatgagtttggtgaggaaggcttttcaccagctgcagagttttttactgtggatggatccccacttgggttggcatctactactcctactacctgtggactgctcgtcgcagcagcagcagctgcagctgggggggggggggggggggg

SEQ ID NO: 6295 - DNA, 15800 bp, Oryza sativa
gggaagcggcggcgttcgggctcggcgcggccaactactacctcgtcctcgcctgggacgccgtgtcgtggcagctgctcaacctgggcatcatggggctcatcacctgcgcgtcgtcgctgctcgccggcatcatgatcgccgtgctcctgccgctctcgcaggtcctcgccgtcatcttcctccacgagaagttcgacgggacgaagggcatcgcgctcgtgctctcgctctggggattcgcctcctacctctacggcgagaaggcgcagaagaagaaggaggcgcagaagatgcgcgagcgcgagcaggaggtggcgctggcacagaagaccgcagacgtggagtcagcggcgccttagtttacaatgggattgtacgtgtctacttgggtgggtcgtatacatatttacgggtgtagtgaacatgtttctcagtgtagttttacagtacagtggcatgcataaattttgtacgagattgtttcaaattctgtatgacattgtttcattatatggtactagcacgcagaaaaagcaagtgctatagttgtatcaacaaagagaatactagcatatacattcacaagttcttcacttcatgacttcttcccagtgctggtaaaacctttatactactagctagtctacaagataacaagacagaagggaagattgtaagccgccatgaaggggttgcatattaaaatgccatttcacttcatatagagcacacagttgcttggcaacatgcatgcctgtgcagaaggagcatgtgctgatatgcacacctggagcagaaaagagggatgggactacggaagcacaagcatgcatgcaagaaacgacagggataaaatagtttcatagtataaaactagtaaaaaacaaaacaaactaatccctccaactccatgtctccatgcatgctgggcagtgcatcttggcatgtggcgacggtcgccggcgtcgtggtggccgacaggccgccatccggtccaacggcccagcaatgacttacaagaccaaagagggcatgggcccacaagaccgtcacgcacgcatgctacggcactggatgatggaccaacaaggtgatcgctgtcgtcgcctgcaccaacaccaagttgaatccgaatccactgcaatttttggaggctgtgcgctcatccagtcaccctgagcatagatgacaaaaacgaacacaccaaaagaaaaacaaatatgggcccaaacatcatggaatatattcacattgtcatggaatatggaattcttgtacaagatacaggggaatgacactttttttcaccaactatcaacttattctgccgtagtactgtaacatgaacctcaaaacacagtgtctgccaactgccattgacggaggtaccaactaacattttactcgatctctcccttttgtcaggtcttggtgcttcatcatctcctagagaacttggacacgaggtacactagaaagaagcagacgagagcgaagaggattacatgaaaaagatggttcgaaccattctgtatgattttcttgtttattctcctcatgttattcttgacgcctgcctgggcctttgtcagagtcatttgctgcaaacaagtgcaatatgcacattagagaccgagcacaaagcgtatttcaagttttcaacacaaactagtgtacatcttattgcagattctagtctacacatgttctcgacaaacagagaaaggaatatgccagacaagtaattttggatgatctagggcattttatagagtaaagcctcatttcgatggaccttaatctgggtccatcaaattcctggcctataggtgtgctaacatggaaacttctcatgtatatgtggcctagtccccttttctttttccaaaaactatcgaccaacaagatgacaatggagagaagatcagaatgtgattccatttaggcacgaacatcctgctaagcctgaatgatggttatagtgtacttttagagttctcgtacaaaggtttcagattttaaaacgagcagacatcaaattccaaataatcaattatgattaaatgtacgattctacaagcacttcacttccagaaactactattttatgaaattttaacatgatgccgctacagatagactagacaaagctcacaatgtaagtaatacccaggataccaacatacaaggccgaattcatggtaacttttagacatgcgttagtgcataatgaatcaactacagtgcatgggatgggatgactgaacatgactggttaagtgacaagagattgaggatcagcagattgtgtttgaagaaacattacactaggaaccttgcgatcagtgataatctatctgctaaaaaatgtccatgtgaggtacaataggcgtgccatatcaacattccgataactcaatctaaatgctattcaggatttggcccaaactgtctcgcagacaagttacttaccagctgagagatgaaatcattttggtacttggcctctgtttggatctcttgggcaacctgcagcaccaaattaatggcttgtttagaatcgattgaaagaatatgaaaaaagcttatgaacataagtagatcatggttcaattactcccacatagcatcacgcaatttcacaacaactctagctcgccacaccggtttcatttagacaccaaattttgactaccttccacaacagagtttgctcatacagattcataacaatacttacccctcttagcttacggacttgcccacgaagtccgacaatatggtcatccaaatcagcggtaattgggtcgatctggagcgaaatctcgctggagcttgatgatgcagccggcctggccgtcagcccttccctgcagaaccgaacattaggatcaggataaccgagacaaaattggaaagtccaagagggaaaacgataatttgcacacacgaatcgacggttaatcagaaattcagaatcaagccacgaaattagggacttgtcgatggctcaatcaacaacgaaatttcatagggtaccaacaggggaagcagcgcaagaacacaaatcgggggaaacgaccccaggtgttcgtcaaccacgagaaatcgaaatcaaaagaacgacgcgtcctggcgaatctaatcccgcaataaaaaaaatcgaaggaatcgacgattaggacggaaaactagggggggggggggggaagaagaggcgaaccttgaaccgtaggcgccgctcgccattgcgagatcagaagagggagaccacgaaagattgagcccgaggagatggagaccgatgctgctttcctcctccggatccgcgtcttcccgggcggagatcgaggctgcaaatttcccagcgacgcggcttggattggaacggagaggagaggacgaaggagagaggaagggaagcggagtagaggggggaaagtccgaggacgtggcagatcggacggcccacggttcacggatgacgcgttgtcgaagcagcggtgccagcgtgcagcgaacagcggttgcttctctgtcaggaaatcaggttaatcctgctttagtgactgttttgggagtttaaaattctgaaaaacagcgggtgagaagttagccgataagaattcgaagaaactatgtttttttagcttcagacttctaatttattttctagattcttaaaatctaggtgaaaatctaagtgttttgaaagtttctgacagctacagcttataggatgtcataagctccccaaacatgcccacatggttttacctgctgcttcgtgcatatgatgatgcttttttataaacttgtatagcacaaagaggataggttttccattccatcaggattttcctattaacgcttttttttataaattgttaaatagtgtgtttcgtataaaaacttttataagttactttaaaatattaaataaatttatttttaagtttataataattagaacttaattaattatgtgtcaatagctttctcactctacgtaccttatttaatcttaagagtatgttcaatggtagagacgattatagtctcttaaataataaaagattatttagagaccgcgtctttacaatagttgagacgacaaaggctctaatcattaactcaaaaaaatattcattttgttaacattcgttccatttttctaccctcatacaaccatatttccatattatagtgattaagagtcgttgttatccataacaaggatgttttgtctctcctctttctctttcttccatatcaacaaatattcctaattaacaacgctaagagaccactgtggataaatattcctaattaacaacgctaagggaccactgttgacaatcattgtacatgccctaatatttatctacctcaaactgacccttacttccttacttaattacttaatcttaatcttcatctattcaggtgccgctactggatggtcagacaatgcagcagtaaagggagaatataaatgagcaaaactcatggttcaaccaactcaatcatgtagaagaaagttatttcatcataggcgtcactttgtaaacacttcaaaattggtttttaatgcgaatttctttctatcagcctggcactattatcgaacgtcagaacagacactcgtttgatattgcaggaagccaaatgaaatccagtcggacaacaacagagagtaactatcgagagatcatgatgtcacatatcaaaaaccgtttcaagtcggtacacattgcaagaaatgccaacacctatccaacaaaatacagacgactgccaatttgatgaaacacagagtatatcacaaactgtaatatgttgggcttgctatccccaatctatggacatcactaagctcgtagattctgagcctcctgaagtgcttcctgcagattctttacggcgctgtcatagtacacgaagcccatgaaccagaactcatgattatcaacggaaaccacctggatgtatttctcagatgcatttgttctgctcgttgaaggattcactgatctcagttgggtgtggggaatgacaacctgttgtttcagacagaacaatgataagttatgcacttctataaaatgattcacgcaaatggagaaataacagcaggctaatggaagagaaagaaatctgcgactagtttcatgaagaaaagtaaaaggaaagcacataaaccaattcactactttgctttctacacagtacattatggtaagatatcttgcttcaggagaaatttgtcacactgattatcaccagcggttgtattgtgaagcagactcggtatgatctcaatatatgatgaaaaacacatacaggtaatcagaataccttatagtagctccactcatctttgtctccaaccttgtaagcaagtggattatcgctacagaatgccagctttttattggacaggtatagcacacccatgacaggaccagcagaggttgacagataacatgcatatggtttcttcagtttctcgtcagggaggacatcaaatgtttgatggaagattttatcatatccaccttctgctatgactttggtgatctgggaaaccctgcccattgctgcatctgtaatgcttggtccagttttcactgtttcaaggcaaattaagattcgtgttatgactatattatctcacgctgctcgaattcaatttaagaaacttataccatatcatttcaagggatcaacagtacaatgagcatgtgaacaaagaaggctcaatgcatgaatacaacaccaaatcagtgcaactagaaaataagggagaggtagcacaatgagacatctatctggaatgatcagcattataaaacactgcaagaatttaaaacatctttttactctctacattgttaagacatatggtttacctaacaaattaatatgcatgagctattcactgcaaataaattgtgttatgactgatagaatatacccagcatttctccgttgtcatcaacaacgccaactccacataaatccaattacatagcctaatagcaacagcaccacccataatccatatgcgctggaccaattcaaagtttcaaacagaccaaagaagccaatagatagtgaaccttcttcattcagcattactataacccacagatctcaccagacagcacaaatacccaatcaagcactactgtaattcacaattctcaccaggccgccttttttttttcgaactcatcaacacgaattatcgtcaaattccattagcgctaactaccgatataatacccagttcccccacttaatttaattacatgctactcataactccaaaacgaagataatatgcagaaaaaccaagcattggtaaactgatacagaacaaaaaccaataacttcagaattgaagcttacagtgttgccagaagttgccggtgagggtctccgtcttgcgagccgcctctccaaacctcttccccatcttgccgagaacatccttcaccgtatccattgtatctgcaaaaggggaaatccgaaacagttaaaaaaaaaaaaccccgcaagttatcctgccaacaacggagggcagattcggctgcaggaacgcactcttggaggcgggcgcgacgccgccggcgggtgaggagacgtaggggttgcccgagtagggcggcgcggaggaggcggcagcgtggtaggacggaggggggggcggggccacgtcctccggcgagagcctcgggtagtgcgcgtagtccgacgctgttgctgcggctgcgccggtcgcgggggccggcgccgccgtggcgtggtctcctccggcggcggccggcgggtgcatgtcgacggcggggaggtggggcctactggtcagacggtacagctgggcgccgcgtcgtgctcgacgtaattcctggacccaacggacgcttcaggtggttgccttttttttcttttctcccctttttttcttttcgaggatatcgtgactgcctgtctccgaagctgatgcggtatatatacataatcgaaatattgaattttccattgcttcaaaaaaaaatgccacacttaaataacacgatgaggtcatcgctaaggatttcgagtcttcggcgaacttgtaccaacaaatgcttagccacgaaggtgctttcatagcccgctctgatctgtcgtgtaacgcccgaggtctctcggtcagcgacgcgttaatatttagcggcccacatgtcagtcctgtataggtgagaatgagatcggatccaaccaagtgttgctcctcctccttccaacccgttaattccgctgcttcgcgtagtactacagcagcaacggttcatttctgcctttcggaccccaaactctcccaaggcccacctcacgtgagccctgtcgctccaccgcccaacgaacggcccagcctgcgtttcgactcgcgcgggtgcagcactgcagccgcgtctctccgctcggcgcgttgcactccgcagcgagcggcgagcgaaaaaaactgggcggattacggggagaatccggggaatcgcacgcgcgcacgaggagcgcaccgtgcgtgcgcccacggccacggggcccgggtggaaaaaacgcccccgtgtgctgggccgtccatccgaacgcgtacaccaccgcgcgcgcgcggcacgatgggccgccgatcctctcgcccgcctcgcgtagacgcgtacgtatacggcggcccaagcacttgggggggatcttggggaatactggaaattggaaaagaaatggagatacggggctacggatacctacctactactagtgcctagtggagtagtaccgttttttgcacctgaaagctgagagccccaggctgaactcgcaacctgccactagcgggaaagaccagcaggggggccacctttggagatgcacgaggggcattgcccaaaagttggccactaattgggttctttttttttcctctcataaacgactagcttagcactgctttattagactaaccgtggatctttttatgaccattactatatatctatttgcttcatggtctcttgttcggttttcaaaaggcaccgtgctttctctttgtgtgagaaatagagggaaaggaacctcctttctcttcattaatttttgctcatacgaattgaaatgatttcccttttgtccttaacaaatgggaattttccttatcattgattttcagctaatgttgttactcttgttagcttagacctgatcaatgatcccacgaatatagtatttactgtataagattgattctagctcaacacaaaactgggaaattcacttctgagtttggtctgaacaaaacaacaaccagtcatggaccaggatatggagttatctctttacaatcttaaaaagaagcggataccttaaagaagactattcttaggttttgtgcttggccccggatatcaaatcaaacgtcattgtagctcctctcctctgatcctctcccctgttgtgtcgaataataatagacagaggcctgaatgggaggaagctgaaccttatagataagactttaccttttttgcttctcccttatctccatctccttagtttttatatactacctccgtcctacaatataagagattttaagtttttgtttggaacgtttgaccactcgtcttattcaaattatttaaaaaaaagaaaaattgtacttaaaataatatagataataaattaagtcacaaataaaataaataataattttaaaaaaatttgaataatacgagtggtcaaacgttacaagcaaaaacttaaaattccttatattatgggacggagacggaggaagtacttattatggggatataatgactgtaaatatgtgggagaaatatagcttaaaacacacgtggctgacatgcatacaacggtaaatcacatgatgaagcatgtaaatttggggatcacaagagcacaggtaaagatggtatcattatgcctagttagttagcatgaaggatctctggacaaactggtagatggtttgattccagctcttgtaaacaaatgatagaaaagtacagtgtttggtcagcactacataaataacaattaacatgggacagatcaaaatgtattccaccatgaaataaaataatttatcataaggaagtactcagaaaataatatgccttgctgaacagaagttgatatggagtcacatggcacagtgcaagccagttctttttccctgaaaacaattatttgcagcaactatcacacgaagaagagaatttattggacaaaattaggaatggacaactgtattttttttcttttgtaaaagaagataaatcactggcaatatcgtgaggccagggtgcagtaagtgcttgagtggacaatctgagttgtctttatcatcatcatctctttctttctttctttcttttttttgaaacaaactttagtaccatctttcttgaaagaaattgactttcctgcttgtacagatggatcaatatcagaaacgaatattgcatcatgtacctgtcaaaagatcgagaggaagcagaatacttacgttttcattgcatgcatacagcccttgaaacaaggtaagaactagtgctcaagatttagcaagaagccactattagataaaaatacaatgaatgaggattgatgaacaatgtagttgtgtagatgcacagttgtatgtgaaggtccacaagtcctttcctctgagagtttttgagtcgtaaatgatcagttcaaccaaagaaaaaggagaatcgagatgtgcaggaagtccactgagaaagttggccacttttgcctctagtttttatttctccgtgcaggtaaatggattatgttattgcaggtcaaataatagtgcatggcttttggtgttaggagatgtacagctcatctgcaaatcaccaaaaaacaaaacgcagttactctgaagtcgtaacagcacaatcaacgacctggcctttttgaaatctcgtgctaattaattaagcaaggatgtgagagctagcagcacgtaaagtaaaactgcactaatcgttaaaaaaatgttattacaagtaaactaacccaacaccccaccggccaagcgtgatgtgacaaattaaaagcatgttgtgaaaaactgttatctgaataagtcgtagtaccacgtcacactaattggaaaaagggtcatcaaataccaatcagttttgttaacattgtaaaagattgtgttttgcatgcgtggctgttgcctgttctctgaaagaatgtccaattattatgtggtgttgtgaacagcttgtgcctgaatttgcatggcatctgaagtcctcaaagagtagcagcaaatcgctagactgacagaaaggaagaagaggccttgatgagagaatctgagatgactgcaagcaccgaatgctcattctgtacacttctcaagtttctggagcatcaaagtgtgttctctgcattccgttcaaaaaggaaaaaagaggagctcgatttggatcttagaaaggtattaactgatcagacacagtaacagaaccaaccagcttcaatcacactcacaatggtatcatgcatggttaatccatgtcatgtacttgggcttagggttctctcctcctccaaggtcttatcatataaaccaactggccaaattttgaatacaaggcgcctgcatagatcgatcaaattcggagaatataaaaattgggacagtatgagctgtgtttcttgttttctaaaactaaagaaataattctttcgaaaaaaaatacattggaattaaagaactgggaggggggtaaacaagggtgtgcgtaaactactgtctgcactaagaatcccaatgccttgactgacagcaatccctgcctgaaaggccgaccaagcacaataaaagatgtggaaggaaacaaaaacaaagaacctttccttggcctatctctcgcctctttactgttgcgtttctaaacaaagtcccttgtgcatgtggactggggcaagggtgaaggatttgttttttcggatcattttcaaatgcctttccggatgggcaagggggctcatcatctgtgagcatatgacaagttcaaaggttagtaatgaccaccatgctcctacaccacatcaccaactaaaagaacaaacacgatatttgtttaaattagattgattgaaattaaggacctttcaaggactttctcccattcagatgaacggttttggtcgctattctttgtatccaatatataaggaagtagtagttgagagttgagactagacagaagttattctgtagctagaaagtcttttgtttgtcatgtatgcgagtgtgaaaacactttcatatctggaataatttaaccaattcctcagaagctatttccaatcattattcagctccagaccatccttaggggggttttaacttgaaataccatcatcgcttcaatagagaagacaactagatatccgagttgttaatactataagagtaaaatcttgtgctaacaagaaactgaacaatttctttctttacataagttagatcacacattttgatcttatgaatcgctttaatgtctacacatatatatgtcctccacttttcgtcttttcatggctaatgtcacttccacactaccactcatctcatatccattctctctcgccatagtcgcaagccatactatcctgtttgcgtgcctcatcctatatctcaggtatagatctcaaaggctagtgtgatcgaacaattgtttcaccatcgcggttggtccattctttcaaaatgcataactccacgttcttccgtctctacgttgctacttgtatttacacgtatcttcctcctcagctagtagctatcagtgacactttttagtacatattactcaaatctatatagatgataggacatatgtgacaaccgaagacactaaaatttgattttgataataaactgtaattgaaataaccatcttcactaccagaacaaagcattcaaatagctttcaacgaatcaaaacatgcctagctggaagagagaaattcaggtgtccaaaactccccccgtgcatacaatctctttcacgctttcatcacaccatctgaaaaaagcacaaaggccgagtttagttccaaattttttcttcaaacttcaaacttttacatcacatcaaaactttcctacacacataaactttcaactttttcatcacatcgttccaattttattttgacatgaactaaccacacctaagcaaataatgagagatgtttacatctatcccagcttccctctctttgcctttgccagtcccacggggggggcgggcactgtggtggtgccgccgtggtgtgtgccgttctgtagagcactgcggctcccggcccaaccgcagcagcagcagcaaacatacaacacaacaacaagtacacgcctccctcccacacaccaccccggctccgcgctggatgtcgctcacgcacacccacctcccccctcccccccctcctccgccgcggcgcgtctccactccactccactcctcgccggccaccaaccaaccacgcgagtggtgggggggtgggtggggcccacatgtccgaggaggacgacgaccagccgccgccgctgccggcgcagaagcggccgcgcgcgtcgccgccgccggaccaggtgctcgacaacgtcctcgagacggtgctccagttcctcgactcggcgcgggaccggtgcgcggcgtcgctggtgtgccgctcgtggagccgggccgagtccgccacccgcgcctccgtcgccgtccgcaacctcctcgccgcgtccccggcgcgcgtcgcgcgacgcttcccggccgcgcggcgcgtcctcctcaagggccgcccgcgcttcgccgacttcaacctcctcccgccaggctgggccggcgccgacttccgcccctgggcagccgccgtcgccgccgccgcgttccccgcgctcgcctccctcttcctcaagcgcatcaccgtcaccgacgacgacctggacctcgtctcccgctccctccccgcctccttccgcgacctctcgctcctcctctgcgacggcttctcctccgctggcctcgcatccatcgcttcccattgcaggtaatgcatctctccatggaactttccaacttccaacttactagtagtagttgttgttcttgttgttgtctagtcgtccgtggtaatggcggattcgatgcggtttgctctcgctctgtttcttgcagggggctgcgagtgctcgatgtggttgactgcgagatgaacgacgacgacgacgaggtggtggactgggtggcggcgttcccgccggggacgaccgacctcgaatcgctctccttcgagtgctacgtccggccggtgtccttcgccgcgctcgaggcgctcgtggcgcgctcgccgcgcctcacccgcctgggcgtcaacgagcacgtgtcgctggggcagctgcgccggctcatggcgaacacgcctcgcctgacgcacctcggcaccggagcgttccggccgggggacggccccgaggatgtggggctcgacatcgagcagatggcgtccgcgttcgcgtccgctggccggacgaacacgctggtttcgctgtctggcttccgcgagttcgagccggagtacctgcccaccattgccgccgtgtccggcaacctaacgaacctcgacttcagctattgcccggtcactcccgatcaattcctgcccttcatcgggcaatgccacaaccttgagagactatatgtaatgcctggattgcttcatcagcttggtttcgactgaactgcgcgattctgcttttctgacgatgatttgtttgccaggtgcttgattcggtgcgtgacgaggggctccaggccacggcgaggacttgcaagaagctccaggttctccatgtgcttccattgaacgcacttgaggatgccgatgagctggtgtcggaggtcgggcttactgccattgctgagggctgccgagggctccgttcgacgctttacttctgccagagtatgaccaacgctgcggtgatcgccatttctcaaaattgcgtggaccttaaggtattccggttatgcataatgggacgtcaccagcctgaccatgtgactggggagcccatggatgaagggtttggtgccattgttaggaactgcagcaagcttactaggctctccacatctggacacctgactgatcgagctttcgagtacattggcaagtatgccaagtcgctccggacgctctctgttgcgttcgctggagacagcaatctggcgttgcaacacatcctccaggggtgctcgaagctggagaagctggagataagggattgcccatttggggatgctggcctcctctccggaatgcaccatttctataacatgcggttcctctggatgtcaggttgcaaccttacgctgcaaggttgcaaggaggtcgcacggaggctaccaagattggtggtggagctgataaatagccagcctgagaacgaaaggaccgacagcgtggacatcttatacatgtatcggtcgcttgaagggccaagagaggatgtaccaccattcgtgaagatcctataagctgcttctgcagagtggcacttgatacgctgaatgcggcctaagcaacaagggaaggtaagatagctggagtcaggcgtatgatcattttttgtatgcttgaagttggaaggagttctaaagccatctatcagagctgcaaatggttaaattgttgtactactagtagggggggcatcggtatatgcaaaattttctaccgcaagatcataagtgcatcagagcaggcttcttcgagggggcttcatcccctcagttttgtttgctgctctgatggccttctgtttgaggggggcaatctatctatgccggcacaaccaccatggttcctctaatttttttcccaactgaagcttgtcatcagattaaattcattaacacatttcctgtttcttgcctttataattccttctgttttcgcattcgtatgttggaactcagaaaaacagaaaccctgctgaattgagcttatgtttaaattcctactactatgtgctcaaattttgggtgatctctggttcaggcttgaaaaaaaagtctttgaacttgtcttttcgttatctcctctgaatcctgcactttgtctgttgatatcattacctggaggtcctactcctcacaacctgaaagctctatccatgggttccttattgggaggtcagcaaaagttaggccctagtccatcaagtgattattgcttgacagcccccagtttccggcctacgtgttctccttccacgccagtgaaaacgacggccggcagctgcctccgtctccggtgatccaccaccattttttttgcccatcagaaacatatctcatgctgatactgttggagaaaatagtcgccacagcctttttcttttcttttttctttttttcctttgttctcttgtggctgcatctgcttctgctgctgcagctggtcactcacagcttcttctgagaaagaaagaaaagctttgtaggatggtgaccaatcctacaaggaagcctgggtgcatccaagcctgagctcaaaaagattgatagtgaaggggtggcaaatgatgagggagtgatgaccggtcgatccatccctgatggggattgatcgatcgttttgactgatccccacgagtccctgactgtcctcacccccccccc

SEQ ID NO: 6296 - DNA, 10416 bp, Oryza sativa
aggtgtgagcagagataaatgatttatatatttatttttctattaatttgataccaagttgtttcttaattagtattcttttatctcttgtttacaagagaataaaatgatgtagtagttcttgaaatctgtagtctgtagatagccatggtcaatacatgcggaacgctgcgtccacggctatgcaggcgtgtgacctaaacaaaaccgccagtaggtcaaacaaacaggcaatacaataataccatatcgtacgttttggagagcgaaacgcaacccgtcgtggaaggctctaactagagagattagagaaggaaggaacagatcaaagaaaacaatcgttgaccgaaccagatatcaaaaccccccaagtacgatcgggtctgataagtggaatatccttatcgtccagctcgatcgaagtagcactatacatggtggtgatttgtggtaggcatgggctaccgttggatgcttagtgaacaagttatccacgggcggaggcgaggcgtggcgtggccggtgggacgcggtggatgcttacctggtagcgacccggcgcggcgattcctttcgttgacgtggaggtgggggagaggagagagcccagcagcgcacgggcgcccatcccctcgaaagcgcacggctttttgggcgcatgtgcgcaaccgtgcaagtgcggcaccgcacgtacaggtgtaccgcacgggagcgcggtcgttttttccccggtgctaccatgcgactgcgaatctgcctccgcgcacagcgaaaagttggggttcagtcgtgcggagcggttgtgcctgtatcgatgggagccgggccaagctggtgggattccaattgggccgtactggacgaatcagcgtgcttccgttggggaaataagtccattctacacccccctctctctctctcttcccaccttatctctctcggtctctccccttccccttcacggtggcggtggcaacgggaggatgagaggagcagcggcggctggtgacgagctcccactgggacgcagcggagccatgggctgggatcgtagagccaaggaggacggcgacagctcgattttatggaggcttgtgacagtgagaggatgagggtagtgacagcggcagctgatggcgagctcccaccggggtgcatcggaatcgggggcggcagctcaaccttgtgaaggatcgcgacagtgggccccagctagagtgatggcctcatcggctatggtcaccggtgtggtctccgatggctctgaccaccgctacaaggccaacgaggcgcattcaacgtcccccgcgctattgctcttgtaggatatgtcgacttgtccttgtccatatttggggaaccccactgcctcgcatgcacccaagtggaattagtggcctcctcaaccatcgctgttgctcggtgcccagcttctagaccttcaaagccgttgaccgccctcccctgctcaagctcattggcgtaggtgttatcactgccatcctctcctgcctccttgcctggttgattttcagccgcgtgtggtcactgcctctaccaccgtgacaaggtagctgccgcatccggctcttctttcgtcgggcgcccataggtcttaccggttctcatcgtcgtcccggctacaaactgagagcggagaggtggagagagagagagagagggagagagagtaaagagaaaactgtcactgacccatgggtccctcgccttatttttatttttttttcttgtaatgccacgttagatcacgaatactaagtcaatgcgacatgtagacatcatttagtgaaaatcaccctcaatattaccgctagagttattttgcaccggttttaatagttggagaggtccagacaccctattttgcaatcaagggatataaagtagattcgacctataattaagggagtcaaagtgtacttttaccttccgttgagcagttggggattgctgggcggaagatggcgaaagtggcgacgtgggaagatgggccgaccataagaaggcctttttagggcgagcaaaattttacagccttttgagcctagcggcgtgcatcggcccaaggtttcggtcgcgttagaactgaatttcctacgcgcacagaacaagcgctagcagttcgagtatgaaatgatgtactcgtatacactttaccagctcatgatctgatgatatgatcaggcgaaaggaaggtaaacccagtagtagtacacagaaagcaccgatcaatcaaaactgacacgcccaaacaggtagtgagaagagaagacaggccccgaatctcggcagtagcagctactacttgatactgaagctcttaaaccggaacaagctgccaaccttgcgcatcatcacccgccgccgtgcgggcaacgacctcggcattgtcgagaacgcgcttagctcgctcttctgatcttccatcgacccgaatatgtcgtacaccgatccttcgaagttatccgacctccgccgcggtagggtgagccccgccggcggcttcaccctcgcctccgagtggcacttgatcagcccgtgcagttctctcgacccgtgcgacgacgaggaatcctccatgtccagctttatcccggaagctgtggggctcggcgacgcggatagcttcatgccggcggccgtggggctcgacgacgtggcgacgagcaggctctgcagctccttgacgctgtcgcgcgccgccgcctccgtcacccggaggcactcgagctcctgcttggtgcacttgatggcggtgtccttgtcgccgagcatctccttgagcgcggcgttctcgcccctcgcctcctccagcgcctccttcacgaccttggtgtccttgacggcctgcctcaggatgtcgcgcagcttggcgatctcgtcccgcccggaccgctgcgactccaggaggcgcgcgttctcgcgccgcgtctcggcgagctcggactcggtggacttcatgcacgacgtgaacccgggctccttgccccgccacgccgcgaacgactcctcggcgtcggcgcgcagcctggccacctcctccgacagcgcgcggagcttgtcgtccttgcgcttgagcgagacgtgcagccggtccgactccagccgcgccgtctcggcctcgtgctgcgaccgcgccagcagctgccgcgtcgtgtgcagctccccgttcacctccttgagtgccagcaccagctcctccatcgccttcttgttcttgtcctccgccaccagcgccatccgcagctcgccgtgaaccctctggtagtcgcgatcgtaccttcctctcggcgtcgtcgcgacgggcaccgctatggcctcgagcctctggatggtctcacgcagcgacgcgttctccagcctggcctcctcgagctcgatcttggtcatctcgagctgcttcgtctgcatcgccagggactcgagcatccgcttctcggactccctggacgcgtcgagctccgcctcgagcgtctctatggtggtgcggtcgttggccgacgccagcgccttccactcgctcacctccaggacgcggtacgcgcggtctcgctcctcgcgcgccttgcgcagctcgccgcggagctcggcgacatgctcgtccacgtcctgccggctctgctgcatcttgttcgtccggattgaacacctcttcagacgttgcacggcgatatgagcaagaattcttggaccatgatggtgcggcgatcggggatgggctaaacttcgaggcatgtggaggaagaagaggataaaaatggatgatccaggcgtgcatcctcatgttttgctaaatatgtggtggcagatgagaacctaaaattgtgggtaatgacaagtttaaggccagggttcatctgaaattctgaattagattgttacctatatttggagtgttgagtgttactatatgtaacttgtgatcttgccctgttcttttaaacgtgacatttccctgaattattgcataatcatgatatgtatcagaattctggttgctaaagaaagcaatcatttattcacctggagatccattttttgagaaagctgttacaggcagaattcagatgactgagaatacacagatgaatttcagagagtgattttgtatatcaataaagtctgaacgcacatgatttgacacacgatgttaaaattcactagtcattatacacacaaatcttcttggggcagcagtcaaaccagttatttgtataattgtattgtaacctactgaagtgggcagcaaacttaagtagacaactggtttgctcaattgcaatttcacttagccacatcacttgtccatccaaatggtgcatctgagactcttcccctgcaacagaaggtcaaatgccgtgttgatgtccttcaggggaacctcgtgagttatgaacttgtccaactccagctcctgcattgcgttcgtatcaacaatcttgatgttaaaatattgtgacactatgaacagttaatcagttttgagggtgtctgtaagtgaaaggtttaccttgttcagatacttgtcggccaggatgggaatgtcctgcttgggtttcacccctccgaagagtgatcccattacgcatttgccgttgaggatctccaacgaaggaatggacaaaggggcaccgtgcatttcgacgccaagaatgatcgtcttgccccatccctgcagcagtaaacagttagtatcttcagacacaggtggatcagctcatccaacgtacactaggatgttcgagtacaactgtaatgtgcatacctctcgggagctccgaaatgcatcgctcatcaccgacgccagcccgatgcactcgaagcagtagtccgcgccaccgtcagtcatctcgatgatcgcttggctgacaggtttgtccccaagttcttgtggattgatgaagtgcgtcacaccgaacttctttcctgaaaatcaacaaaaggtgttactaactactagtataaactaggacatcgaccaaaggtctgaattgtaatcaacattcagaacagtttcatgagcagaagggcttgccaagttcatgtttctcagggttcaaatccacgccgatgatcgttgacgcaccgcaaatcctggccccttcagctacctgacaacaaaaatacttcactataacatacgtacacttcaatattgtacaccagataatcgaaaattaattaccgctaatcctacggcgccgaggccaaagatagcaaccgaagaccccggctcgactttagccagcttccacgctgctccgacccctgcaacgcatgcacgcgagcgatcgtgagagaacggcaggtatgcctgcatctctgccagtgtacgtgccagcagtagactagtaggacgaaccggtggtggcgccgcagctgaggagggaggccgtggcgggcggcacggcggggtcgacgcggacgacctggttggcgtccacgacggtgtactcgctgaagctggagacgccgaggaagtggtggatcggggcgccgtggcggtcgcggaagcgggcggtgccgtcgcgcggcatcccggggcgcaccgcgaaccggtacgtggagcacacgttgctccgctccgaggcgcagtccacgcactcggtgcactggcccaggaacgtgggcaccaccgggtcgccggcggcgaacccttccacatgctcccctacgctctccaccaccctgcagtttgtcactccgagatcgatcaccttgcaattttcatacatcttcgtatattttggcaaaacgaaataaggggaaaaaataaaaatataccattttttcaccgattttacataaatatacacgtgtataaaggaatagcagaaatataacattatcgtagaatggaagtgcgaggtcacacggtctcgggcggcatcattaaccgttaattaattattaattatttaactagcatcattagtaattaattaatcactcaataagactattaattgtgccattagtgtcattctggccggtgtcgctcaaggaacaagcgaaaccgaggccttcttgcaacggctaccagcgaagaccgagcggtctcgtattctcacttgcgagagcgcttgcgtcatcatgccatcatcgctatcgcactttggggttttacaatttcgctgcgatttcgcactattgaaccgtaacgacggtctattcatgcaaatccgtaatctcgtatatttctaagaaatacgatctattcgtacaaatccgtaatcttgtatatttcttaaaaaaaaaccttcaacattataatttcaaaaaaatattcaacgaaataatatggttgaaatgttaaccaattggttttgaaattttagatggttacataatatgtaaaatcgaggatttacgtagacaagtgtcatactcgtgctttgtaaggggatctaaaagaatatgaaaaaatggttttatgttgatatggatgattatgaggttcagtttttgaaggaatataatttacaactttagttttttctaccttttttttctaatgaaattatgaaaactggtggtttttgaaagcgggtggctggtggctggacttacgtgtgcctaccttctcaagcacctgatgccatcgatcttgtatgttggttgttggattcttggatgcacgcgcagggcttgacaagcttggcaagaaggcgtttgatgcggctttttccctgttatgctggattatctggaaggagctcaatgcgcgagttttcgaggtcactagtaagacaaacaacgaggtagccgacaccattatgtaggaatggtggattgttgggcttggcgcaccgatcatatagacatctgtgttcgtttctccaacaagagttggaagaaatttaggatgctcgtgatgcgctttttaaactgctaaacgtacgcttcctttgattttctaagaaaaaaacaaaacatatatcctttgattttcacttaaattggtgggtccaatattatacaccgttagatgaaactgatcttaaaacaaactaaaaaccatgggtcccacctattctctcctcccgtgccaaatacgtacgcttcctccccctttttccttttttcttcttttttccatatatatatataatggatatattttttaaataatcataattttacaaacaaagaatctaccatcatataacttaagccggtgtactctttactttgtactattattttcaaataatacactattttaaaataaattttacacaattatatcgtgtacctatcaaataaacaatatttatatattaactaatttatatgtgcacttaaatttatgggtccattatataaattatcggatctacattttattacactggtctattattctcaagtaatgcactattctaaaataaggtatacaccattatattatgtacccattaaattaacaatttaaaatctatattaactaatttacacttacactagaactggtggacctattattataatcatcaaatctattgtttgctaataaataaagcgtccaaaattctctttttgcccgctgcacattgcacgtctgcacctttgcctttcgcacgtattacaaagcataatgtctgagacatctaaggtgaacacaaccgttatagcgctaccgctttgccacgtatcaaatcatatatggagatgattaattttgtaaatgacataaaaagaaaattaaaggtgtgatgcgacaagagaataattaagcaccatgggttgtgtttttctctacactaattagctttgtttaagttgaaaccgagagttgattacataacaactataacgtatttgtgttatgtcgtatttggattttgtactatttgttcgtacaggtgaaaggaatcattatgttataaatgtgagcacaatattgacgaatatcaatacaaatcttactacgacaagggtgataaagggagtttaaggccctctcttttttaccgattccatattttggattttagtttgcatgctttacaagtttctaagtgtcatctttaaacaacattctaactttttagaagtcaatccattcgtttataccctcgaatagctatcacataaattatataattcatcaatttcagctatcctaaaccttaagtactactccctctgtttcacaatgtaagtcattctagcattttccacattaacatcaatatgaatgtgggaaatgctagaatgacttacattgtgaaacggaggaagtacatatttttttcatgcgagccatggtgatcaacggatcatcaaagtcgtaagatgaatatataagagttgctcttaacaattgtaaataggtgtcaaaattaattgctattaattagacatctaatggcttgctagccacaaaattaatttttctctacatgtatataaacatgaatgaagctggaacaaatattaccatatgtcgcatacatatatattgcgcagttaatattctagttagtcatttcaaattccttaaaatgctcacaagctgccacgtggtgctataataaattagggcaaatattagaaattctaagaaaaaaacaaagtatatattatttgattttcactcaaattggtaggtccaatattataaaccgttatatattaaattgatcttaaaacaaactaaatactacgaggtcccacctcgacataggtacgcacctacgtgcacgggtacatacgcctcccctcccttttttcatttttctctttcttattttttcccatgcatatgcttcccttcctttattactatatcatgcgtcttcatgagacgatttaatcaaaagaatttttagtatcttacactcgcattcttaatttgcggccatactacacggtatgtatatacatggactgtatgataattaactagcaatagtttcttatttactcgagaaaaaaaatgattcaaaagtcgtaagtacttaatccatctcttactcaaaagtttgtgaatggttttctaagataccttaagaaatatacaacccttaaattattataaaataacattatccaaactttaatttgccctgaatctatgagataaaatttctgaacaaacaataatcttacttttcaataatatataagtgcccgcgcatacgcgcgggccaccttcctagttattatatactaaaagtccatgaaacttcctacaaacactcctaagtcaccatgtggaagtcctacaaacactcctaaaccgatacgtggcactgtaataaacagctagacccactatttttaattattattagaattattttttttgacctgcctctcctatcccccattagcccacatccacgcatcccccactggcccatatccatgcacgttcatatgtacttaaggagaaatacctaatcactatttgccaaataaagcaaaaataacataatacgtatagactattcatcggggaaaaaaagaacatatatgtatgcacgtttgcacctactggaaaagaagctatcaatccttacccctttattttcttcaattgttcactttttaaaactttataaaacataggatatttctccttccctcccctcacctcctctattttttttaagtaacaacatcatataaaaaatcaatagttagatagcttgatgatcataattggtagtctattaaacttcctattaacgcttctaaaccatcatgtggtaccctatgaatactgtcgagtaatcacatagcactctaataaaacggagaaattcgaccgcattgaaatcggtgaacctattatttaatcgctatatctatcttgaaaaaatcaccctccgttcatgactccgtgtggcttctcacatatgtacctaacctaccctccctccgttcttttctccttttcttttatttccatgataattaaaattattttttccttattggcctaaaaaatccataggtagacatcaaccttctaaatctagcaagctcttcctctaacttctctttatatagtatgctaaacatcacacaaacgtttctaaataactacttggcactcttaaattagatacaatataaattagagaaaatagaaaaaaacattcgaccatcgatttctacttaaatcaattttaggtcgttagatctacatttctttttttttaaaaaaaatcatccagacctcactccgcgcccctatgtgacgccatgacagactgatcagatgtatgaagatcacaccaatgtctgataaattattttgttaattgcagaaaaaaaattaattgtgctaactttatatctactgtgcaaatgtgttctacaaacacatatgtacattgttcattattattgtaaatttaatagggggtaatatacttgcacaaa

SEQ ID NO: 6297 - DNA, 8163 bp, Oryza sativa
taaaaagcaaaaacatatcatccttgatttttacttaaattgatgaaactggatttatattatcgaaagagaacaaccagggcatccaccgttagattagaatgatctaactaatcagagcctcaagcggtcaagcccacgtcacctacccagtgcatgcgatgcatggtgtaaaaaaattctacgacatctccaatgattgcaggagatcgctgtcacggtgtcaagtttgtttgatgagctacactttatattgtatacaacacaactccaactttatgaagatggatatgtcccgattcatactgtattgtgctaaattgttcgttggctagaacaaactaacgtcgattgatatatatacttaagcatactcataaacacaggccatagatatatataataccatacataagcaacaaacaacttggagtgaatttgttttctggagagttcaagcaaacaattttacatgtgcaccaccgggaccgagggtggcacgatgcatataaacggaggtttaattataaggaaaaatatggagtataaaccacgtatattgcaaacctaaaaactatcatcacgagtaaaacttttacttccagtgtacctatgccatcttatagctatggacataataaactaccatgattgtttaaatgcctaattgtttcaaagaatgaagataaaatagggtaggtattgcaggcttcgcattgaagattatgcacaagctgcgtgaacacacggtgcaaaccaactaacacacacatacacacacatatctcactaaaaattgtagaaaaattattgtttgtacttttagactctcaaaatttatacatttatactccttagactgtcaaaatttttatcctttttattatacggctataaatttaaagtaatactttacacgtatgtgtgtaatactaaatgcctaatgcatgttagctaaaagaaagttacaaagagtgattgtttcgagtatataaattccttgaattataaattttagagtaaaaatttttaaatcatgacggcaatcatgaaaagtccacactacaataataattatgcttgcagatttatttttatctataaaattatattcgtagtctatttgaagtcccacgcactctacatgaaacaatgaactgtttcccacaatccaaaatcaatttgactcgactagacttttttcatttggaatacttattgtgtcacatgcaccaaggcatgcattaataaacaatgagaaaatgcagcatatagagaaatattagcagatacatctcagctacgcgatacaataataagttctaaaatatctagccaattagactacataacaaaaagaactatcaacttaatcttgataatcttccttttcacatgcctgataaggtttctgatctttgggatgagaataagaattgggatgctcagaaaataactcaaatttttgatagtgcagctcaacattcaattatgcaggttcagattatgcagggagaggaggaagataggctttgctggaagtacacaccctcaggagtctgttcagccaagagtgcttacaagacaatttacaatgaaatgtaccccaatcaaaatcaggtcagtaatttaacaaaaaatcttttgaaattaatctggaaacacaggtacatgcctcccagagtcaaaacttttggatggaggctgctgagtaatgctctcccaactgctcaaagaatgcaccacaggatcaaaaccgttagtcccaattgtcagacctgtggtcaaagggaggatgacttgcatctcttctttctctgtaatttcagtcgtttatgttggttcgtctctgactttaatctcaaagctgataatctttcttctctaggctctgttcaagatattattgcctatctttcagctaatggcatcaatatatacaatcttttaattatgctttggcaggtttggaaagcaaggaatgatatcaacttcaaaacaaagatttgggagccacaacaagtgtgcaatgctgcgcaggcaatggcaaagacatatgaaagtgttcatcaaatggaagaagacagttgccaagacttcaatcgggctgaggagaataatataagaaattctgttgttaaaattcctgcaggaacaagagtttatgtggatgcctcttggaaggaagagaaaacaggagtagggatcttcatccacaaccctagcaatcacaatgctattgtcatcaaagctcaaagtctcaatgcaggaactcctttgctagcagaagctgaaggattatttttagctatgcaaattgctcgtcatcttcagctgcaagaccctatttttctctcagataacagtgagatagtgaatgctgtgcagaacgaggactacatacaaaaccccggacattggtctctgagaccaattatttcaagaattaaaaattttctgcaggatcaacaagttcgaatcatttggatctctagagagctcaacaaagttgcagatggccttgcaaagtcagcaagacaagctcagactaacagctgcttagcttttgattgctctaatatttctcacatttgttccagagatgtttgtcctactaaaagagctctttccttcactcctaatggagcagttaatgtaactcatgctttgtgtttctaaaacgctttcttttaataaagtgcatgagttctcaaaaaaaaaaaactatcaacttctatcggttgttggcaaacaataatataggcacaagtaccattattttcacatagggatttccaaccttttaattgtataaataattattttcatcacactactacacaaatggttcttgcgagcattcttttcacatgtgactcaaatgtgcagcctcctatatgccaagcatcttgcctcaaactcaaggttcatctttgaaaataacttttgcaatccttttacacataactattttatggggtgcttaaccagcaattagcattgaagcttttacacataaaactattttaatggagcacttaacccataagatagtattgaatcaatatactcctttcgttatagtaaaacatagctcattttacaacataatgatattttattctttcaatttttttatatttgtcttcatacaagtcatattaagcaatccaagagacaaaggtcaataataaatcaacaaaattcagtaaattcctatccttcaaagtagctccatgggtttctccacaaccttcatgtataagcctctaatgcggtttcaaaatcagtagtttttcttataataatatgattaaaatctatactttttcctaataaattattattttaagattcatattgactaggtcttttctttaaaataccatagagtctcacatattacagagaagccttaaataagatatgcatatttgatcaattaaaaagagggctaagcacgttggtaaaaaaaaattactagcaataaaagtttcttgagactttttgtggaaaaaataaacaatgagaattgaattaaaaaggaaaaattccttactttaatttcaacttattttgttaaaactatttccgaaacaaaataatatgcaagcctacgtgactgcgcgggttatgttcctagttattctagaaatattcaaacatttgggcaactcgtattctatcttggtgcaatgtactggcagtaggtcataggtcttgatcagtggtctaatctcatctcaataagtacattggtggcctaatcacaagaatgttattgtactcagacgggaaatcggcggcgcgaagaatagttataagtaacttacttgaatgtcagactctttaagttttaagttagcagtaggtgctaattagtactaactgctaaataatcgatgcttgtgccatagaacatcaaacctatttaattattaactgaaaggacaggtttgaactgattatatcgataggttggagtattaaactagtcgtaactcgtaatatagtccattgggagcattgacgttgaatttatttagccaacgtgttaaggcaggttagtagatggtatgtggtccgcacattttgttcagtttgattcgacgaatacaaaatgttgaatgaacatctcaacaaaatcatcagttcctatatataattgattttcttaagatggtgaatctttatttcgagatttaatactgttctgatgtagagctagccatttctattatttccaataaaatatcacggatcaatagccggtaacgttgaagaatatttgtggtgccttttctactcttctatctccattcattcccttttcacaatatattttttattgaacgcgtaaaaggattgcacgtcaatatattagaagaatagagtttttgttacacgacgcaatcggttagaccgacttatgccaagaaagggagaaaacaaaaagaccaaataaaaaggagaagagaagactactgcgacggctaaacacaactttaaatagcgggaaggggttagagccactaccctcccaagagaaccccaaaattagcaatgtcagctaaagatcatagatgacccttagagaggatggactcaaggacctctgagaccgaggacaacgcagagtcaaaaactttggagttccgctccttccacggttgccaagagaccaggaggaccataaaatcaaaaccggcacgaatatacctttttaaagagaaatttactattttaccacgtgcatatacattatcatacacatacgtacacatccatgaccatgagtaggtcatttttaacacacgctcaagagacatcagacacaggccggataagtcatattgctgaaaggttgcgacccgtttatatcaacaattttctacaccaacacgatccgaatgtcattttccgatttcttagtttattatggcctttttgacattcaggaaagcatcgtccctttcctactcctagctcattcgtagaagcatagaacccatccagaaaatgcagctatcttacgtcgttcttatcagaacacgggaacaagccaaacatactgcatccatatacgctcatgacattcaacatcatacatatgtttccatctttagtgtattgtttgactcgttaaaaatcgacggcctatagggacagcagagcagctttctagccgtgtaattccaattatttccacgccactcgcttgggccgatttttcaatgtgggccatctaaaaaaacataaaaacagtaaacaggagttgaaatgaactgacccgaaggcttcgtgcccaaaaatcctcgggaaaacgccggggaaatcctgcaatgtggcagcaaaggttctcgtgtcacaagttttcagagcaaaaggctcacacgttttcagagcaaaaggctgtggcctgctttagttccctaaatttattttacaaaaacatcacatcgaatctttaacacatgcatagagaattaaatataaattaaaaaaataatttcacaattatggaggaaatcgtgagacgaatcttttaagcataattagtccatgattgaacataagtgctacagtaactcgcatgtgctaatgatggattaattaggcttaaaagattcgtctcgcggtttctaggcgagttatgaaattagtttttatattcgtgtccgtaaacgtctttcaatatccggacaaacatctgatccgatgtgacgcccaaaaaaattattttcgcgaactaagatagtcctgtataacggttataaatctccacaaaaataccgtactacacatggggtccacacacgggacgttctgggccgtccgatcggtcgtcgacagatcagcggcaggggatcggactgacctgcatacgccagaacgtgacgtcgctgtggcagagcgaggtgcagacgatcttgatccggacctcgtgcgccttgggcgggtccacgacgatctcctcgacggccagcggctcgccagcggccctgcacacggccgctgctcgtcatcgcggcggcggcggcggcggcggcaacgaagcacggtcagggcatccatggtggtggaatcaaaccggaagcaaagagacgaggaaaaacgggctttggttttcgaggagaagatgaagaattttagccggattcttcttacctttgcaacggatgggttgggggatctgacccgccatggacgcgagagagaggagatagtaaagaggtttctgttggcgcggcgctctacttggaagggacgatgtagctcggtagtgaatgtctgaaatatataaagggagggagtgaggttgaaggcatttgtgtgcaggccgagagcttctaatcaaatggtacttgtattttgttttatgagagctttcagtttcttctaccgttgacgtgggctgatggatggtgtagctgtctagtctattatttttaaaataaacaaaactagtaggagtaggagatgtagcacatattactatatataaaccaggggacatgtcacatgctactaatacaaatctgggatataacttatgttcagattcatatctcatcttatactaaatttatttattttaagatggatgaagtaggcatgtatatctcatcttatactaagtttagtcaatttgccttgctactctcttttatgtttgttgacgtaaagacaaacaaattcatatgcatatttgttgcagaaattatggaagcggatgcgaggctgtatgcctgtatttggttcgtatttcaatggcaaaatctaattcgcgcgtgctctctgttttgtcttatcgcacgacacgctcatcggtcgtctgatcccaagcgctggtgcgtatgtacatggcctcgtgattcacggacatggcattatctagaggagccatgtgatgctctacgctacaccggcttcaaaaatgattttctcttaaattaatcatccgatttacgatccgattacactggtgtgttcgtaagaattgaatctttataataagatctcacatgattatattttgatgaaaaattagaaattacttttataatatatctaaattacttttagatttcactaaattacttcttagacccataaaagtaaattcaataaagcctaaaaataatatacatatattatagaagtaacttagaaaaaaaaagtaactttatcacgacattaaaagtaaatatgttatggaggtaaaaacatgagtctatatagaaattaaatttaatcagcataaattacatcattgactaaaaatgattataaaataaacaactcacaacatgaatgtatagatttcttttaatgccgtaacaagttacttcacttttgttttaagtaacttctatagtataggtaaattactttcaagttttattaaattacttttatgactaagaagtaatttaataaaatctaaaagtaatttagatatattataaaagtaatttctatttttttcataaaaatatagtcatgtgagatcttgttataaatatttaattgttatgaacacaatggtgtaatcggatcgtaaatcggatagataatctaagagaaaatttcataagaagaaaaaaatacatgcacttttgagtatactagtagcaactagatatgagattgaggtagctggttatgaccatatagagaacgatctcgttgtagacacgtcttatttcaatctattacgacatctcttgcactcttttttgatcgcccggttactcgtgtaaccgccagccgccgcgccaaaactggctcataaagaaacaaggaaaatagcatttgatgttaagattgtgtctgcacacaaaattagaaacaaattcatccgacctgagataatctctaaagaaacaaggaaaatagcatttgatgttaagggtgtgtttagttcacgctaaaattagaagcttggttaaaattggaacgatgtgacggaaaagttggaagtttacgtgtgtaggaaagttttatgtgatggaaaagttgaaagtttgaagaaaaagtttgcaactaaactcgcctaagatggtgtctgcgcacaaaattagaaacaaattcatccgacctgagataatctcatagaagtggtttgtgggcaggatttgatatgcgaaagacaggtagggc

SEQ ID NO: 6298 - DNA, 6816 bp, Oryza sativa
atattttaataaaaaattaaaaaaaatctcgctagggacagagtcattgctatttatttttttatattttttagaacagggtcattgctagttgccacactgccagaatctgattggggcatatcatatcaccacgccacatgcgttacacgcctacacgagagtgggaccaaatcacgcatgacatttcccctcttttaagggtgtgtttaattcgcgaaaaggaaatcgttaggtatcacatcaaacgtttaatcggatatcgaaaggaatttttagacacgaatgaaaaaactaatttcataactcgcttggaaacaacgagacgaatttattaagcctaatgaatccgtcattagcatatgtggattattgtagcactttatggcaaatcatggactaattagattcaaaagatccgtctcgcaatttccatacaaactgtgtaattggttttttatctatatatttaatgctctatgcatatgttcaaagattcgatgtgacgtttttggacaatttttttaaactaaacaaggcctaatttatataagaaaacatacatacatacatacatacatacatacatacatacatacatacatacatacatacatacatacatacatacatatatatatatatatatatatatatatatatatatatatatatatatatatatatatatatatatatcatacatattctcagtcatatgaatgattacatgctcttatctttacgagtatttctgaaaagttagaccaacatattttgtaattaatgtagccatcacgaatacctcattatcgacggatatacctcgcttattcatacgtacaaacagactccatctttatcgctgcagatgtgaccatgaatgcactgcagatatgacaaataatgcagatgttgatatgatactagcagacacaaatgctagtagtacgtagtagtagataagttaaatataataaagatctgaaaactgaaaactgatcaataaaccttctgcccggtcggccggccggcccacattttataaaatcaaacaatatgtcttaattctctgatgtaagtatgtaacagaggcaattatatcccactaatttgacaaatacaattatatccctataatttgacaaatataattcactcctggtataagaaaaactacttcagcccgaggggctatatcggccagtgaggttgttttcttttctcactctccaaatgagatagtagcgtgaatgcatgatatacctaacgtcggtccaaaagagagaaattgctcatttgaccatatttatagacctaactactaattttatctcatattttctagtttgtttatttgacccaacttattcaaatcgacaccatctaatgcctgctgcgcctggaggatgtagtgattatggtggcggctgctgctgttggtgtgattgatgttggatgtgaatgttaattggatttggagaatgcctggagaatgtgcttttgcttcatttaatgtaatttgagatgaacaagacatagaaaatgatgttaaaattttgtatgtctgccataattatgccattttttagaaatagaagtaagaattgtcaaatttaagccaaatttatcaaattttaagcccaaattgttgaaattgtctaaaatatatcaagctatgccatattcgttacaaatatgtttaaaatgtccaaacaaaaataaaatttgatacaaccgggtgaaatgagtaagggtaaaaaagataattagtcccttagttaacaccgttatcttatctttgcgagtaaggtcagcctccattttcgattttgaaaaacatgatcaaatgagaaaacctaaaaaaataggatctaatttatagttacgctttaaaatagaatcaaataagcaattttctgaaaaaaaaaagatatcatctgctcggggtcggttgaagctgcttcactcttgctctgcttaggtatagtcgtgtttcagagttgcaggttcatgaagtggatcaaataattgacttactcttattttacactactttgttagggaaaatgagttgttttattcatcagggtgacaacaattttgtctaaacttccattggagctttattcggtggtagcaatccgttgcttacataatacgagtaactagcatttaggatcagatcacattacccgatgtcaaaattaagggggtacctgggcatttaccttactaccatgatttactagggtatgccaaaaccaaatccgccagggtaaggacaggttagaaacataggttgagatcagcatcaacatgtgcatgtagtcgtatattgccaatggcattataggggtggggcaaggatagagatggaggttgaaaatatccacatgtgtatatacctgtagtttggcggtattatatgaacaggatagatggaggttgaatgcatctatacgtgcatgtactaccaaattctagaaaactggaacacacaaggcgatcatcactttggccgtacatataagaaaagaatagagagacatggaggttgaatgcatctatatgtgtatgtactaccaaattttagaaaagtggaacaagaaaatgcgatcatccatatgtcagatatagcatttgaacacgggtgtggacaacttccaccgcaaagatcctggctagctgacctacactatatctcccaaaaataaggcctgagtttagttacaaattttttcttcaaactttcaacttttccatcacatcaaaacttttctacacacataaacttctaactttttcatcacattgttttaatttcaaccaaacttttaattttaacgtgaactaaatacaacctaaaaagaagaaaggttagcataaaagtccgagaaaacgacgtgagtgaacaggttgctaaacagtagtggtttgtatggagtgttttgatttctacttttatttggaagatgcatgagttctactactacctccattttttactatatgacatcattaactttttaatcaatatttaaacatttatcttatttaaaattattgtggaaatataaaataaattaagtcatacttgaaaaacatttgataataaatcaagttacaataaaataaataatatttatgtatttttaataaaacaaataattaaacgtataaaaaaattaacagcgttatatattagaaaacggagggagtactgtttcattaagcggaatagagagttttttttttgaaaacaacaaggtcctaatcaggaccagttcaccatgtggaggccaggcaaagcaaaagctagcggactccactacagagttttattcatgttttgttttctatcgcatgtattgactaaggataggaaatcaaacctaccacatatgggtgaaatcgattattcgttccatcatgattggggtaggttagttagggatctatttatagccacagaacattgccctggagaatacactgctgcagtgctgcttaagctcgccatccagccgcaatggaagatcagagcctgaagcccatccgttgcaaaggtacacaattcacttacagagatcagatctgcatagctccttggtactactactactactactcaattcctcacgcatgatatatgattgatacatatcgacgacgacgatgcagcggcggtctgtagagcggccagtgagccactgatcgtcgaggagatcgtcgtcgatcctccgaaagcctacgagatccgcatcaagatcatctgcacctccctgtgccacaccgatgtcaccctctggcacaaggtatacgtacgttcccccatctgatcaaaccatgtgaaagaatcacgtataatttgcttttataatttcataataggtagaccctgcctttccaagaatcttgggccacgaggcctacgggtatgttcgttcttccctgatgctttaattttcctcttcgccaatccgaaaattcgaattcgagaatctctaactatatctgtttgttttttttaagggtggtggagagcgtgggggagaacgtggaggggctcgcggcgggggacacggtggtgccgacgttcatggggcagtgcgactcgtgcgccagctgcgcggcggagtggacgaaccagtgcaccgccgtgccgttcaccatgggccccgggatgcggcgcgacggcacaaccaggttctgggacggcgaagggaagccgctcagcgacacggtggccgtcaccagcttcagccagtacaccgtcgtcgacgtcaaccaggtcgtcaaggtcgaccccgccgtgccgcccaaaatcgcctgcctcctcggctgctgcggcggcaccggtgagcctgagattcgcagatatattgaacctgcttggtagagccaaatcaatcaaaacagtttcaacttcacctaaaatgggtacggagttggatggaacgtctttcacaaaatgaactagatatacgaagcttggtttaaactatgagatttgctccggtcagtaaaaagtatctcgaggtactagtatctcacggtactaaatcgtttccgatcatttgatctagttggacatgatggccattgctagatccaacgattgaaaacgatttgataccgtgaggtaccagtacttcgagatattttttttttggactgaagcaaatctcttaaactattctacaactccacttcatagttcagactcaactcctgaagctaaatttaggatttgagttttaccaaacagttccatattttagcacgctacaaacgaattgggggagcctgagcctgaaatgccatttgcctgattgccttacctctgaactgtgcactgacattcattgcatcattgaatgtcgatcaggggtaggagcagcatggaggttggccaaagtgcaacccggttcgtcggtggttgtcttcgggctgggatccgtcggattggcggtaagctagaggtgaagcagtgtaatttcttactcggatacatgatgagttgacgaccgctgcaaatattttgacttttttttccaggtagtgcaaggggcaaaaatgtgtggagcaacgaagattatcggtgttgatttgaatcctaacaaagaggaagttggcaagtccaaattatttttcctgtgtataacacgcagtgaagaagaatctttgcattttctcacaactgaagaaacctctactttttgcaggaaaagagttcggtgtgactgatttcgtcaatccatcccaactcggcgacaaatccgtcagtgaggtgaggaaacacgccatttggcaccaccctacagaaatcatctgctaatggatccaaactcgtcagtgcacgttgttaattctgttctatcctaggtgatcaatgcgatgacagacggtggcgctgactacagcttcgagtgcatcggtatctcgtcggtgatgactgaggcagtcagaagcaccaaatcagttctgatctcaccacactgattcagacattcagtgatctaataatcgcgtgttaataattcagaggagaatatttgcagcgggaattaataatcgtgtgttaatgcagggacggggcaagacgatcattctgggggtcgagaaggacagccagccgttgtgcctgccgtccttcgagtttctgttcggcaagtgcgtcatgggatcgctcttcggtggggccaaacccaaaactgacatcccaatcctcgccgagaaatgcatgaacaaggttgcgtttttataaattcagttcgcggtttcagtttcagacgaaactagactcttcctaattgtaatgcatgtgctttgtgtgtgttgtgcaaatgcaaatgcaggagctggaactggagaagctggtcactcatgaggtaggcctgacggagataaacacagccttcgatttgcttctgcagggaaagagcctgagatgcatcatatggatggacaagtgatggccacaacttggggtggggatgcttttcctgttcaggttctgaatttggttgattgatgtgttcaataagtatgctgtttatttcgctggtgttgctgaaacaaggagtaatacactaatacgtccatcagccatcacgaataactgatgtacacttaatttcatgggcggttagcagcatcctcctttctgaatcaatgcagaatattttcattccaaaagaaaaggattatctttcttatggagtatgttcagatttgcgtgtaaagaactggattagtccaatcttgtttcttcttttttttttgatctcagtccaatcttgtttctgaaactgaacggtgaggtcgcactctccgggtctcctgtttcttaagcgggtaattttaccatttttaaggaagtgaggtactatatttttctagtgtaaaatttgatacctccagatactaactactaattatcttaaggtactaaaaattttagtgtaaaatttaggtaccttaaggtacttttttaaggaccttcaaactcctcttcttcagctgtctttagtcctggagcaattctacagtcttaaggaggtaccataaggtattaaaaatttagtgtaaaatttagtacctcatgttacatcatagtatctaaatatcaatatgtaccaaatttataatagaaaaaatggtatctcatggtaacttctcaataactgtaaaattactcttagtcctgtgcctttcggcgtgaaagcgtgtggaccattgataagatcgagttgatctccagggccataggccgaaaagttgaagcctaagccctaccgggctgcaggaatt

SEQ ID NO: 6299 - DNA, 63755 bp, Oryza sativa
tttgatatctggttcggtcaacgattgttttctttgatctgttccttccttctctaatctctctagttagagccttccacgacgggttgcgtttcgctctccaaaacgtacgatatggtattattgtattgcctgtttgtttgacctactggcggttttgtttaggtcacacgcctgcatagccgtggacgcagcgttccgcatgtattgaccatggctatctacagactacagatttcaagaactactacatcattttattctcttgtaaacaagagataaaagaatactaattaagaaacaacttggtatcaaattaatagaaaaataaatatataaatcatttatctctgctcacacctcccagcaggtcagctagactcaattcctatcatttacttgacatccactacactttaatcacaataaagctatgatgcatgttttattaaaatcagggtatagctgggcaggcatctgttcttgttcatccgtgaatgcgcattatcgatcgtgatagaggctactacctcctctaaataaatatacttctagcttttaattttcttccaaaatgaatgtacttctttatcactatttcttcctccaattacctcttattcaaatttcttcatattgttcactcaatctcgaactacacctcatttaatcagggacatctaaatcattttattcaaaagggttatataatggagtcagatcccgatcagagcatctcatttccatagtactgttattatgagcttaattaggaacattttgcatagtaattgtgtccatcaagtgtaagtgcacttatttgggaacggatgcagtactatctttcatgcttgcaaccttcctttgttattggcatattgcacagcgcacctaaacaacaaatcaagagtttggtaggtctgatcactgaattaaccttgtctctgttggacggaacagagaactgttgttgatcagtggggcgcaccagtaggacagtaggtgatatcaaatcagatggagctattttgttgaactgccctgcccaaccaagtaggataggcggatggagttggcgaaaatggcagaaatatctgaatccagacaacaaacttcatgccaaaacgagaggacaggagcaaagataaaaataattgtagataaccagtgggagaattcactggttcagcctaaaattaataggcgtaacaatcgatcaaaaaacatgaaaacttgaatagctagaatcactgaacatttaagaaattgatactgttattatgagcttaattagcattttgcatataaaaactcttttttttcatttggttttcctatttccggtgttgtcttcacgttgccatgtacgtagtattgtactgctatgtgcattattccataaagtacaatttgtcccctttgagagaagcacttcagaatttgcccaaatagatttacaaatccaaaatcaaaagtgtaagtatttgtagtggcaattaactggtaacttaaattaacgagcagtacaactggaaaattgtgatttctacatacaaataagcaaattaaatagtcaaaactataagatcatgcatgaattcgagaaatgaaacttataattgaaactatacaagatactgtacagatgcctaattttacacccgtatacactgtctccttatatttttctagctttacagagtaacgatttgcaatcccccgttgtggtcaagtacaaatcattgacaggttaataattataaacttctgctcgtatacatacaggatcccaaaattcttcttgtttttttttaaaaaaaaagtcaaaatcaaacacaaaaatacttgagaatagtttagagtgaaagccccctaaaaattttaaaaaaaaaggtaggcaagaataacaaccaagcatggaatttacgatccatagtttgcatgcggtggcggcaacgtttgatcagaaaaatacccacttgtgcgccgtcttctccttcatggtcttggaatggaagagatcgccgccatcggcgtcccctgattgccgccgcttctccgctccgacgagcctcgacaggaacctcccaatcttcttcttcttcccgctcttcttcctcttcacctcctgctgcttccccttaccagatgcctcccttcccggctcttcttgcccccctccggctggtttccgactaaccgagctcggcatcagcggctgcgagaaggcggcgacgttggcgaaggacgagccggcggcgccgaccacgtgtacggagctgacgtcggccgagagggccccgtagcagggaggcgagccggaggagtagccgctggattcggcggaggaggaggcgcgcgtcgtggtggtggccgaggaggaggcggagaggtgggcgaggcggtcgcggaggcagtaggggcacacgcccttggacagccggtgctccgggtgccgcttgcaccaccggtcctcccactccgatcgccgcatggtggcgaggcgaagctttctccgctgctcgatcgatcgctcttcctccgtgttggcttgctagggtttatgcgtctgtgtttggagacagcgcgcgcgtggcggtggtggtgaactggtgatcgcgttgttggtggcagcacgggagcagggcgggtaggaggagatgataagaggagcgaggagagcaaaggaaaggaaaaggaagaggaaagtttggcttgtaacttgctgcagaaggagtccggggcccgtgttctattgcgccagtataatttaatttagtaccatctgttttgttgtaatgtttgataagcatagatttggcttttttcttctttattaaaacctttgatctgttcaaccttttttaaaaaatagcaatatctatgtttcatattataagccgtttaactttttttcctagctaaatattgttaaatttaattaaacttatagaaaaaatttagcaacatttaaaatatcaaattagtttcattaaatctaatattgaatatatttttaataatatacctgttttatgttaaatttgcttaaacttaaataagtttgcctaggaaaaaatcaaactaatcgtttttgttattattttgatggaacaatgatgagtgcaatatcaatatgtgctgccgaaaaaaacaacttacttcgacgcttggaaagtagatacgttaaaaaagcctaacaactagtattacgtacgtaggacttgtttagattcaaaaaattttcgtcaaacttttgacttttctatcacatcaaatatttggacacatgcatatagcattaaatgtgaacaaaaaataaaacagttgcacagtttgcatgtaaattataagacgaatcttttgagcctaattacgctatgatttaacaatgtgatgctacagtaaacatttgctaattatggattaattagaattaatagattcgtctcgcagtttacaggcgaaatctgtaatttgtcatgatattagtctatgttaaatacttcaaatgtgtgtccgtatacataaaaaaaattagtacacaaactaaacacagtataaaagcatttcatgcgaaaatgatgaaagtaaacaccaacagtgaactctgttacagggtcatactgtcatggatcaggatcaggtactctgtctctgagtctctcggcctgggcgctactgtttcgtatcagactagtttcaaggtgcccattatttatttcttttcaccaccacaccagcctctgaaacacagattctaataattccaacctacaacaatggcgacagaaacaaaaaaaaaagaatgtttcgatacaacgaaagattagattagagctgccaacgcattcactgatccaaggtggtcaaaagaagcctgatttctttaactccacatctgctagagtgggatttggtcgtgactgccttcagactttgtgcaccccaagtgtaattatattatttcccccacatcgaaaagaagtaaaaaaaaaaagtcagtagaaagaaaaggtgaaaaggattagtgccacgccgcgtcggcctcttgtgggaggcactagtggcgatggcccgcgacagcgatgacgggcgggcccacgcgcagtggacaggagatgctggtagacgattgacgacgacgacgacgacggcgagagtgaacgggtggtgcgcgtcgcgggtgggaggagcagtcaacgatgtgctacgtactcctacgtgtgcctccattacgccggggcgtggggcgtccacgtccgcgcgcacgcgtgtcgcaccgcgtgtggctctcgcacgcgggcgttcgttttcgcgcgtgcttcgtacgttttcaggacgtgagctgagcccggtcgatcgtcctcgtgccacgcatgggttcagactttcagactccggccgcgacgtcgggatgggggcgtcgctgtggccgtgtgggacgcgctcgttagctctcgccgttttcttgcatgtgcagctgatgatgatcttctcccgtcgcgtcggccgtcggtgacggtgagctgtgagctctgctgatccgcgttgcctcgcagagcaaacctgcttgccgatgatgcagtgcagaagtggaggctgtcctccatccgctgatccgcctcctactcctagcttctcaaacgtaggcaggcatcgatacgtcagacaaaacattcaccatctagaggattggatcggtccagattctgagctgagaaatacatgggccgagatttgaaagccctgtcaagagattaggttaggaataagtatacccttactccctcaaatatagctccaagctaattcatatctctcaaccacaatatcaaatattttggtcgtctaactattgaaactagtgtaatttaacttccacagcggttttcgttgatatggctcgttgacctggttcaaccaattgagtcagcatgcgggtcccatatatcagtgttacctcctctttcttctcatcttcttttctattcctttgtcccctctcttttcccacacggcacacaacgatgacactgtcgagctagagcgggaggagggtggagcagcagctagtgtggaggagaaggtatggtagaaagaagggaagcggccccttgcatggctggctacgccgagccaccgccgccgccatcgtcctagtactagtactgccctttctcggcctttcgccgtcctaccggtaggtgagtggatctagtccacacttggtggggctttgatgagttcctctaccactccgcctcgagaccacgccattctacctcgaggttgcgacctctcttcaccttgaggacgatgagccatatatccgcctcaaggacgcttcatcgccacttcgtctcgaggctcgccatcgcagcacatcaaggccgccgcttttcctcgctcacaaagcacaccaagggatgggcctgctgcgtgagctcacgaagctcgctgggtggagtcccatcacggaggtcactaaaagatccacgctgtagtcatctaggcagtgccaaaccaagcactgccggctgccgccaccactacatccccctcctctcttatgccaccatgatcatgggagagctcagacttggcgtagcggtatccatccatgccgaggtggatcctgggcatcgttgagccaaagctgaaggagatgaggcgatccctaacactagcaaaccactctcgaaaccatttagggagatcacaccggtttcaatagttggagagtcaatatatctgatattgcggttgaggaatacgaattagattgcacttatgtttttaagggacctaaaatgtacctatttcggttaggttaagcagtaaaggctgaaaaagaattttcactgacgggccgacagcccaacacaaccgaaatgtcgaagcatatgtcatttgacggtccgccgttaagtgttgtaattaatgggcttctcgtcgtcgtcgaccagcggtaacaaagggcccgatccagcggccgacacggtcgcggtcgccggagacgtcagccgaggccggacgaacgtgtccgctggagtacgtttggagcttagcggccggagataggacataggtaccccgggggacaagaagatgtcacgcgtccgcatcttcagtgcggtcaacacgacacatccattcaatcgagacgtacgtactcctcagcgatagctacacgtacaattttgtcgtggttgcgcatgcatggcaagatcctgtgcaccatactgcgcgttgcacaggattttcatggcaaaatcgatcttctactccaaatttcagcgaactttcagcctttgcaaggttcttgcgatgtccaggcctgtggtttgagagcactgccaagaccaaagatgctcttcctcttctttttttttctttccgatcatactgcaccaggttttattattaagacaaagaaagattactccgtataaaattagccacatggctcggggtgtattatatctgtctctttcttctttatttcatgacgtctcaccttgtgtgacatatcaccactggtacttaatatgattctttacttacttgcgatgcctgtgccctacaagcgaaaaggacgcttaccaaacattggaataaaattgatggccatcttggagacgtgttgacacgattgaaaaccactataccactttgtgttaattgggactgcagcgtttttctttcttgcggacggaacctgtctgtagataagaggattttcttctcatgttttcccaaaatggtaaaagcatgcatcctttgcaggctcagctttgcaatctactactagcacaatactgtcagttatttttggaagagcactgaacactttccaagctccctcttgatgccaaacaattcttgatggtatctgatcacatctgcaatctcgactgcggctgtcactctgtaccttggcttacacacaagagtttagacgatgacccaacatggttgcatgatacaggggtacttccgtggacttgattacgtacctacttgacccaacatggtttaaactctgtgtgatttagagtaatttttttagaaaaacttaatatatagtttaaaacgagttatttgaacagtaaaaaaatctaggaaaatatatttttccaaagcgtgaagtaaaacgatctgtttcatgaatcaataagctaaaaagaatatgggcttaacccttgtgtgtaagccaattaacatggctttataaaatgtccttgaaggagagtcatctacttatctttgatggctacttttttacatcactttggaggacctgcttttatacacccataacatctttccttttctctatctttttttaagacgatgtgcttcatgtcttcatcccttcatttgtttggtggcaggggaacaagccatcatgctggccagtcagtagtgtttggtgctttagctggcttgcgttatctttcaaaatttatcagctgccaaaacatgcgatggatcctccgtagctttctgtaaaaacgctacagatagtattttgggggaaatgtttgatttagcctgtaaaatgtcctatccgatttaccctcaacttatgtaccagacaaaccggagtgcacaaaagatgtttagaggaggctgagacttataggttcggccaaatttctaaatttaattcgataaattttggatgaaaggtataagcaaaattgatcgataatcttacccactatagattgccacatcgccaaaatgctgccacgtatgtgccaaacatgatcgaaagcatactagttgtgttcagaggtaaaaaaaacgctaaggtattttcgtaaggtgaaacacaatatttggttagtagtttattttttatcctgtagtcacatattctcaaaatttagataaaaatctgaatactttgaggagtaggagattttacaattagtcgtagctgtgagaagctcccgaattgtactatgttctttagagtatgtctaacggtctaccaaatcaaactctccaaacatctatacagccaacactgagacccatatgtcagcctctactaccatttcttctttctcttttttcctctcttcctcttctcccgttggggccatcctcaagctcctccatagcactctccctctctacggtgataatgtctgtgcgacagcgacagttggatccgtgagcgcatgaggcgtggtggccgacgccagctaaagaaaggccgtcgatgggcgcggtgggcaggtgcgatgcctatgctgtggtggtgcctgtttggcaagtgagggaatgagtttgaccaaccagacggagagactgttgggtgtgatttttgttcacaattattaaattttaacttgaaaaatgggatggagagacttttgaagatgatattggaccttgccagtgtgcgattgcatgtagcagcttggagggtcagtagggagttgagaccttgactcagacatgttgtattgctgtgagtgctgttgctgcttactgcttggggctcctgtgcacctctgttttcactaattctgctatgaagatttggttactgaactaaatgatttagttattttgactcgctatttacttttgggctatcatcattcgaggtacggagcaacaaatctcgatacttaggctgcgttcagggatgccacatgatactttggttacgttcgcatagacatcatgtggcattatgtctttttttttctattatgtaatgctttataatatactagtatgatatatataccacaggtagtaaaacgcagacagctatgctttgctgtcctgtgctatccttcttcgaccccttggcggcttaaaatttacatccttgatccttcgttaattaccctatatcaatttcgtcctctaggctcgttccacttcttgctactttgctacagtactagcagtaagcacgccaggtagccaaaggcggtagtaaatgagtacagtaaaaaaactaaaagtacgtgctccatccaagcatgcaatgcgccaatgcggttatgcacagtgctactaaccctgccattttttacactaaccgtggagatcaaaatctcattcccaaccctcgttaccactcgcgcaccaaccgaagttgaggttggaggcgtgctcgtcggagaagaagccggcggcgtcgttgccggccatctcgccggagcaggcagcgagccattcctccgtgaagccatagacgccgcctttgcacgagtcgtcggagtacggaccgtgccatttggactcgagcgcggggagcgacgacgagcagcccacggttgccgccgacgcgtcgtcgaccaagaacgacgggccgaatccaatgaaggccgcgccggagtacggcgacgcctcgtcgttgaacaccacgctggagtcgctgtcgtccgacgagccgtccttgcacaccgtggcggccgcggcgccggccgccgcgtcattgccggcttctaccttcaccgatgccgccgtgtccgccggcttggtgggcagcttctccctcagctcccgaatctgatcgatcgagcacgaattgaaggtgagtgacaagctctcgcgcgcgtcgggcaaaacacagcggtgggcgcgtacctcggcggcgagggcgtccttgtcgcggcgcagggcgtcgcagtcggcgcggagggcgtcgtggcgggcgcggagggcggcgaagtcgcgctcgagctgcttcgtcttccaccgggcgcggcggttctggaaccagacggcgacctggcgcggctgcaggccgaggtcgcgcgcgatgcgggccttgcggtccgggtccagcttgttgtccgtgtcgaagctccgctccagagcgcgcacctgctccagcgccagccgccgcttcttctcgcccagcccgcacgacggcgacggcgactgcgccgcgtgcccgccggccatgtcttcgtcgacctcctcctcctcctcctcgtccacctcctccatctcggcttcatctttctgctccatggtcaccgcgggcaagctgccctcctcagagaacgccaggtcctctcctgcaaaaaaatatgcgtacacttttaactttgtgtttgtattattcttgcttcaattacactggatcgaaacatattactaccgcaaatgcagatggattgtacagtttgcacttgtatttaagcttcaaacagatttgcagccatgacgcactccacaagtagtctacacaaacgaaaaagatctcgcagcaaacacaccttgttttttggattttcggctgctgctggtgggcctcttcattatttacaaaactgaaggaggattggaaatggagatgatcctacgagtggagggttgcaaggagtgttgaaacttgaaagaagcggcagctagcaaccagaggacagaaattgcatgcagatgtgtgtaccccttcaacttttgttggtcggtggcaatggcctcccctgcttcgagaatcgagcagtgatcgtggagatgaactgggcagagtgccgattcgtcctttggaggacggaggtgagaggcggagagcagagagagaggtcagtggacggggcaaacagctgatgcaagaagccatggatcgcgtattaataaaaggacgcaggaggaggagctgaggtgggccgggaactctggttttggacggtttccaagatgtcctgtggcagaaatctttgtatgattcatgtgtcttcaaggcatgtttgatttgttgaagatgaacatatcaattttttgtaatgcaaaaaaaatgatattaacaaaattttataagttaaacacatgagaaatctcatgcatttggttgtgtacatcctttgaatatatagatgttgagttttaattcattattaaaacaaacactggactaataaaatgaccgctaatatctccaatcaagttcgactgcataaatctttttttaagggacaccggggcagagtctcctcacctgaattaattgaaatttaaaataactgcacaaaagtttaaaactagatcagccgaaccaggaagaagaggaagaaaacatcgaggagaaatacatgaagattagaacaaatgtagagggaaggcgaatagcgcctttcaggtggaggcaacgtgccagtagatctgtttgaagcgatgtgactataatctagccatttccaggcagagtcttctcacctgaattaattaaaatttaaaagaactccacaaaagtttaaaactaaatcagccgaaccataaataagaggaagaaaacatcgaggagaaacacatgaagattagaaaaaatgtataggggaggcgaatagcgcctttcaagtggaggcaacgtgccagtgggtctgtttgaagcgatgtgaccataatccagccgtttccgagcagctgcgcagtaagcgggaaactgagggtggcaggtttagaagatgacttcgtttcatccttcaggtttacttgagtgtgtaaacggagcttgaaatttgtgagccaaaggttcatccatcagccatttgccatgctagaaggaggtgcgagatccatccccgatctttttgacaattgcctggttatgacttgaatttcatcagaatctatcaacgttcatcgaataaagttctacggattcagaccatatcaattgaaataatgataattgtcgggtagttatagtcgaatttacaaaccccgaatagattttgatggacctttaagagtagaaacttccaaagttgccaaatcaaggtatggttgtgattgcttcatatattttattttgctgtctagccaaaatttagtaagtttattttagtaacaaaccaaacatacccttaattagttatatttgcatgcatggtgttgtttaactttttcttaaggttcttgaatgttagtgcatggtgcatatcttcaagtgctactcagattgctaccgaattattttccattgttattagtctacgacgctctttcactttagcatctcaaaacaatatgggtaaccttgttcgaacatttttctcctatgttcaaggcacccagtgattataagtttaatccatccaattttttgggcaatgtagtcatttgacaatgtataatcttcgaaactaaacatcaacaactatttaacaaacaatatatttttagcatgatataatatcataatctgaatattaatcgtaatcaaacttacgtatacactccttaattttgctatcagccaactgagatgcattataaatagatgtgttccattaaatgagaaaagacgaacggtttaaatcgactctacaactacaatcaatagaaaacaccataaaaactatcaatggaatatgtaaatttcgattgccttcctctagaaattatgacgtgtttgtgtgccaacgaaatatttcatttcgtaagtcttaagtttaagcacacagctgcatgcactgcaatcaaccacaaagtatcagggatgcatggtaaatcaatccagcttagtgcttctttagttccaactttttctttaaatttctaactttttcatcgcattaaaatttttctacacacataaacttataacttttttcttcaaactttcaattttagtcaaacttctaattttaacatagaactaaacacagaatcggatggcggtgacggcctagttttaaaccaagtaaataccagaagaaaaaaacaaacaataatgggagaactgcacatacgccactacgatttgctataattgtaaatctgccaccaccttttcaattatcaatttctaaaatgctagtggtttcatccgaaagttgcgaatataccaccctgccgttaaatttgactaacgctaccaagtcaacatgtttggactgtacattagatttcttttaaagaaaaacttaaataaaatgttgtgctcatcgtcaaattcatctgctggtagcatttgagccattttcttgcaaagtattttctcatcttccattttcttaagaaataaaaactactacggagttaaaaaaacctaacgatagtggcaaaatttttacaaggtaatctcccttttgatggcattctagcaattttcagaattttcgatggcatagacaattggagcatatagtaatgacaaatgtgcaattgttttagtattctgtgattctgtcgttgccgctaacaatttaaattcgagatcgatcgaactcagagttgtgaaaagaagaccttgctgtcttgtacgtacacaatagtaatattcgtatcgtttaatagcgtttgtggcgttaccatttcaagcaagcagtgtgggctgtgtggcacaaatgcatgtcaatcatatcaacagggacataatgtaagaaatatgtagagttagatatctaaaaaagataaaaaaaaatgtaaactcaagatataatagattaccattcacaataatgagagtgtgaattctaactcccatagtccacatgaattctatgttactcgatatagttaaaaattgattataagtcattttgattttatagttatacttctctgatatcatttatagaaaaaatttagtaacatctacgatacgaattagtttcactaaaactaatactcctatttgatatagtttaataatgtgtttgttttgtgttaaaaatattgttatatatttctataaactcaaccttaaaaagaatttgactaagaaaaatgttaaaacgatttataatattaaacaaatgtattcaagtttttgaacaagcattatagtggaacacccaaacctctctgaaattgttgtaatcgtacggtgttatgttaggaatacttgtggggtgttgagtagtaggagtacgtacttataattttatatggttcatgatgcggtactgttagggcaatcacagtgcatgcactataggtgtccaaacgggcggcacggcccggcccggcacgggcacggttccggcacggcccgtttcggcacggcccgttaggcacggctgatgaaacgggccgtgccgtgccggcccacgtgccgagccgccggcccaagcacggcccgtggatggccgggccgtgcccgtgccggcacggcacgcccgcggcccacgggccgttcggggcacggcggcccgtgaaggcaggccgccagcccgccagcctgtagtgcacagtgttttttttttaaaaaaaagcaaaggaaatgtataaggaaaaaaaaaattaaaaatggaaataaaatgtttaaaaaaaagtaatgatttactaatgttaaaaaatgaaaaaatggtatttaaaaaatggaaataaaagtttttttaaaaagtaatgatttgctaatgttaaaaaaaagaaaaaatggtatttttttgttgtgttgaaaaatttaaaaatatagattgtgattcattattttgaaataatttaaagataaatccacacttgcgaaaatattgcaaaagaatttgttaaaaatagtaatgacctttattgatgtttatatcattacaggatacaatgatacatgctgcctctttaaaaactttgtcatgtaaaaactcataggggaaaatgagaaaaccatgacaaagaaaagagtacagctcaaaggtcagaactacttctaacaaaattctactggggttggtctggatccaggtagagttgctcgaactgggcagccaattcttggttgtccgcagtgtattgggcatgttgtcgagcaagctcccagtctttaacgcttagtagcatttcgacgtggtcgctgcgcagagtcgtcctccggtcttcgatgattcggccgcatagactgaaggccgattcggaggacaccgtcgacacgggcaccgtcaacacatcccgtgctagttttgaaagcacaggatatgttatcttgtggtcattccaccacccgaggacgttgaaatcttgtgcttcgtggtggatggcgtcgctgtccaaataaccggacaactcttcggccacaacatgcgaagaggcgtctccacttgtagccgacgaactgccaccaccttggattgaacttgaagacgatccaccccaaatcctaccccactgtatcttcttcttacctgtagtggggataggagggggtctctgctggcgaacttcctgaaactttacttcatatcttccaaaaacctcatataatttacgtctaacctcagtataaaaagaactataatctacacctatagtatctccaacaagtgataaaatagcagacaatccccttaatttacacctaggatctaaaacaaaagcaagagcatacaacataggtatatttttccaatatttcaaatatttttgtttcatgtgaaagacaggttcagttagaacgtcatcattttcgtattctttaaataaagtagcaatttcaagaaggttgtgcaaaattatattagcagttggataataaacttgtgacaaagttagagtacaatcataaaaagtttctagaaattggtaaaatttttggacaattgcccaaacatgctcgttcagtactgaagacccgtcactgtttcttgggccaccacgtgactgaacaaaatcagaaagtaaactactataaggtaaaacaacttttaacattaaatacgttgcattccaccgatgctctgcatcggtggcaaacttacgagctttcacaccggccgcattgcaaaacctcttccatgcagcaatccgcgggttagaagcagttaaccacgcgattgcttgacgaacagcatcgatgtggtcacctaccctcttcatgccagtcttaacaatcaaattaattatatgacatgcacaacgctgatggagtagaaaagattgagcatacacacaaaataaaggttgcaatatttcaatagccctagaattagcagatgcattatctagggtgacagcaaatattttatcagcaagattaaattcattaattacttccctaattctttcagctatgttttctcctgtatgtgagacatctattaacctaagccctaaaactctcttttgtaattgccaatcatcatcaacaaaatgaacaactacgctaagataatcctctctagctctactactccatatatctgaagtaacactaacagagaaagtacatgtactaaacagttccttaagtgcagttgcttccttgtgataaacattctctaaatctctagttgatgtttgcctactcacagctttaaacctagggttatgagattgctgaatgtaatgttcaaaagcaggggactccccaaagttcaggggtaaatcttgcctggcgattaaccggacaagagattcccgagcaaccatgggatcgtactcccaactgtgtaccgtaccgtctgggtttaccataagttgctgctgccggagttgtattccttgcttcttggcacacgactccgcatggcgcttgaggtgacctgtaccaccagaagaacgagcagataaaatttgcctacatattctacaacgggctttcgatacctcccttccgtcggggcatgtttcctttatctcatcgaagctttgccacacaccggaggttctcgatctcttcgagccggtgtgtgtcgaaacacttccgctcgcggttccggaaaatccttccgaagctgtctccgcctgaaccggtacctcctcaacgacagccgtatgaaccggtacctcctccacagatggtggagttggagccgatccggaggtaccatcaaaccccgacatgtagttggggtcgaaatcacccaaggtgaacgacggcgactggtatggaaagttcggatccattctgaaaatttaaaccgacataaacaaattttcgaatatttattgaattcacaaacacaatacaaataatacacaaatttgaatattacttacatctttccaactgcgagctcttcaaacctctgcgatcaaactgttgaactacgaaactaattttgatttttgacaaaatttgagcaaattttgtcaaaatcaaaaaaaatgcacacttgagaacaaagagagcacttaaaacacttgagagcacaagatgaggagtgtgggatgaggagaaatggctggggttcatgccctatttatagggcgaaatttgagattttttggaattttttcgaaatttttatgaattttttagcctcccaacggttattttcaaatttgaacggtcaaatagccgttagtgccacgtggcgccttcccattcgaccgccgcccgccctgtccgcgcctgacgggccgccggcgtgccgtgccgtgccgtgccgcgggccgtgccgtgccggcccgctacagtagccgtgccgtgccgtgccggcccgcgggctcggccagcggcccaagcacggcacggctactcgtgccgtgccggcacggcccgttactgtagcaggccgtgccgggccgtgcctgctacaggttcggccgtgcctcgggccgcccgtttggcccggcccatttggccacctctagcatgcaccggtagaggggtgttacttgttagcctaaaaagttggcacaaacactcaatcccacagtgcaaggaacctaatttgggtgatctaaatagataaatggatggagatactgttgaaggcccacaacgcacgggggagcggaggaaaatcaattcctcacctacccttcgatttttctcctcccacccactccgccgcacctcgccacaagcgaacgggtgaaaaaccgaggaggtcgtcgtcgtccttattgtctactcccttgctcctccatcccgccgccatcccgctccaccaccgcagcccacccctatccttgtcgtctccacgggagcacgcgcacacaccgagcagcgccgccgccttcgccgagaagatcgccgccttgaccttctccgacctccctcctccccaatcggagcagaagcaggcgcaagcgctgctcggccatagccgcctctccgacctccctcctttttccctgaatctcgccgagaagattgctgctcggccacagctgtggcatcccggcccagggcttaatagaattaatagaatactcatatcaacaagttgcaacttcttttccggaagccagtctcgaaagaactctgaggttaagcgtccttggtgaatttcccgggtgcgcacgagtgaggacaaagtgtgcagaaaagacatgtgttggtctgtgagggcagtctatgacctatgaaagctatcagatgtaagcgggcccggcctaggagaggcgggacgttacaaagtggtatcagagctgactctcgcggtttcacgggcacgtgtgtcgcagttgcgcaggcatggtgcgcatggctggtgtggacctggagtggtcacacagcatggcacatgcgctggcactagacacacggacgtggccaagaggggacgttcctggcctgaggttgatcgacgaggacgttgatctttcttaagggggtgaggatgtggcatcccggcccagggcttaataggattaatagaatactcatatcaacaagttggaacttttttctggaagccgatctcgaaagaactctgaggttaagcgtgcttggcctggagcaatttcgagatgggtgaccgatcgggaaattctttccgggtgcgtacgagtgaggacaaagtgtgcagaaaagacatgtgttggtttgcggcggtgttggcggcggagctcgacgtcgaccctgccaaggtggtggtcgggagggcgcgaacgacggagccgcaggagggcaattttggatgacgaatccggaattcctcgtcccgttcgccggcgagggcacgacgcgtctaggtcacgcgctccacggcgcacagaaccttgccgcgcgtggactcactgcgagtaagaatcgcgcggctctgctaaggggcgaggagctcaattggagcgcgcgaccttgctccatgcaagcgcaaagccgagccggcgatgcgaagtaacgctccacgtcaccggactgtgagaggccttattcacctctctgtaagtacatctacgcaacctctttaattagcactaaactatagaacgtgaggttttgctgcatttgtttaccatttccttgggtggccaaacgtggcagcaaatgtgttgaggaaacagcagcgaagctgatacagtatctaaacacatgacaaaaagtcaggaaaaaaaaaaccatacgcgaggtcgcaaagtgtggctagcggacgccgtagctcgccaaatggctagcagcacccagtttgaaaggccagattcgtgcaacagcagcatgtgtcacccggtccaaaaacgatatattatcccctttctctcgacgtgctgtgatgtttgctggaacagagccatgccaaagatatatcatgaaagaggtgaacggtgacaggtcatcttttgatctgattccatttcgcctaaaatcttctctggtcatggccattatttgcttgtgcatgcagcacagaactacaaaaacgatctctgttccaccaccagtgagatcaacatcacgacgcatgtgcggcgtgctgaaactactagcagcagctattatagataaatcagcttcatacgcaacgccgctggcgttgacgcgttgatgtacgtaggctgtttttagttccacgttaaaattaaaagtttaaagcaattagaacgatgtaaggaaaagtaaaaaatttacgtgtgtaggaaaattcgatgggatagaaaagttaaaagtttaaaaaaaaaagttaaaatctaaacaggacgtatgtgacttctatatgaacttgcgaaggatcgaccatgtcatcttacggatttagggatatgtccattgtccgtgtaaattaaatcgggctcgggcgagacgaccgtgtctgcacgcgtgaatcacgacaaggaccctgctttacgggcaccaacggagctctgctttgcatcttttgtagccttcgtcctcacgcgcaaatggtattacctccatcccaaaataagtatagccgtggatatccgtgtctaacgtttgaccgtccgtcttatttaaaaaatttgtaaaaaatttaaaaatatttagtcacacataaaatactatttatgttttatcatctaatagcaataaaaatactaatcataaaaaatttcaaataaaatgaatggtcaaacgttgaacgtgaatagcgcaaaactgcacttattttatggaggagggagtatatgccaagctattatataatgccgacgtgtcgtgttaagggtctaggatattgttcacttggacaatcacaaacgtgccgtatgctgctattagcctataccacgtaggcaatgtatcctatataaaaaaaagagtactattagaagataacgacaatgcagaattgcagagccccatcgcttgatgagagtgttaatacgttctagattaatgagggtcgataatgggtgtcgtacatctgctagtttccttttttttttttcaacacttgtgctagtttgctcaagttccgcagaacctatcgatttaccgaaatatccaatcatgctatcagctatggatgtataaacgccaaaacacggcgagcactagggggtgaaaacggtacggaaactttctgaattccggacctatttttgaaaacggaatatgtcggtcggaatttttcggaaacggaatcaaattcgaaaatattttctcggaaacggaatcataaatgataaggacagtttccgtcggagctcgaaatcggtcggaaactttccgaaaattttctcggaattaccagaaattttgtgacggaaataccctgcattctctttttaagcactgaatagtaaataccatggtgtttgtctgttattttaaaaaaataatatttgttatgtaaatctaaaattacataagaatattttttttgtcatgcattgggatttatcaacaacataaatcttttaaatatagataatttattcaattggatttatcagtttgagggattttttattccgataaattttcgttaccgtattcgcgccggttcgttttcgctccattttcggtttcgataatattcgattccgttttcgtatctgaggtttccaattccgaacccgaaaagaatatgaaaacaaaaacgataaagatagtttccgcctgtttccgtaccgttttcacccctagcgagcacaggtcgtgcgcccaagcactatactaatagtactggtactatgcagccatggtaggatgtagtactgtatagtataaattgagccaaaccttacgggaaactgttttaaatactcaagtggacgtccacctgtttcttgtatgtcatctaaatggttataaaaaaattgacatgatagattaatatataatatatcacttcaaaaacatgcaagttcaaattcgatttctacaagttgtaacaaaaataacaaatttaactgtgaatattagagtttaatttgttatttttgttataatttatagaagctgaatttgaacttgcatatttgtgaggtggtatattacacattaatctatcttcttgttttttttttgaaaattttttataattatttacttgacatgcaagaaaacgattagacgtccatccaaaatattaaaattcatcttccaaaccttacacgtatacaagaccacaagtcgcgcaagcaaaaaaagtcaggcgcgacctaaccacatttttttttccagccgggaatctgttctccggtggcctgaaaagcagcccccggataagcaaccttcctttgcccagaaagtcgcgggccgcatagcccgattgattgattgatggccgcatcaacaatccaacccaaccaataaagcggtagcctgccacacgcacgcactagcgcatggaccatactactgtagtacgggtcgccggaagacgacgccgacgtccggtccggctcggcctcgcgtttcttccacgtcttacgagttagtactccctccgtcatttttacttgcaatgtttgaccactcttcttatttaaaaatttttaaaattattatttattttatttatgacttactttattatctacataattttaagcacaacttttcgttttttatatttacaaaaaaaaattaaataagacaagtggtcaaacgttgcaagcaaaaactcaaaatcccttatattgtgagacggagggagtacttcattggtcccatacaaaattaaccgataatcagatatgatatattctaatattatatatctaaacatataggagcacacatttaaattatagtgttatgatatgttctaatatttgaagtcatctacctataaatataagatatgtaatatacttatattttgatatgtgaagtcatctacctttttcgttttaaaatattgctatctaggataggagagtaacattttgggacggagaaagtagctaacaggatctgtttccatccggacccatcagtccatcacaccattgatcatccgattccgtccacccaggacgggagtaggagaaatagcggaaagcgaggcagcgcgccaggaaaaatacggccaaattgatcccagcttctgttcccacagagaaaacaggcagggggtgacgggtgaccagtgacttaacgaacagttttgttctttgttgtatcaacatgagtatagtagtactccttatcaacagtctgctgggctaaaaactcgcaagaattgtcctctacaacgtgttttgtttttgtcgagtgtattggaagtgcagtgaaatcaaggcggtctgaagtgcaggagtggtactctgtggtactgacaggagcctactaggacatggtccgtcctatattaaattaatctaatacgagataaaacaaactccatataatagtgttataaatctaaacaaacatctattcatatttatagtactaacatatacattatgttccacattaagttaatctactaagtgatgtaacgtattgtattactataaatctaaaagacatatgtgtactagtaaggtatattatatcctacaatagattaatttaactcgcaacgaagaaagtacttccttcgtgaaaaaaaaaactaagattagatgtagacatattctagtagactagtacaataaatctagacaaaatctcaacgaattcggataaaatcctagtacaatgaatatgaataaaatgggagctaggatatttcacatctaattctagatttgttttagtatatcacatttagtcttaagtttgttttatgagtaaatttcataaaactacatatactttgcacaatctatcgcaaaactatagattttagaactagtttcacaaaactacagatttaatgtctttgtttatcacaaaactacatgtactttaaacaatatatcacaaaactacatatttaataacttatttcacaaaactacatgtttaatatcttcatttatcacaaaactacagatttagtgtctccattctcacaaaactacacattttaacaatgctaaaacatgtagttttgtgagaatggagaaactaaatctgtacttttgtgataaatgaaaatactaaatgtgtagcactgtgataaacgaatacactaaatctatatttttgtgaaacaagttcttaaatctgtagttttgtgatagattgtacaaagtacatgtagttttgtgataaacgaagatactaaatctgtagttttgtaaaacagaatattaaatctatagttttatgataaattgtacaaaatacatgtagtttatgaaatttactcttgttttattaatggagggagtaggagcgaactcaagtcttctcacatctattgtatccggtcgacgattataaatgttggagtctagcggtaggtgcactatgcactgtgcactgtgctgcgatggttgggccgcggtgcactgttctgcacaatgttaagcgtcaaatctggtcccggctccacctttatcgagcaaacagagcaaggacagctcaagtcacaacaactcaacaaagcgtcgactgtgcgagtccaccagcgatactcctagtcgatagatacagcggtacaacctcagctttgtttggccgagctctagtgccacagtagtactggcggtgtgctggctcgtcagtgtgaccaaacatcgatatgctcttcaaaccgctacttcttccgttctaaaatattataatttttagataaatagaacatatcataatactataaatttaaatagaagatctcatgttctattcagattctaatactataaatttaaatagaagatctcccattctattcagattcgaatttagatagaagatctctcgtttcgttctattcagattcgtagtgctatgatattttatatttaactaaaagttattatattttgagatggtgtattcaccagcgtcgtcgtaccatcagcccacgtgacgctattctttgatagtgtgacgcattcagagatgcgagatgggcagtgcagcagcatggcatacacatgaaaatccacactggtcaggacgagccgacgaccagatgcactggcatgcaacgcatgcactcgtgcgatcgtgccagtgtgtagtaagatgaatctaaggcgtaatttttcacgtgccgaaaacggctgaacagctcgtgctgccggcattggcgaaccatagagttactatacttgtagtagtacagctcacactttccgatcgatcgaccagagcgaatgaacctcgtcgatcacgggctcacggcacccacggccacgtcttttccttgctgataagcgaggtctcgttgcaatgtctcgtgatctcgtcgctatcgccgcaaccccaacgtcggattgggtttcggttgcaccgctgaacaactgctactcccatgtttttttcttctcttctctgcttttaattgagggtacgacgagttcaaaatccctgtagctggcaataacgtcgtaggctaacaaccctattagacgagtttaaagaagggttcagacttttcaaatcgatggaaactttggaggctagtgtaggccgtaggtgctacgggtgtgtcatgttcgtcaagtgtggtcctcatgatacagtaccccgatagtgcaatcaaaatgtttctttttttaagatgacaatcaatgagttcctttatctacagattgcagatgccctttagggtctgtttatttggtgaaataaaaatttttgagtattacattggacgtttgactggatattgcaaggggttttcggacacgaatgaaaaaactaatttcataactcgtctggaaaccgcgagacgaatattcttagtctaattaagccatcattagcacatgttagttactgtaacacttatagttaatcatggactaattaggctcaaaagatccatctcgtgatttatatgtaatctgggcaattgattttttttatttatatttaatattacatacgtgtgttgaaagatttgatgtaatgtttttgtgaaaagttgttaggaactaaacaggtacagggctacttgagttcagaaaacaaactgttttattgtaggagtacagggtgatgaactagatcaatgccgacttcggtgtagccgtagattttctgcgcttggccaggagtattcacttttttctggcattgtgaactcgcaacagtagttttggttgcctcttgccgatctcagatgacctcatggtaaaattcggtgctatttaggcacgcacacacagaaaggaaaaaaaaaagaggccatcgccacagtgggcctatattatgagatggactgaaaaggagtctgtaattgggccttatttaccacattggctcggcctcagtagcgagtttaccaatgggccttttgtcatgagtaggccttaacatggactcactggaccttaatagtgagtttcctgtgctcgatttcggaatttgcgctgggctgtgcgccgaatagtagagagcttaccgttttcagcttttggcacctgcttagcttgtgcgtttgcatctgcctgtacttcgttgatctatctgttcatttcatttgtattgtcgtgccgtgccagccagctagtttttgcatttccgggaagctgataatggcatccatcgacgcgcatactcctcctgggcatccagacggattagagtaaacaaacagacgcgcaaaatagcgcgttaccaggagacagctgctttcttttctctttaattgagatgcgcgccagtccgttcttctttgtgtactgtcaaccagccggatccaagtgtccacactccatcctcgcgcaggcacagctcatgccaacctcacagcgtcacatgtcctgctttccaggcaagctggtagccaaccaagccagaccgttttccccggttcattttttaataataagttcatctattaaatgtgatttaggctctgtttagttgctctaaaatagcgaaagttttgttgttgtttagcactttttgtcaaaatggaactaaacactagtagcaaaaattggtaatttgacatttgtcattttgaagtctagagtagcaaattttgcaaaaaatatattgggagccatgctctctctataggcctgtttactttgatgaaaaaaaacctcaccaaattttggctttttggcaacttgccaaaattttggtaggatttcttatatagttaccaaaatttagcagcaaactaaatgtagccacttttttagcaactttaccaaaatttattaagattgaaaatgacatcaaagtgaacaggccctatctttactagtaaaacgcaaaactttaatatacatctaaataccaactagaaaaactttaatgccaaatcttttgccaccaaattttttgcaaaaaaaattgccacggtaaattgatctaaacataaccatattttaaagataaggaagtagaaaaatctccgaccacaccgaccatactttttcttcgccatccgtaattccggtttcttctgcgcaacaccaatgcgagaagagtacggcgatagaagcaaaatggcactgttccaatacctgcaccgagtaattcttccaacaaaacgcatttatgtttctccattgaaagagagcctgcagatttttctactcgtacgcgggtttgaaggatcgatcacatggcggatggcgggagtacggcacaacacttgttcgccggcccggccgtcacggctcgcaacgcgggccatctgtcagcacagcacgggactgttcaatttgatgaaaaaaaaattattaatttttggcattgacaaaattttggtaacttcctaaaatttttggtaggatttttttatagttagtaaaatttgacagtaaactaaatgtagctttttttttataactttactattttggtaagattaaaaatagcatattagcaccacgtctcgcccgttgtaaacaactccaaaaccgacctccgcaacggctagtagccggacggcccagcacgtcgcccgagggccgcattttatcgtgatccatcacacacgtccatggacaatccgacggcgaggcactcgtccacctgtccatcttggaactagtcgttggatgattacctggtaaaacaaccgcttctccctcccggcgacgcggtgccgctgcacgaagggtcaacatagccggcgccgctctcgcgacgaaggtggtcggtgccagccggacccaacccactgacgtgttggtcccactcgacgtggcccccacgtgtcggcgaccgttgccgttgcgacttcgtcacgacttcaataggctacagctgttgcttaaccgacatggtggtatactagcctttcggctataaaaacctggaccctcccattgttttcgccacacagttcatcggcatcttctcacactctagctcacagcttcgcggtttccacgcacttgaaaactcacgtttccaagccggaaaaccatggctcgcttcgccgtagtcgccgccatcgtcgccctcctcgcggtcacggccgccgcgcaggccccgggagcggcccccgtcccggcgcccaagatggccccgctgcccgctcccccggcgaggtccccggccaccgcccccgcgccggtcgccaccccgcccaccgccgcgtcgccgtcccccatggcgtctccaccggccccgcccactgacgcccccgccgccaatgccccctccgccgtcaccccgtccgcggtcaccccctcctccgtctccgccccgaccggcgcccccgctgcctcctccacgtacaccgccaccgccagcttcgttgccgtcgccggcgcggtcgccgccgccatcgtgttctagatggatggatggatgatttgatcgacgcgttgtttatacggcgagattcttttttgtgattctgttctatttacagacagcgagacactgatattcagatgtttacacttgtcatgtttgatgagatgattatcgatggaatatattctttcatttattattaccatacatggagtattgtgcaatttttttccattttcttatattatctgtatcgctcacgcgtaaactattactgccgatctgatcgggccaacctacaagagtggctgtcacatgcatgatagtctagatagctttttttccctttgctttaccgatgtccgatgccgtgacatgtgagtgagacaacagctttcgcttgttcagaatgcacgtgaagcggctttgttgcatatgcctagtaagggtgtgtttacttcacgctaaaattataagtttagttgaaattaaaatgatatgcgtagtaagggtgtgtttacttcacgctaaaattgtaagtttaatgtgatgaaaatgttggaagtttaaagaaaaattttggaactaaactcagtctaaatcttgaacgcgctttttctttcatgtaaagttggataaaatccgtaggcaccgttagaaaataggcaaaatttgctacagaacatcgaaagattgcggtttttgctgtgagacactcgaaaatcgtgtatttgtttatgaacacttaaaagggtgttaattagctgctggacactactcctattaaactttgtttaaagacaaatttgcccgtgggcccacttgtcaatctctctttctctgttgttcttcttcgtctctttctctctgttcatctcttcctcagttcctctctttctctgtcgcggcacaccgggcagagctccacggcgaaggtgtgccagcgaggacgacgaggcggcgacgacgcgggcgggccacggcgaggtgacgaggtcgacgaggcgagcggcgtgggagcgcgatgcgaagaagtcaagcccgccgccgccgccgcccagccgtcctagcgatgcgccgccaccaccgccccgccgtggcccagccgtcccggtgatgcgccgccgccgcccccggcgatgcaccgccgccgccgcccggccgtggcccagccgtcccggctcaggccagccgtcgtcgccccaaagaagaagaagaagaagggaaaagaaaagaagtgagaggaagtgtaagtgggtattttggtacttacacaactctctctcttcattttaaccggaaataataaaataatgtgaggagtgttcagcagctaattatcacttttttacagtgtccacgagcaaatacatgatcttcgggtgtctcacagtaaaaaccgcaatctttcagtgtccaatagcaaattttgcctagaaaatacggtacactaattaccttaaccaaatttggatggctcgctatacggaaacgctgcaagttgaacaccagacgagatggtgccgtgtgagacactgagagagtctgagaacgtcactgcgtcaagaagagagagttgggggaaacgggtggttgagtgtggacagtctaaagttcgtttgagtttaaagaggcccaactaagtagtactgggccgggaaaagatgagggtagaacacgaggagtttgtatgggccaggacggaagatccaattcaagttcaatccaggcctagaagtaaaccgcttgtttcactttttatttatttttttcttttggtttggtttgaggtttgacatacgagtaacttgcaacatgtcaatatcagcaaattagcgctgatgcatggaatattacctgaacaatacacccttcgttctcaaatatggtaactatcatcgtagaataaatgtagtcaaaacgtaaacttccaactcttagtatacgcaaaagatttgctccccttaacaagcgaaatcattcattcttttttttttcttttttaagaacactgacgcacacaatcaatcaatcaacttgtctactccagatggttcacatgccgtcattatagcacagtgtaaaatttggaattttgccagccacttcttccactccatcccagcaatttgcttgacggggggagcacatataatgttcgcaaggaacctcctccccttcagactgatcgatagaaacaaagcagggttagctttcaaggcatcgatgcatcagctcagcacgaaagttctcacaagttgtgggtgccaattaagctagccggtacactgtattactgtgatgtgaaaatagctggaaagtttaatttccaggtgaatcaaattgtttcctggcctcgcttctccgcggtgaaagtgagctgcttactaatctgatgtggaaacaaccacaacttggccgtgtgatgcagtgcacctgtgcttgaacagcttgatgccgttttgctgctacttggctagatcaagacatagttgtacaggtgcgcaagagctgatctacacaaactacaaagccaatcatcggtaagctgccgggccacttgtctgagtactcccatcagctgttaggccccaggttccggcaacgacctgctggctaaaacggggcatcgcacggcttaatcctcatctttctcaacagcttacacacgacactgacgtggccacgtacagctagcacctcgcagtcaagtttgtatacgactacttaatcctcatccttctcgagtgccttattgaagctactctgaatatactgcatccgagttttccaacgtacttgagcagaaccagtcattgcattgttaatagacagtatatttcggtagatctatatcgtcaatagaaggttgatatgaattaccagtcgaagaattttgctcagaattttgtccgattggtgtaccggagaaataagatgtactccctctatctaaaaacaaatttggatagatatttatccaggttcatagtattagttaattagtattaggatgtgtcttatttcattttacatttacattacgtgggacggagagagtacgtagcagtacttatattgtgaggagaaacgtggggtgcataataggaggctcactgacagtctgaaacttactcaagtattacgagaggaagaaaaaatggttcattctttttctgaaatccacgtacatgggaacagccagttagtaacaagtccgatcaaacgcccattggacatcaagaattcatggagtcctagattatacggtagtaacagaacttatgtccttcgggtcaatggaatctctagtctctgccgcagatcactcatgttgtctctgtaggctagtgcaccctgagagcaagattgtctgaagagcattatgtactcctgcgaccaaaccgcagaaccaaacacacatgaggattatttactgtttatcacgagaaaagaagcagctcatcacatcatcgggcaatcattcggcctctgcactgcatggatgccacgctgttcgaccagtcatatatagctcctgacagatgcactctaaagcagagaaagcagagttcatgtgaaccgaaacagagatggatgcatgcaaatgggccacaggtctttttaggacacaaagccgtatacctcaaatgctaatcaaatgagtgattgcacggttctttttttatcaagagttatcacaattttcgatgttattttatagtacctctacgctagaaaatatagtatctcttggtacatcataaaggacagttcaagatttgtaaccaattagtttcaagaaacttagaaaaaaatgtacgtgatatatctcaaagaaattaaatccaaaatcaatctatacgttgaataaagcaatcggctattggtagcgtatgtgattttttccccttttgtgaatgagtagattcagatttacacttgaaaattcatgactttaggtattgcactaatgctgtcaattttgccttctggatttctcataactattttcatgatattttcgtttctaattaagatctagattctaccttagtttttgttagcatgattttcaaaaccgttaaacgagacgttttgtgttaaaactttctatataatagttactttaaaatatcaaataaacctatttttttatttataataattaaaactcaattaattatgtgttaatggttttaccctcatcagttaagaacaccatcgcccaagggctccttcagaacacaaaaatttcgatatatcattagtgtatagcctatgaaaaacccttgaagtccctccatttcaaagaaggcgtaaggttttagagtcaccctccttttatgcaaatggcaagtagtactcccttttttaatatataacgtcattgattttttaaaatacgtttaaccattcgtcttatttaaaaatatatatataattatcatttattttattgtgacttgatttataatcatcaaatattctttaaccataacttagattttttatatttgtaaaaaaagacaagtaatcaaatatttgttaaaaaatcaatgacgtaatatattttaaaaaagaaggtagcagttaagcaagaggtactagtgcacaacacctccatcaagacaaaagtggtcatcgtacgtacgtttacaagagctcaaaatgttggtatagatttctcattaaggtcgccggagatactgcatgcatgcagcactctgttggctagggtacaatcacattcacacattacaagctaacaagctatcgatcgaggcgccatggttccatttccaggacggacgaggcagaggcttcacatggcggccgtctcggttgtcgtctccatcgatcgcggcgtcagctgatggagaggacggcctcctgctgctgaatgctgcccaggatctgatgcacagcggtggcaatgtcttccacagagcccagcttggaatcatcctccacctaacatccaaacgaaagcgatgacattatcatcggcgttgtagaaaaatgggagcgaatcttcgctcacccgcgacgttccaatcgcttaatttgtctgtgctgctagcctaaactaactaagcatgcagtcgtggtagtaaaataggtgcaaattgtcgattggtttttaccttgaggctgaaggagtagaggaccatggcgtcgacggtggtcacgttgagatgcagcggcgggatgcgcagctgctgcagcccgacgaccagcttcagcagctgcttcggtcgccgccgcgcgagcaccttgaggctcgcgtgcccttccaccatggtcacctcgatgtcggcgatggccgccgactgccggccgctctccgcggagcccgccgtgtcgtccatgacgacgctgctcgcactgccggagctcccggcgctggcggcggcgctgcagccagtgcgaggcgacgtggagtactgtgggaagctgaagaagccggcgaaaggggaatcgccggcggcgtccatggcgccgctgcggttcttgaggctcttttggacttccagcgactgcagtagctgctccagctccttcacgtagttgattgctcctccgacgatcgatgcttgatcaccctgagcagaaaatggattcgatttaatgatgattaacgaatcataacagtatgcgtaaaagcgattaattgaagcatgcgtagttagtgttgtaccctctgcgagtaggacgccggcatgagggagcggagcacggcgaggtactcgttcatctggcggcggcggttgcgctcgacggcaatgtgggtcatccgctggcactcgatctcctccttgttcttgacgaccttcgtccgcctccgtttcctcctcccggcggccaccggctccgcccgctccgccgccgccgccttgccctccgtggaagcatccgagttatccttggatgccacctcccactcatccacggaggcgacctgcagctggtcatcccactcgtccactccgtaaaactcaccgaagccgccgccgccgccggcagcagccaggacgtcgcaccacggcatcccgtacgccggcgagtcccttccgcacccgtagccgaaatggccctgcggaaacaccacggcctctaacgccatcctgcacgcacccggcaaaacgaacgggcgttttttttcgcgaactgacgacgccacgatacgatacgcacacgattcagggggaggcgaattaaagagtgagttgcccagcgacgcgaggggcgccgccgtttttataaggggacgcgcgaggtgtgtggccgagagaggcgcgcgcgcgcgcggtgcggggcaagttgcagtggtgcacgcatgcattgcgcgcggggggaggggggccacgtacgctacgcgcgaggggcgaggcggccttttgcgcgagggggacgggaagggaaaacgcaatgatttacacggagagcggaagcaaagcaagatgacgcgcgcgcgcgggggcacgggcacgcacgcgggcggggcgcgatctgcttgcttgctgcggagccgtggggacggggctcggcacgcgggcgcgcgggcgatcgatcgggtggcgcggcttgtttgatgcggtaacgcggcctgcaagaggggtggcaacttggcgaagaacgcgcggcgcggcgcgcgcacccggtcgggagaggcgtacgtcgcacaggcgcgaattggaacggcgggccggttgctcagatcgagagattctggcattctgcgctgcacggtgatcggagggggcgtggcaaacaagcgacacgtacaggtcatcttgtgcagccatgagtcgatctgaattttctgattactcactgcgtccgttgatttttactgttcacatatatttcgtacatttctgcttgattgttggactcgtaattggagaattctgcttgtgatcgtctttcactacagtgtttgcatgcatgtggctttcatccgcctacaaaggtgatctggcttgatctactgtcttgtatgtttcaatcggcatcaaatttacgattaccctcttgtacaagtatgtctacttgtctgtatcacccgtcgctttccttggaaagaagcttcactgagtttgcaaagaatcggctatgatatgtcacttctctaaaggaatatgtttaggtgtactacaagtagtacaaatttgtgtagtgtgattattttacagctgattggcgcataaaatctgtgagatgggatcatcctgagtccgacgtaggaaattacacaacgtaacaaagattaaggcactaatgctaaatcttggcacattaaatttaatactccctccattttagattataaatcgttttgatttaagtcaaagtcaaattacttcaaattaaaccaaatttttagataaatatattaatgtttacaacactaaattagttttgttaaatctataattgaatatattttcataatatatttgtgttgggtagaaaatgttgttactttttttaaaaaacttagtcaaacttaaagcaatttgactttaacaaaacgacttataatttgaaacagagggagtatgatagatcatatgcgacatgtcacaccttaaacatataggtttaaattcaacctatataaggggaacaaaaataacaaatatatgactcaggatcgtactattcacatttacccctatcacatattctaacttcaagtactccaactgtaactaaatataattagtatattcaacacgtattacgtattctaaccgatagtatagacattttcctaataatcatatattattatcagggttgtactgaaagatgagacattatgactagatagttagccgtgaggatgaggattcggcacgataagtttcaacttctatgtacgcttgtgatgtacagatatactctcgttgaagtgttggggtccatgccacgtacgctagggagctcacattcatcgatctaggcacagttcgtgatggtgttcgccaaagcatggctcaacttgcgccccatcatgtctaaccccaacaaaaatagccgcatcagcaacagtaaaaacgaaagcgaaagatgcattcatgcacaaagtttttcttattcggtatcattttcgatctgttcgtttctaacttttgtctaacggcagctaggcagggagaacttgaggaccataacctctgtggtatgccacagtttcatgcacaaagctgaacaaccgttggcatctttttgggacgggtgttttgcatataaaaattcagtaacacgtacttctctgtaagtagtatttttgtttttccaggaagaacgtgttaacctgtttccaaaagacagtagaaagacgtacggcacacaggttccattggaatccccaacaagattgaaaaagaacagttggcagtgcatatactaatcacatagttgatcagtctatggacgacgacaagtactttagactgtttatcacagatgctggagaataagaacaaatgttcccttgcaatttgtaaattattgacctcatggacacgttagatcaagcccatgaaagaactgaaaccgctctccaaatatattgccggaagctagttcaaaccaggggcagaacaccggattggcctgaagaaagcattttgttctgttcttcaggtatactgcactgaagcattattatttctgctgtgtcacgcttggaatgtaatgagacctttcttaattataagtacctaaaacaatttgttcaattcacatcagtttctggatgcagttgtggcgatgctaaaagaactccattatctctcgggtacgtggtgtgccctggagatgctgaaagcttagcctggatgctttccccgggagaatctgctcagatcgagactgaaatgcttacaatgacgcaaccgtacggcaaccaggcattttcttttgcttcagttttccttgatgaaactatatgacgccaatgctttgttctttttgcatgaatttgattgctgccaatgctgataaagctggctggctagcaataactggcaagcactctcctatgtctatcagagtttcagagtaggataaagacccaaaatgttattcagtgacagcttaacatttctcggataaaatctcatactacagctggtgataagaacattcctacgcgtaatttacctggtcgtctttggttctgaacgtaacatcaatggtctccttttacgtagtataaaactagaaattatgattggtgaaaagatacgaatccgtgtcaataaatcagagcgtccaagtggctgtagtacaaaattatatttcacatagtcatctagaatgaagccatttctgaccgatcgagtgttactactatacgataacatatcaaataaatggtgctaaaattaaacaaaccaccatcgtactactcgacttgacatactatatcttctcaaaattttctgatgtgtatagtagtccatagacaaaatctggaagagtgattatccggtattatacaccagttttatgagtggtaaaataataatttattaatataatgattagtaaattatcaagtgcatctcaaggatgtaatatgtgaaaatagaattaattaatacagttgtcacaaaatactttcatatggttatattaatacacgagagaactaggactgggcatttacaattagattaaatctgaaccgcaaattacaaaaattatcgtataaaattttctatcaaattttcaacattgcctttattaatttatactgctagtatataccggtactagtatattataccgtaaaagttatgatcggctagatctagattagagttttctatatacacattgtacttcatataatctggatatagtttaggtatatgcatacaaacaaaatatatggatattatcttgcgggaggcacgaacctgtacgtaaaacctctatgcacacacatggttttacgaattcttatctttacacaaacgatctcagatatacttaactattgccaattatctaatgaaacgaagatatacccaaatcttttttgtgtatctaattgttcatgcaatgttccagaaatcgtgcgacacctagtttgttgtttagcatgtacaaaatgtcaattcggtcgtgcagctcctacgttataggtaggcgctaattaatactatatccttaacgtaatcctcggcaatcttgttccattctgcccatgccctattatgcaccaaaccataccgttctctcgaaacaaaggcaaaacagctgtgttagctgagctctcttgacatatagcatcatttctccagttcaaaggtgaggaagaaaaccatatacctgctgcagtatgcgccgcattaccagacgcagcacgacgacatgctcgaacaatattgttaatcagtgcaaatcttggagagatccggtgtgggggattaatttggacggacaagtaggtaaccgaggatttggtttggtgatggtcttttttgcaagtgtgaattgcgaagtttggaagcattgctaaccgctgccgtctcgggtcagcgtcctacgtactcccggggtcctctctgcccttaaaataaatggattttgcaacgcttcctttgggaagtccctagcaagtttgttaattgcaacctttttcgttcagagacttaagtttatttgcaacttggtcacttggtcaggtaaatgctttcgatgtacttgcacatttcaaagattcttcctatagctttcgcccggaggaccccgggcatagtgttgtgccaaattccaagatcgacaccggattcttgaaaaggtatgcccagttacaaagtacaaatatacatacaacaaactgaccaagatagtgtcacaaagtggttggtagaacaagtgaacaatcctcaaccattcatgtagtatgttacacatcctctcaccttatttaaaaaatataactggacataaattaatctactggtgggtctgcatgcattctgttgtttacggtgacaatgaagaggctgtaagatgttaatacgactcttctcgcttggatcaggcagtgctataggctgggaatgctgccatcacaggccagctgcagctaagcaaccaaatctgaatcatctaattagaagtcatgcaacagacaagctaactaagctagttcactaaatgataatccagtagatatagcagaagtagcagattattaaggccatctaactacagaagattggtttgttaactgcaaccgatgtcggcacgggaatcataccataatctatagctcggcctgcaggcatgcataaaaccaaatgctactagagaatttgtcttggccatggaggattgagttggtacatcagggaatctatcttattcttacccctagtcaagctcctaacacttcgaaccttgtaaagtatggtactaaaatagaaccaatagtgttcgatcatgcatgtgtgtgcgcatgtttgtctcctgctacctccaatgtgtggctggcaatgcatggtacagtctccgttatgtcagcatggcgccaattgaccgggcagtggtatttttctactggcgagcccgtgtttttttttatgccttgtgcaaatctcgacggctgtgatttaaagctcggttcgtgtacggagtacgtacgtggtcgtcagatactcgcgtcgtcacaacagagtcacagatatactactctttctgatgtgtaatttcgtgcagcgttcggacacacaccggtcacaaaatggcagagcaaaaggaccctgcctctctgccggaatctagccaacgtgacgaacagtgacgcccacagagttccgctgaccccgccgtacaaggagcagtggagcactggcgaccagggtttaccttatcgtttgggccgagattaccaccaccccgcggtagtgcgataaccacgataatcgcgtgataatcgtctaaaatcgcacaaaaatcacatccaaaaattcgaactcaaaactcggtggtttcgcggtttcaccacgataatcgcacggtttaccgcgataactgcggtattcgcacggttatcgcgggctatgtaactgaaatcatataaatgcaaaataaataggggaaaaaaataaaaaatacggttgaatatatgtagaaaactagaaattgagaataattggaagaatatgtaggatacttaaggcccaatattctctttccttttccaatttgtaaactattctcggtttgccctcaaatttgaatatagcttactctgttcaaaaaaattcttcaccattgataattacaaatcaagaactacttacatgattttttttttaatttttttcaattttttttattttttccgggattttaaatttagtcaaaattcatccaaaccatatcgtcgatttctcctaccgtaccccacaataagcacgataaccgcgataatcgcgtgattatcgtgcgataagtgaaacctgctcgcgactcgcgactcgcgcgagaaacgaatcgctctccggcatcgaccgtaatttggttaccgcacaacacgtcctcgcgctgccacgcgcacgcgggggcccctacgtacgcggccttggggcctggcctctctgcggccgcgcgggcgtgtgcgtgggcgtgtgcgtggtcggtcgctatgcctaggcgcgcgcctcatcacacgacacgcgggatcgcgcggttttatacggcggcttggctcatcgcatcgtcctgctgctgcgggcggcttccgcacatgccatgggctatattacgccgcgaataccactttcccgacctcctgtttcgtgtccgcggtttgcagctgcgcctcagctcctgcgcgcgcggcccagcgtgccgggcgcagagcatcgatcggaaacttggttttggatcggtctacagactactacaggagagtggatgcgtggccggtgtcaattaaggaccctctggtctggacggagaagtgtccgctacaacttccacaccgatatggagccagatgcagatcgagttgcaggttatgcagcgtggcactggcagcgtcaggttattcgagccagccgaatcatgagggttactgaattgaataatgaacgcgatcgagccggtgtgtgtgtgtgtgaggcgccgaccggtacgtcgcgtcatgcaagcgatcgatcgatcgtatgtcgtggtcgccgtcgtcaatcatgcgatgggtgcaatggagtagtaaaaaagacacaaggaacgcaccaacgtttcgggtcagtttccaccttggaatgattcgtgtcataatctgtacgacgtaggagtacgcaggtcgtcgtgcccgtcgcttcaaacatcaggcattggccttatatcacaccacttgtgctacctaggacacgacagagccgcgtcgttcgatgattgttcgtcccggcatggctagctgagctctgtgtgaactgtgatcgatcccatcatggtccatggctatgcacgcaatgcaactagtaggtcgcacatacatacatgattcgtgcagggatattgctctcatacacagcgcgaccgtggtgatcctttcttgtgttctgcgaaagtgcttatgtgcagtggactcgtgaaacgcatttacactgcatattcgtggtttctcgcagtaaggttattctgttatggcacgaaaccaatcggcatttcgtggcgtgttccactatgtttcatatatacatgcatcaagatctctatcactataaagtcagaaacgaacttgatcattggacacaatttggaacgcagcggcttgttctccggttagaaatgctaggcattcaaggaggtacacggcgtgatggcgttacaagtttaggcccatttgcccggtgaactctgcatagtaagcatcagcttgatcagatttattagcagcgattggtttccacctagcagttaaatatggctgtcacaactcacacgcggcaatatccctactgttatttggaatttttttagataatggaataattgttatttggaataaatctattttgcttctatctcttgcacccattttaatcatctatcttaactacaaaatcgggtataacgcatttgtcatcttcaaaaaccggtgtaaactaactccttcagtagtttaggaactggcttttcactgaaccagcaagtaggacctacatgttagcgactcttctatctatccttcctttctcttttttcttttccatctatcccctaaggctggtggcacaaatcctctatcccgcatcgtccctacgcccgagggcccaggccgaggtcaccgacaatctggctatgagctactgtgatggcagcagatcggtgacggagcaacccaagctgctatgaaggagaagcaaggcagcggatgggatagaatactttccctaccgccctcagggagagatgaaaaaaaaggagagatgagacttgagagtcctagacgtgcgggtctacatgcttacttagcgggtcaacgatggtcaacgtgtcacatcgttaaaaaccacttcctaaacatcaaaaaagtcgatttgcaacggtttgctaagatgaggaagacgattcaatcaagagcaaaatatgagggaggccaaatagtttttttagaaaaaaaaacttggcaaaaaataggttattccctgttcttttgttaacagtttttatgctcaggccgaaggagttgtcataatgtgcacagaatgcgtgggcctttacttcatctaaatatttgcgccagtcaatacagaggcccattactgctaaacttctcctacttctgtaacctgatggtataaagcaggccggacactcgatatttccaggaataagttcactataactccctgaaatgaacacggaaaactaaattgtatccctcatccgcagtaccagacccacaaactgtcaaaaccggtataatttgactcccttagtggttttgtaggacggtttcactaacgtgacgcacacgtggcagtgttgtcttggtcttcgtcccacgtggcattgatgtggcgcttttgtggcattaaaattaaaaaatacatgcggggcccatttgtcattcacacaaaaaaaattatgggtcccacatgttatcttctctctcactacccttttttcttcctcctctctcccatctctctttctctctctcgcctttccctcctgagctcctcatgcatggctgcacgatgccgtcgacggcaccaccaccatcgtggtccaccgcgacaagccaccgccgccagcgccgccgctctcgcacccgcttgccgcacatggtcgaagaggtcatcggtgacgatcggcggcgcagtggcgccggccatggcgcagtctattgggaggaggaagcaagcgaggggcggatctggcctctgggtccgcaactccagcggccgcccgctcgccgatgccgctccgtccatcgcctgccaccgttgccgacgccgatccagacgccgctccacacgcacgaagagaaagagggagagatagagaagggaggagagggaggaagaagaaaggataaatagaggatgacatgtgggacgcacatgtcagtgggtcccataatttttttttgtgtgaatggctcccgcatatttttaaaaatttaatgctacataagcgccacgtcaatgccgcgtggtacgaagaccaggtcaacattgtcacgtgtgcgccacgtcagtgaaaccgccctccaaaatcatcaagggagtcaaattgtatcggtttagacagttcggaggtcaagatttctagtattgcggataaggtatacgatttagattccgtgttcatttcagggagtcaaactgtacttattccatatttccaagcctaactgaaacagaatcagcccattatgaagcccataaaacaggtaacaaattcagtgcgctattgttccaactgatgtctgcttttctttcttttcagattcatgccagccatattcacattaactcaaggattcaatgtcaatgactagcattctttttacaagcatgcctatttgttacttttgctaattgtgcagcagcagtgacgaaacaacgcgaagaggttattctaattgatctagcgtacgtaacttacgtgacatatagacaaagaattgatccaaggcaaccaccacatgtccacgtgattgatgattcataatagtaaacaactgcgcattattgttcggttaaaagttgactgctacaaatttcatatgaccacgtcaagctttataaaattataaaaagaaaactttcggcgacgacctcagtggtggttgcaaatatcggaattagattcagtttgtacaagttgtaaaaaaaagaagatttgagttcgtacacatacaaagtcgttagtccacatgagtcatcaaaactcacaaaatacacagtttcaaagcttgttcctagaaccgacaagtagaatgaactggtcataataatgcatccctaatctatttttttaactaaatgcatccctaatccaagcatggcgtcagtaatcccgaagctgacatgtagggattgtaacgcgagtgcatgctacatgcttgacatgggcggcaggataggtcggaaagtgaagaatacccagccacaccaggcgccgtccaatcgctgcatattggcgacttttgggcactttcccgtcgtctttgtgatgggtcgggggcacaaaacgttgcgtgcaaaagacagcggcattgctactcgatgtactgaacccacagtaagttcttgttggctaggaattttcggagccatcagatcattcatgatcaccgtacatgtaagttgtgcatatggattagtacattaacgacgtgttgattctgtaaccaagaggtttgttgtttgtttgttcagatggaactctgaccaaaatccaggcacgcgtgaaacggtgacacgaaaaatgcttccagctgatttccaccggcaacagccagtgagggagtcagcggcaccgcccgctcgtccccgcagtcactgactggtggggcccactcgccacgcagccatccctgacgtccgcgcgttacaccatccgcgtcgtagttaacacctccgttactccattccttccaaaagaaaactcgaaacctccccctctccggccgccggcgagcggctcatccatccaccccaccttggccggagacggcggcaatggctcaccgccggatcgcgctcgccgtcctcgtgacgctgctcttgtcggcgttccgcccttgcctggcgcaacagagcaacgacgacacgagcaaacaccaccggagcgccacggccggcgggttcacgccgaccaccgtcgtcgtgctcgtggctctcatcaccgccttcgtcctcctcaccgtgttctccgtcctcatcaaccgctgcgcccaggcgcgcgctcccccgcgccgggcgttccgcagcacggcgtcccatcagcccgtcggcggcgccgccgccgcgtcccgcgcctcgcgtggcctcgacaaggaggtcgtggaggcgttccccacggcggtctacggcgacgtgaaggcgcgcatggcggcgaagtcggggccgctcgagtgcgccgtgtgcctcgccgagttcgcggacagcgacgagctacgggtgctcccggcgtgctgtcacgtgttccacccggactgcatcgacccctggctcgccgccgccgtcacgtgcccgctctgccgcgccaacctcacggcgccaccggtgtcgctcgccgccgccgagagctccgacctgacggcgccggaggaggcggtgcaggaggaagagtcggaggagctcgacgaggcgtccctgatggccaccttcacgccggaatccgtcatcgacttcggcgcgacgcacgaccatgaattcgacagagcagggtaccctcactaccggaggacgcagtcggccatggacgccgcgccggaccggcacacgctgaggctaccggagcacgtcatgaaggagctcgccgccgaccgcaggcaccggcgcgccgcgagcctcgccgggtacccggacagcgtggagaggacgccgaggtggctgacgtcgctctggcgatcggtgtcgtggcagaggcagagccgggcggactgggacgccggagaggagcacggcggcagcaaaagggttcacccggtcgccggagctcaggacgagacacccagcgggtccggctccgatgggagcaaggagaactccgattctgacgcgttaaaccgagtttgaattttgttttctcctcttctttttttttcttgtgcttcgttctaattgtgcagcggtgtagtaatacaaattaacgataaactaccttgcacaattttctattagcaaacaagtactctactactctagatcgtcgattcttgtttgagtttatcgggtacaaaggtttaatattccggtagatcatgaacattttaggatatccttaacagtacctctcagattaatggggataattagtactgattagtgattaattatgctggtcacttgccagaaatgctgctccactgtgtgctaggcttgccagttgcaaaaatggaataaacgaagaagtgatatgatacaccggccgatgcactccgtgaatgtcagtgacagagaatgtatccagtcaaagaatacgtacgcacgcgattgttcgtatgcacctttctatcccgttcttcaatgtcaactctcatgctgacattatccttagagataccagtaggatgatggcgtcctacatggcaattcgtcttgaataccaacggtagttgaaaattttctttttcagggcagctacgtccaccaatacggcgagcatgcagggtaaaaatccaagatgaagattgtagaaggaatacggttggtgaaatcactttagataagatcgattcaatcttcacatgtcaccatttgccatacatacgttacttcactcggccagccgaaatggtaaattctcttcggtagccagaagaccaataccataaatttggacgcaacgaagccaatactagagaccaacaagagcaggtgatgaagaatcgtcttgtccactgttcacctatgcagttaatcagctcactcgtcgcgaccatcttgtcctctcgtatggcagaatctggtgacgagcatattagctcaggaacgtgtgcgtcctctcccatcaccggacttgcgaccacttgtccatgcgtgtgcttgcgatcatggcctgcaaaataacacagccaaaaaatgtcaaaatttcaagtcgctacggcatttgatcgttttcttgggctgtgtggagggattgatcgttttgttcacctccttgtcccagtcacagcggatggttatgatggccagaattagcgtctgcactgcggttccgccgatcatacccgcccaaattccctgcaaattaaaggtttcacgaaagaaatggtcaggccggagatggctaacattttcacggtttaacttgaactggtcagaaatcaagtagcatagtggcataggtaccaggacgccaagtttgaagagccatccgaggagaatgcccatggggatgccgatgaggtagtaggtgccaatgttgacgtaggccaccatggattgccacccagacccaacagccacacctgcacgtatatgaccggcccatttatgaccagttcagctgggaactgaaggcccatgtagaaaaggaaggcccaacggcccaggtgtgtgtgtactttacctgagagaacgggctggatgctgttgaggaggatggtgaaggcgaggaggacggagaggttgtcgacggcgtcgagcacgacgtcgctggaggtgaagatgagcgcgaacttgtcgtggaggcccacgatgagcacccagaagaagagcccgatcaccagcgacgtcaccgacgacacgatcgtcgcgaacctcgcgcccttcccgttgccggcgcccagctcgttcgccacccgcaccctgcaaaccacaacaaaaacacgtacgccgccacacgtgctctgctttagttcggtatattcgagtttcgtaagcaaatcgagtgagaactgagaagaaggcagtgcgtgcgtacgtacccggttccagcgaagaatgccaggggaatcatcagctcccatgcattgatcgtcatgctgtccacgagaagacataaaggttagctacaatcagacgcatgtcagattgattcaggaacttggtactgacttaccagatggagagcgcgtcgaccgcaatagccgcgttcttgaggttaccggtcagcaagatgaggattctgtagtaccagttctccaagctgcaaattaagcacacaaattctgtcagcaactgcaaaaaacgtacgaaacgtgaaatcaaacagaaaccaaatcacacgagaattgaacgttctcggtttcacgtcgcgtacgtaccatagcatgacaccccgcgaacgcctcgagggagaggccgttccacgtctccgggcatccgccgcaggcgacgtaggcgaagagcatggcggcggtggcccaccacgagaagttgagggtgagcgcgatgccgacgaggccgaaccggaagcgggagacgaggagccagctgatggcgacgtggacgcacagcgcgacgccggacgccgcggcgctggcgaagttcttcatctggcactgcaggaatcgctgcagcgggaagaggaaggcgaaggagaggtgcagcgggatgaaccagacggagacgcggccggccatcgccgacagctccggcggctgacccgtcaggagcagcacgtcctcggcgtagatgtacatgggcagcagcagcaccgcgcacgccagcagcacgatccacgaacgctgcatgtacacccccatcatgtggtacttcttcgcgccgaacgcctgcccgcacagcgtctccagcgcgctcgccatgccaagctgcgttccacacggccaattaattcagtgaatcagtaattgtgattcagtatttccgtacagttagggtgtgtttagttccacgctaaattggaattttgattggaattagaacgatttaacggaaaagctaaaaatttatatgtgtagaaaagttcgatgtgacgttttttggttcagtgtttggaattaaactcggccttaattcagaagcagcaatcgtacaaactagtatacaacagtagtataaagaagtcatcactgctcaggtagccaggtacaattatacagtaagagaatcagtagtaccaattgattcagtacagcataattttttttgaacaggattcagtacagcataataattcagtggtttttcaaactgatgccatttcaaatcttgtcaattttttaaagttgccaacgatgcatacatttagttttattaccaaactttcataaatacataagaaatcctatcaaaacttgacaatattacaaacttactaaaattttagcaaatatcaaattttgataaggtttattttacggatttgctatcgatcgaacctgagacttgcagcttgaatgctcgttcaactaaccaattgctccatcaattttttcagagttatttctttagttacagatgacttatattgtagttacacagtagttacaatgtaattacattataattacatagtagttacaattgaaagttttctatttaaaaaactgtcgaatgttgtatagctactcccttattttatctataatcttaacagcccctatcgtacaaaccatactacagcaagaagtcactgctcaggtagtcgggactatcatacagtgagaaaaatcactaaaggcaaatcggttttatgctatgatccctctgcgcccatttacttgtttaaagtatagtgaaagatttcattaaacaacaaaaactgtccaatctctacactaataaaaaatgcacacgaccaaactgccacatcttttcgcttatacttatgtttatcagccaaaatttaaatttttagccttaaatttagaattgattttggggcatttttatcgtagtttatttttcagtctttacttttagatcgttaagaacatatataaaaaatttatttataaattattttcatttgcaaatatattgtttgacttatttctcgaataagccaacgatggggttgctagataacatgaacatgtgtataatgttgccttataaggatgttctcaactagaataaggaggagggactttcaagaatgccccatcatctgtctattgttgtcgtcgtactcatttacttgtcactattaattatcggtatttcaactttaatcattaataatttttaaatgattgattcataattaaagaacgttacattgctacgagtaatcaaaattaaaaaaacaaatataataaatagtgataagtactcgtatttggaaagggatcggtgacatttttttgaccggcaaagagaagccgaccggaatctattatattattaaagggatagaaaaaggagccaccacgttcactctcatgatctagaaattctcatattaatcagagaaaaagaaaaatcagattccatatagaaatacaatttagaaatagctgaaattcggattaaaaaataaggaatattagaataggagactagagtccatatagaaatacaatttagaaatagttgaaattcggaattaaaaaataaggaatattagaagaggggactagagtccatatagaaatacaattagaaaataactaaaattcggaattaaaaaataaggaatattagaagaggatactagagtccatatagaaatacaattaggaaataactaaaattcggaattaaaaataaggaatattagaagtagagtatagagtccatatagaaatacaattaggaaataacataaatttggaattaaaaataagaaatattagaggtagagtatagagtccaaatagaaatacaattaagaaaaaaatagttgaaattcggaattaaaaaataaggaatattagaataggagactagagtccatatagaaatacaattaggaaataactgaaatttggaattaaaaaataaggaatattagaagaggagactagagtccatatagaaatacaattagaaaataactaaaattcggaattaaaaaataaggaatattagaagagaagattagagtccatatagaattacaattaggaaataacataaattcggaattaaaaataagaaatattagaagtagagtatagagtctaaatagaaatacaattaagaaaaaaaatagttgaaattctgaaagtgcatctagacccctaatgattttgatgattgattacaatgcgattagagaggactaacatttttattcaagcaaatgtgaaggttgttaagtcctcaacgtgttgtaatacaatgcatatcccgtgaatgcgacatcgtgatgcaatgcggcaatgatcaaatggtatattgtatctttttcctcgcattgtgtcgtaggaaagccatactattaagggggatgatgcatagacatataaggagtgatgcgtgtgctcaaaatcaattttacttcgaagcatttctcttttggagcgttctggaaattttcggaagttccgaaaatacaccgaaccgtgtttgggcgttctggaaattttcggaagttccgaaaataattttcggaagttccgaaaatacacagaagcgttctggaaattttcgaaagttccgaaaatatttttcggaagttccgaaaattgcgttgacttcgattttcctcagatctggaattttcggaagttccgaaaatcccttttattgcactccaacgggcagatttgtgctgtgggtataaatacccacctcccctcacttgtgagggttgctggttccattccaattatttgtgcccttggcttgctctctctctctagttcatttgagacttgcttcctcgattcatctctccacccgtgtttgattttgatttggtgtgtgtgtgagagtgtggattcgagcttgtgtgggtgcttcttgtggtctttgtaaagatttgtgagcacttgcatcatctccgggagttctttgcatcatcttttactcttggaggttgaggactcctagacggctaggtgtcactcccgagccaccgatctccttgtggttggccgggaaaagtttgtgaaggccggatctcgcctccgcaagggaagagatacctcttagtgaaaggaggagtgcttagtgcaacctcttgaggaaagtgttagctaagacccggctcttagtgagctcctcaacggagagtagaatcccctcaaggatttgaactctggggaacaactttgggagctacatcttggtgatatttcttccctctcctctagctttgcttgcttgtactgctattggtctagttgctgattgtgccttgtattccctgttatagtcttatagatctagagttttcattttgtgtgcgctgctctgtgcattttcagaagttccgaaaattcctagcctagctccgaaaattactgctttcgcatttcttaagttttaaattagcctattcacccccctctaggcctaattgaccctttcaaattcggaattaaaaaataaggaatattagaagaggatactagagtccatacagaaatacaattaggaaataactgaaattcggaattaaaaaaaataaggaatattacaagagaagactagagtccatatagaaatacaattaggaaataactaaaattcggaattaaaaataaggaatattagaagtatagtatagagtccatatagaagtacaataaggaaataactgaaattcggaattaaaaagaaggaatattagaagtagagtatagagaccatatagaaatataattaggaaataatagaaatttgaaattaaaaataaggaatattagaagtagagtatagagtccatatagaaatataattaagaaaaaaaatagaaattcggaatttaaaaataaggaatactagaagtagggtatagagtccatataggaatttaaaactaactaaaatttagaataaacacaataaaattaaaagtagagtttaaaatctgtataaaaattcaatttacaaataactaaaattcgaaattaagaaaaacataggaagaagagtttaaggtcaatataggaatacaatgtagaagtaacttaaattcaaaatgaaaaaattaaagaatattgaaacatgagtttagagtccacatagaaatacaattagaaataataaaaattcagaaataaaaataaataatattggaagaagagcatagagtctatatagaaatacaatttacagaaaattcggaatttaaaaaaatattaaaagacgagtctagaatctatataggaatatatataatttacaaataactaaaatttgatattaaaaataattaataactaacacatatataaaatataatatgaaaactcagaaataaaaatatatatatcggaagaagagcatagagtctatatagaaatacaatttacagaaaattcagaattaaaaaaaatattaaaagacgagtctagagtccctatagaaatatatataatttacaaataactaaaatttaatattaaaaataattaataaatagcacgtatataaaatataatatgaatattacacattagtagttttgtaaagttattgcaaaattttaaattatgttgtcattttaatatatttgaatataatgagaaaacatatatgctattatatgagaaaatataatgatgctagccgaaaattgtgcgggccaccatgctagtttatttgataacaggagaagtttttttttttcgggggataacaggagaaggttaacgttgcaggtgacaagtgacatcaattttgctgaaaagaaattgcaagcacggcaaataagtcggaatatatgctggagatgaatagatgccacatgtatgtgtgctttggttgataaaatcgacaggtggaacagcggaagcgaggaatttattcgaagcttcaggaacaaaagagatgaagcttctcagaagtactagaagaaatgaagaattcactcaagaggcccagctccttccggtgccttctctgtatacttttttttttgacaccgccttctctgtatactgatgataagaaaacgtggacaccagataaaacccaagtgtttgcgggcacagaagcgccagccgttgcattctggattattgcatttatgattttccatttttcacaaacgaaattaaaaaaaatattccggacacgtgcatctttttatataaaaacaaacagaaattatactggcctcaagaagtaccgaaatgttttttaaaataaaattttggtacctctgacatcgaaagtattgaaagtcaataaattatacaataaaaatatatggttgcttctcatgtaccgtaaaatgatccctcgaatagtaaataaaataatttaccaataaaatgtttatatatatgtgtttttattaatttaaaaatatataaaataaaatataatgaaaaacataaaatcaaacttcaaaattagagaagttttattgtcattgagaaagaattttaagttacctaaattttacactgaaaattttaatgactcgagaaatctagtacttaagttatcaagttttacactagaaagtacgacgattctagtattttttaagaatagtaaaattagctttgaagttaaatttaaataattttagcttataaacatagacgaagtaatgcggccttaaatttcacgatcagcctttcaacttcgcatgaattcacgaaaaggcaagagagattccgctctcatgtcgtaagtcgtaactctgacgcgaggaaaaacagtcatatcgcagtcaaagaaatacacatccacttgactactcacgattcggtttgtcttcacaaattcctagttgaactcttcaggtgggctgtctgcgatatgtacagggttgcacgaggattttggccgctgaattgaacaaatccatccacatttacgtttcaatttttttcaaaaaaggaaaaaaaacattgggcacgcatgcatggataggagcaagtgtaacaaaaggataccccacaaatgctgcgatatgcatgccaattaacacgtcacacctgtccacactagcaccatgcataaatggactttacgatcatgggtcatggcagctttgcagtgatcgaactccagaagcgtagcgttcttgcatgcttggcgctagctagctgctcttgcagtctactccatccgttaaaggttataaaatcaaactactttaaattttatcaagtttatagaaaaaatagtgatattttcaatccaagataagtttattataaaaatatatttaattatgaatttaataaaactaatttggtaatataaatattattatatttatctataaatctagttaaatttgaagcggtttgattttgactaaagtcagaacatcttataatctgaaatgcagtaattcacagcacattttgttcgaaatatttactgcttaatgtttatgttttttttccttgctgggataattaaaaccaatcctaagttgccaaccatattgaggagatagcacccaaagatagcacgtacgagctagcacgacgaattaattaaccagcaaaaaaggacgtgttcaatcggcctaccatgaggccgaagttgaagccgacgacgacggtgttggcgatggagatggcggcgagctcgaggtcgccgaggtggccggcgaacgcctgcgtgatgacgttcatgctgtaggtgacgacgcggctgaagatggccggcgccacgatgacccacagcttcctcgactcctcccacaccctcctcctcagcttgccgtcgccgccggacaccacctgccagccctccttcgccgcgccgccgccattcagcagcgccaccctgcactcctcctcatcccctcgcccgtcacccatcgccgccgaccgtgtcgtccgaacgaacgaacaatccaacctcctctgcttcgattaattcttcgattcctcctcttgtgttttcccccgatgtcaatgaggtgtcaaacccaaatggaacgagcgaccgagcgagcagaggcaggtggaacgccttttaataggagaggagttccgtggtggtgttggcgagtccaagctacagctaggcacgcacgagagggcgacgaaagcgcggacgtctgccttgcgtttcgtggcgcacgtatagggcggcgcacgggacgacgtcgctgttgggcaaatctgccgcgcgcgcgcgcgcgctgtggtgtttggtgccaactaacctcgcgttagctcccgtgtccgtggagacggatcggatcatgctgcggcgcacggctttcccgtgttctctcctgcctttccggaaacgatcggctcgatcaaatctggcgcgtacgtgacgcgtgcacagatcgcgcgcgaacaaccctcgagttcgcgatcgagtcctcctagtccgaacacgcgcgaatccactgtgtgttggaactggtgtgcacgtacgactgatgggaatattaaatgagattgttaagtgagatgttggtgtatatattttaggcgcctgtaccgcgtgtgagatctgcggccgtgtcaacacaagattcttatacgttgatcgtgattgtgaatattggggaggactacgtacggagaagctagctgtgctgttgaccaaaccaattaccaactcactctttgagtccatcatggctcatgcaatgcatgtcgcagatcgatcgatcgttacctgcccgggctcccaaaaccggtcgtctctgcacttgtgcagtggtttgatataccgcaggcagctgttgcggcacacggagagattactagtccgtatccgtacacgtcggcagatttgtggctatacatgcatatgcatcaacgtatgcgttggctctctaaacttgcactttaaaatcgcgtttgttgcttgctatcttctcatgaatctcgtcaaaaaactggggttggggggatcacttgctttggaagttcgggtgatgatgacgtcggatggggcccatgaataagactactaactaaaaaaaaatgcgcacgagccctttgttttctgccaagtctgtatacaataaaacctgacccgaaccgaaacaaaatggacatacggagtatataataccaggaggcatcgatcagttatagtgaatattgacgcgcgctagctacgctgtgggtcatgcgtactgccgtagaggacacagatactcccaagccatcgacaataatgtgtatctagaaatcgattggtgtacattgccaactaaccacaaaataaaaaataaaaatgaccaccattaatacaatggtaacaaggtagagtctctctaccttttgcgtcaaaaaaaaataaaaaaataagaaaataaaaatcagacgagttactggtatcatgatggcacacaaccgctggtgacatatgggtgcctacttttgctcacatcttcaagagattcacacgcatatataagcacccaatttgttgggggcggccacctccgtataagctcaaaactgggcttgccaatgagggaggcaaaccgaaaaaagaacacaagtaaacgcccttgaatgggtaggtaatcagggttaagaaagcgagagcaaactgtcaaactgattgcaactccggattgtttactacggagtactccagtagatagaatgtccaaattaatttccaacgggtcactatcgttctgaggtatggacgcgatggacagccacaaacaaagttcagttttccattttgcacagcaaacgggtcgttggcattgctgcttctccatcgcccacccataacattgtagcatcacaccactcgttgcgttcgtcattgcccacgtcttccggaccccgtctttggaacaagcaaagctatagctcttcgcctgttcgacatggatagatgcatgccattttatttttattttcattttctttctgatgagatgatgcatgcatatgattgtatagtactccctccgtccataatataagggattttgagattttacttgcaatgtttgaccactcgtcttattcaaaaatttttgaaattattatttattttatttgtgacttactttattatctacactttaagcacaatttttcgttttttatatttgcaaaaaaaaaaattaaataagacgtgtggtcaaacgttgtaaacaaaaacttaaaatcccttatattgtgggatagagggagtactattaagttcgatcttatccatgggcccgtggctgcgttcgtctgccgatcatgttcatggccgacgaagtagcaaaggatgcagctgatcgatcaaactgttgttaatcaatactggcatagtaaaggatacagctcttggctacgattaatagcgacgtagctcttggcaccatgatgcatgtggttgtgagttgcgacgcgatggtcacggcaaaacttaacgagtcgtggttcacgcctcgatgtgtagcgacatgtgttccctctcgtagtgtcgcaggatacatacattatatgtggatgtaaatcatataatcatgttaataatgcatggatctgtttatgttacgcacatgaagcccaggcaggacgtgatgccctcgtcgtggtgcggcgatcgagaggggaattttggatcggtgcctgttgtctccatggatggcagacaaaccggtagctgtatgcaatggttttggaattttcgtacaggtttgagtgattaactgattattatcactgtatggcctgtgaatatgtgattctctcgccgacacaaaaccgaactgaagtgatctgctcctcgcacgaaaacgccagcccagagtagacgtgcaaacacaagaggccggccctgttttttgtactgggccagatggaaataggactcgtccaagttgagcgagatgggccttggtgggttcaatctctcagttaccaggccacacggccgaaggaggagtgggctgccggcctgagcgaggccgatcacaaggccgaacaggatggccaattagcgcagctgcgtctcacacttttggtccacaaatttcacgtcaaagtttcatatgagaagttttcgaatgaaaattttcaggtaatttttttcagatgattttttttttgcagatgaaagttttacaaataaaagctttcagataattgtttcaagaaaaatatgcgttgatgaaaacgtagctacgctaaatagcagtcccctaaccccaagacttttaagacagagaattcagctgcattctctgcaccgtcgtgtgtcaacttgaccctttccacggtgtcaactaggaagctgggagtaggtgcgcccgttcgattcgcctgatggattaatgttgggttagttagttaatcggaacacgcatgcagattgttagacatgcaggttccaagcgacctgcaaagcgcggctgcgatcagaagaataatggtcacggtctcacggattagttgggtttcagtttgacctttatttgattgatcgaccaaggtggcacgtacgtctccgtactcacatctgattatttatttatttattttatttaaattacacagtacaacgcagacactcacaacatacgcataatcacccctatgaacacacgcacgtaaacccaacccatttgagcatcttcgaagactgggctagcaaatctatcttggagtcaaacccaggatctaagatgctactgaggctattgtaaccactaggttatataaactttcgctgattatttatatgttttgagggaaatacatctgattatattagtatgacaatttccagcttgctgtcctaaataagttatacctactacggagtagatgctaactagattgaacatatatagtaagcatgttgtctactcgactgcgtgcagtacgcacccaaggaacctgtggattttttttcttgaaacaaagaaaaagaaaaaacagttatccgagctctcaacatgcacaatcccttggtcttttcccgtggtaggtgaatgcacttcaactctgacaaacaagatccatgaaactgacagagagcttatatgtctccgcgcgcagatctcatgcatgattcatacggtgactattgactatcgactttcttatgagctaataacattcatacgagatagtcgctgttaattactacacacttaccacctactaataatccccttcaagacttagcacgcgtgcctgtgccttcccctgcaaatctcaaatcctaattacctgaaccatcggcgacctcgagagataacgttcacacaaaagcggaacactttgatggaataactgaatgatggatcagctagctgctagtcgatgtctcgcagttggtggaaatggaatacgttttcagcacctgctgggatatcattgagaaaccaactaacgcattatgcatggtgccgtaaagttaaaacgaatggaaacatagctgaacctcttttctcagacaagagaatgagatagtgtgatagcttcaagttttaacacatcatctcattaattaaaagtcaatatatacaacacatttatacattacttctaggcttctagcacttttatatcctaatacaccatcatatataatttttattttattttatttgtttgctcttaatttattgatctatttttttaaaataaaattagaatttgtgcactcactctgaaaaaaaatctaatcatttgtctagatttaaatttagaattgggtttttttggtacggaatgagtagagatgatctcttaccgataggtgactcatgctctcttctcttctccatcttatctaccgaggagttttcatgtatttttagtctctattatacttttccacaccatatcggagtcgttcctgtctgtgactgtcacttttctgaacttactgccaccaactttttactgtgtcatgcagccatatcatcaccatccatgatcagtaaggacactagctaggtaaagtactggggaattccatgtactggatattgcatatgccaaattgccaatccacaagagtattaattaattgcatatgctgttggctgtatatgcggcagataaaatttaaattaatactggaacaacggactggcggtatgtacaccacaaattaccacaatgtatacagtttaaacacatgcagagtccaaccagtctttaattaactccaggcaccaacaaattaagctacaccaaacagcggaggggaactaatcaaacgactagtagtttcttcggtttgaacagggaaaaagatcgaagcaaaattctattaggtaaaataatccaaatcatcgatatatttaggatcgctatatatagttggagagcaagatagcacatgtgttaattacccggtcttaacagccgcttgaaccaaacggaacaagcaggcactttccacggaggcgcttctgcttgttttgtctcactaaacaatgatcaattagctagtctccgtgtagacgcatcacggatgtgtgtggattattgggaagaaaaaaggacgttaatttgtttcagctcagtactatatttcactatagtactatctacttggactagacccatgacacgtcaggtcatcagcttagctaatcctacggagatgcatggtggttggttatggatgcgaatgattagtacatgcacacacggtgggtcgtcaaacgcagcaagtccaagcacatggaacgttgaacatgtttgctcacaacaggttgctattacgagtacttgtggtcaacgtacgataggctttactcggtcataaacttatatatacattaagcgtatgatttgctgaaatgataacggataagttttagatttgtgacattttgatgcaccttatggtcacgcgcgtattcatacgaaagtgattttgagatatatatatatcaagttccaaaagaaaaataaattcatttcaagttgaattagtctgaactaatttcatgagtacatcatgtcatcatgtatggaattatcacaccatttcctttttctttagaaaatatcacactatcagaactagctagcctttctctacgctagctactccatcagttcaaaaatataacaacatatgattgaacatgacatatcctaatacgattagcttcaaataaaaaaaccaacgttggttttgtattaatttctactactatatacgaaggggtacccttttattttgtagaaaaatcagtattaattcattgtacgcatgcaacaagtggagtccctagctactccctagccgtagcgtgtaacaagtggaataatagtccatttacactgtagaggtagctaagggacgatttctcaagtatcttcagaacaaacatgtctgttgattattttactgtaatccctgtgtacttcttgtctccttcctttttgttgactcacctactctgttaatctctacgttactccaaatctccaacatcttctcctagaccttcacatccttcacacatctatataaaccctagaacacaccatgtcatccaacacccaagcagattaagctaattaactaccatcaacacaccctaatccaaaggtgccaagcttgcaggaaacagtaagctagctagcagtctagcactgcttcatttgatcatggccaccattactgctgctagtcccagacccagtgctgctcctgcagccatggaagagaccagcaaggcgatgcctactagcgagtggcctgccgccagcggcggcaatgcgtcgccgccggcgaggtcccggccgtcgctgctggtcatattcagcgcgtgcctcgtcctcctcggcgccggcgggccgctcctcctccgcgtctacttcgtgcacggcgggacccggctgtggctgtccgccacgctccagatctccggctggccgctgctgctgccgccgctgtgcgtgtcgctctaccgcggccgcaggcacgggatcggcaacctcctcctcccgcggcgcctcgtcggcgccgccgccgtgctcggcgggctgtacgccgtgtcgtgcttcgtgtacgcgctggggtcgcaggcgctgccgctgtccacgtcgtcgctgctgctggcgacgcagctggccttcaccgccgtgttcgcgttcctcttcgtgggcctccggttcacgccgttctcggccaacgccgtcgtgctggctgcaggaatt

SEQ ID NO: 6300 - DNA, 23732 bp, Oryza sativa
  unsure (1)..(23732): unsure at all n locations
ttccatgggttgattgggcctggctgaattggcccatgtgcagcccacccgaggctctaacatgaagctcgatcaaatatgtatgttgacttgcttcagtctcgctggagacaaacaagcccaggcgaccaacgcgacccgagcaaagggtagtgtcactttcaccaccaacgatttacacttgtgcggtgtcatactgtcatggactcatggttttattagggccgtatctaagaatttgaagcctcggtgtataacttcgtaaggaccgtatttaagaacttggtaccctgaattgaacgattttgctatatatagcactcgcaacatgtttttttgttagccatcactccatttcttcaccatatgatcttcatcaagatttcgtgctacttgttatgaaaatagatacacaacggagacacaaatttttacgtgaaaaaaccacgggcgtcgaccggcaatgatcactatagagaagttggatacaagcgcaggggatacattgggctatcgcactctccccgtgcgagttacaagcaatatatataggagaaatctaggagtcctaacaggaaactaatcctataatacaaagtcctattagataactaatccgaatatattgtgggcccaaaatacggatcatatatttaacaatctccatcttgatacgaatttcccttatagcataaatatcttcaatctccaaacaacctcgtgatgataaaatcaatgtgcgccaaatagtcacttggaatataatccataacacccttgatacagaagaggtagatcatacttcaaactcgccattgggaacaaatcctgaatctgctagtataaaccggtgtgaacctagcagagacgtgaaaccgatacacaaacttcaaactcgccatgggaataaaatcttgaatctgctggcataaatttctgaaatatattataaagtactccctctgtttcatattataagtcactttaatttttttaagtcgatatatttaaagtttgattaagtttataaaaaaaatataacaatatatatagcattaaattagttctattgtatctaacattgaatatattttaatatttttatgttgaaaatattattccctccgtcctaaaatataacaacttttagcccttaggatttgtcccaaaatattacaacttctctaccaacattctcttcccaaccaattacaactacctactccctccgtcccaaaaaaaggcaaaccatgggttcccatgccaacatttgactgtccgtcttatatgaattttttttataattagtattttaattgttgttagatgataaaacatgattaatactttatgcgtgacttatctttttaatttttttcataattttttcaaataagacgaacggtcaaacgttggacacggaaaccagggtttgtcttttttttgggacggagggagtacttgcttaataaccatatccaaccctaaaacttcttatattttgggacagagggattattatatttttctataaacttgataaagttataaaaaataacttaggaaaaagtaaaagtggcttataatataaaataaaggtagcagtaatttatttttgttaaaaatgattttttaatgcctaggacacaagttcatatcttcatcgtgagctacagatttttaaggtgtccataattactactccctccattccaaaatataacaacttttagccttcagggtttatcctaaatataataatttctccaccaatattcacttctcaaccaatcacaaccatccaccattcacttttcccacccacctccactactcatccaatcacaaccctccattattcacttctatctactttcttaataatcgtgtccaactctaaaactttttatattctggatgtgggacggagggagtattgaacacttgttggaggctaagaaaataatgccattctaaacaaatcaataaataaaaggaaaacttcttttaaaaatagagcaaaaagcctttaaacgtgtacgtctcctatagtatcatgtggttaattatcgtgtcctttccaacatcgatccacaacgcatgtacgtctacatacctgcgacgcttacctatatatatccatcgttcctaaagtatatcatcattttaacatttaaaattcattttaagattactcaaccaatcgtaactttctccatttaattttaacacttactacattctcttctcacccaaccacaacttaacattccctcatttactgctatcaacttcattaacccatggtcaaacctaaaacttaaattttataacgaggtaacactattatatatgtaaattatacaaaatactattaaaataggaactgcaggacctggcagtcaacactgcagctgttataccattataacaatccgacgaaaagctaccaccaacattcagcttaagcaatccgactggcaatttggaccatttcataagttttaaatagaagaatacagctgctatcccagtggcattgaagctggcacatactgccatatatacttagtcaaaatggaatccatgaatagaacaaaaaggatgcatatgccgctttatgacttatgatcgagtagacaaatagcatttgttctactgaatcccggccaataaatgataagtatattcagcagagatttggtcagagattaaaattagagtgtactactagctaatatgtacattgcaaggacacgtactgttcgcctctgtatataaaaaatagtggagaattggaccatcgtgtcagcttagctttgacctgtcatgtgttacctgtatcccgttaattactattacctccatcacatattacttggcactttaagtttttttaaaaaaaatttaatcattcgtcttatttgaccggtgtttcagctgcagcctgcttatatgtttccatgcatgcaactagctaactgtactttgatttgcatacagcaattgctttcacatgcaaggtagtacgtgaagtcaaaagtgttaggtgatcgtccgatcctcctcgagattcgagaggcatgaaggttcgagaagatggtaaaccccatgtcgatcaccgattcaccagcctctctctataaagttggtgcagtacgtagtgggctaaacctccctcgtcttcctcctcttgcacctagctaaacacgaacagagtatagctaagctagccagctgatcatcagtaagccgtagccgccatggcgagtggattcttccaccagctggaggtgatcatcatcatcctttgcttcttccctacttttccatccttcgcctccgggaggtactcgccacacgacggcgcgacggcgacgtgggcggggcatcatcatcagctgcaggtggcgcgcgaccaccctcgtggctgcggcggcggcggcggcctcgccgaatactgttgggttgcgcggccgcaggcgagcgtggcctccgttgcaacctttgtctctactgccggcgcggcgtcaccccatcaggtatgtaagcatgatctcatcatcacgtgttgtttggttgaagaaaaaaaaatcttttgacttgtccatgatttcaactgcagcagatccatttccctttcgagggaaaactgggattatgggcggtgggtgttaagggctggggttgcttcatttgacaccaaattaaccgtataaaattaattagtagtgccaaaatttgataatatttgacaaggtaggggtgggtatgattacgtatacgtaaaatctaaatcgagaggcttctcgctttagtcgtatcacgcgacacgcctcacagcagttcgatcatgcctgtcgtcccgacgtacatccgcgtggccgcgctctaatggctcaatgagaaggatcaacgtagtgactgcctgcctttttttaatagatatgtatgtctttttcctcttcaaataaagttttctcttaaattacttatccgatctataatccaattacaccattatgttcgttacaattaaatcttcataacaagatcttacatgattatattacgatgaaaaaatatttatatttgtaaattatttttattatatacgtaagttacttttatcatatatataagttacttttagatttgactaaattacttcttagacatataaaagtaaattcaataaagtctaaaagtaatttacatatatattataaaagtaacttaaaataaaacggaagtaactttgtcacgatattagaagtaaattcattgtagggataaaaatataattttatctataaattaaatttaatcagtatagatcaacacaagtaagtttgacattttttaaaagtaacttcaatgttaattggaagtaacttttgcatggtcgagaagtaactctctgtaaatccgtttaatcaccgattgtttttgtttttttcctttcatttttgcttttcatgtagaatgagaaaagaagataaaacctttcatggattgtaaataacattgatggaataacttttaggctttattgaattactttttatgtccaagaagtaatttagtgaaatttaaaagtaatttagatatattataaaagtaatttataattttcatcaaaatataatcatgtgagatcttgttataaagatttaattgttacgaacacaacggtgtaatcggatcgtagatcggatgagtagtttaagagaaaagtttatttgaagtataggtagatagtagccacgtctttaggtatggtatgtttactgatacgtttgcatttttttaaaatgtaaggaagttttgtaaattatcaatgtttggatcgtcagtgtgtcaccttgccatattttggttttattaaagtttgatacggtttgttttctaaacagatcagatacactcccttacctcttaagtttagtgagcttcatatacatatacgtgggaaaggacaattaaagagtcaaactctttcgccttttaatgcctagatatatataggagtaaaaattgagggggaatttgtctactgtgatgatttagacaagttctaccctttcatgcattctatatactattttaaaagcctataatgatggtggtgatgatgatgtatctgtcactactacttttcaagtttttacatatattgtctcgtaatatttttttaatattgtagaatagtccaacatttaatttaaacaaataaataacatataagcaaataagcaaacaaatgacattaagatattggttaaaaaatatattattttgtgacatattataatatttgtttaattctcctatagcaaagcatatggcattctgctagtctattttaaattctcatctccatcttaaagtctttgaaattcccatcaatattagaccgaaaaatatttatatcttcgaaacttatgttagtccttttaaaattgttgttaaacaggctgttagcaactgtcgcacatgggggccggtaaggtatccactagctatacatcacgtagcctatgatcaactgatcaccagttcaccacacgtcctagcttgtacagtagtttaattgtttaaagacttgtcaagaaacacaatactagtagtacctgtcatcccgctcgtgcgacggagtccgcgattctaggctagcgtacggtgtagtaccacctacccaggtttttctttgttttttgaaagatccagctaaaaagctggcttaggttgacgacagtgagctatagtacgactagcagtgagtatcaaattgcaacgagggctaaaacaaagacaaaaagggtcggatctgccgacggtcatagggcagctacaacttgttaaaaaggctattgaagtgtattttaaattttgagatttgatttacaagaatgtgtacatatccacttcctccgtttcaatatgtagcatcagagagagggagtagcacatgaagcgtatattatagtgggaaatatatattaatcccatcctaaatatatattacggcggagggtgtatcttagaaagcatatattatagtgggaaatgagcactaagcattaacacacaagtaggcgaattgagaaaaaaaaagtattttctccgttctaaaatgtaattttttttttggacatacacatgtgtatgaaggaggtaagtagaaatgattggaggaatgttataattgattgagaagataaataataaataattaaattaaatagagaatgattatgattgtttgagatgaggtggtaggtgtagaaataaatttattttaggacaagtaattgtgtttgaaatagttatatattttatcaataacagatgtggtatatttcgttttttgtgagtaagagtataataaaagggaatgtgcacgtggattacctaggatccagcgctatagatggccatattatcctaggcccagcgacccggcccatggcacggtactttggccccacccaggtatggcacgacccggttggtgacggccctgttgtggcccaacctgacaattggggccgtgggccgttgcgttggcatggtggggtggcacggtatgaatatgaggaatgcaaaatagacttattttcagccatatataagacacagtccaaagcagaagaaaaataaatagacttattacagccatacagcccaaagagaagggaggcaaaatagacttttgttagccatatctgagatgggcttctgtgcctgggctataggtggagcccgtggatgggcacggcctggcccggccgttgagcaggccataccttagccgtgcctgggctgagccgggttgggcggcttatttcgccatctctatcccgcgccccccaccccaaagttaccatgtttacatcaatttaaatattattactactatttgtttgatgatgtaccagatcgattaccaatatgttgtggcttatttggatgtatttaattactatgccagttgcttagttatacatgagtgacgttaactaattggcaggcatctttgcagcccggtgatttcaactgctccgtgctgtccgggttcgtgacacgtcctggttgctctccgctgccggcgttcgccgcggcggccggcaagtcgtcgtcccaccgcactgtcaccggcggcctaccggagctcgactccgagctggcgctactggccatgatcatcgtgctagctgatcgagcgacggaccggaggaagaagaagagcggaagggcgagatactccgtggcggcgataggcgcccttctggtcatgctgctgcggcaggttccgcatctgcagcaccggtggcagatgcaacacgctcaaactgcaccaatgatcccaacatgcccaagcattttcggtgcaacccccatcgtaattaagccccgtgctgcacagtgatcaggctctcttcaatacagatgttcactatggaagagatgcttataagttatctgatactagagtatagaaatactcaaaacatgtacgtgaggattagtggatgctatgatacattaatatcttgttcatgctattacctatcaatggaatatctttgtcacgtttaaatatggcacttggttgagagcattcagctgctttccctcaaaaaagaacattcagctgcatttcagttcattctcaactagccacgtatctacgccgttacataaggtgaatgacaattaaatgcacggtggtatatcataagtgtttgcacaacccacctccccctccttaccaagactcaaaacccaccttccacctcggtcaaaggcccctcccaccggtcaaacccgcttactaactccccccaccactcacctcttctcagctctcgtcctaggacggtgcagtaacacgacgacctctgtgcagtaacactatgtcttacgtgcagtaacagcgttaaaatatagttgaaatatagtcatgacggatctacttttgataagctctttttttctagcatcatggtgcaaacggttttaaaaaacagaaataaaatgaaataaaaaaagagagagatcggtagagagagagaagggagggggtatagaataactattttataccctgggtatagaatagtctcactctatatatatatatatatatatatatatatatatatatatatatataaacacacgatacattgtaatgtgtgtgccctaaaaaaatttattttggccataaatgtagtaaaataaccacgaaataaaaggtaagcagcttgctgttattcacctgccagcacaaaaaggacaggttttttatgagaaaatctcaaattagcacggatatatatactccgattagaattatcaattatgtatgttgattttaggcaagcagccactggagacaatataaatgtaaaaaacagttgcagtagggtgtgtttagttcacgccaaaattggaagtttggttgaaattggaacgatgtgacggaaaagttggaagtttgtgtgtgtagaaaagttttgatgtgatgaaaaagttataagtttgaagaaaaagtttagaactaaacaaggcctatcttctctcaaatttgtaacagagattacagagatgcaatactatgtaggtatttccagtaatttgtaacagacgatcgtctctgcaataattgaaagggcaaagcagggcattgaaagatcagaaattgatcgattgatcgatcaaattaatcgatcggtcactgcaataattaatactaccttatattttaaatgtataaactttttatccaacatttgatcattcgtcttattcaaaaaatttatgtaaatactcccaccatctaaaaaagacaaacactatgtttccgtgtctaacgtttgactgtctgtcttatatgaaatttttttataattaatattttcattgttgttagatgataaaacatgattaatattttatgcgtgaattgtctttttaatttttttcataattttttcaaataagacggacggtcaaatgttggacacgaagacctatggtttgtctttttttggacggagggagtatgacttagcggtaaaaacataatatgtttgtaaaaagagggagtaattgccttgcataataatgctagataaaaaagttgcaatatactttttttatgctggttagttcaaaatatttatataaggttgcaagaaatctttataggttttctctttcggttcttcttatctgactactactgcacgcgctgaaatggtgtttgtcgccttgtcgtaagaagagtacaataatacttcgtcctttgtcccagaaaacgagttgttctacatctccgataatatcccagaaaaagtgtcgttacaatgccaaacttgattagagaagtgggctatctgtctattctatcatgttattttccaataagtgttcaaagaatactcgttaattaattgtatgtagggattctttgtaacatgttgagtgtataatgacttaatgaaatgacaacccaattaaacaaataggggtaatttggtcattttaacataaaactaatttgattgacataccttaaatcgtcaattatgcagctttttaccaattatagatagagattcacaaatagactttaataatgtattctcctgatcttgtattggtttaatttacatttgtgtggtcatttcattctatcatttttgaactacactcattttagagtgctagaatgtaataataggctgtagatctttttagcaaaggccgagatgcttattccattataataaaaaaaaagtacttgggtttattgtcggtaatcagatttttggaataaaactgaactgaaattgggtaaggaagaggttacagcatgtaaagtttctccaccggttctgtttccaccatcctgcgattgaactgatgaaatcgcagtcttgcgcgtgtgtttatcttgtcatggtcagatttgcattggtttcttctgaccattctgcaactggaactggtggtcgcaatctcaatctttctgggttttatcttgtcaatgtcagagtagccgaataaattaactaaataaagttggtgaagaaaaagtttaaaatgagcgcagcgggcaaggtggtcgtcgtttctgacgtgccagtcatgcacgacctgatcgacatatgatggagcgcgcaaagctgccgtcgcacacgcaagtgagaaatgctttcatttcaattggttctcaattagtggagtagttcaggctgagtttaattctaaattttttcttcaaactttcaatttttccatcacatcgaaactcttctacacacataaacttccaatattttcgtcacatcgttctaatttcaaccaaacttttaatttcaactaaacataccctcagactccattaattgtgtctgtgtatatataccgtcatcgtacgtgtccatctcaattgcgtaactacgtatgtcttgcacttgaatttgtacgtttagacgtgtagtccaactccgacgcgccaatgccgcacacgccgcgtacgtaagcacgggcacgggcacggcatggcgtggcgcaccccatgcttttatttgcgtctctcgagccagctggtgttaggacctgtttagttccaaagtttttttttaaaacttctaacttttcattcatcaaatctttcatacacacaacttttcagtcacattgtttcaattttaactaaacttttaaatttagtgtgaactaaacacagcctcgatgaaatcgtgcacggtaacaaaaccagttttgtttatctgttaatcatcacgtgagtgctgatcttaattcgccgcctgttctgaattttaatttggctgttgacggggggtgccttttggaatattgtccttgttggcttcgtcggcggtgttctgattccacgacttcagcaatgttttttccaaaatctttgaaactgagcatggagcacactgaatcaatcttggaacaactttttttaattttagtctagaataatattggataggatcaggatcagccgtagttgtagctttggatgcaaggcagttaatttgacaggtgcaccggttaaacaactcatcttttatacccgttggaaacactattaatcctggttataaaaaacgtgaccagcaaatcgaggttaaagaccatgatctaccaagcaaaaaaatatgttgaatgtgggtttcgaccttaagatctctcatcttagtcctcatgtgcgattacatgtgttgtcaagtaaaaattaaggtgcttttccaaggagaaaaaacgccgggtgaggtgtgcaaaacttgggaacgggaattttattcgcaaatggtaaccggcaggacgatgagtttccaaccaattgaacctaaaaacgtctacacattctgcatatattgctgtcaaaaacgccatagtggtagccgcctgtcatattgttggctccaatacatgcatgttactccccccgtcaaactctcctaaaaaaaagataaaaaatagataattttcgcaggcccgcctgcgaaaatcaattttacaggcggacgacatcttcgcaggtggtagattcacccacctgcaaagcacatttcagcgaataaaaaaaaagacgcctcactgccgccaccggcctcttcctctggccgacgacagctttcctcctccgtccgctgctgtccccacaggggttggcgccgtcgttatgtcgtcgcatcgtggttgtcgtcgaggaggaagccggtggcctggcgccgtcgtcgcgacgtcgttgtcttcgtgttgttggcaccgtcgtcgtcgaggaggaagtcggtggcgaggagggagccggcggtggaggcggagccgacggcgaggaggggaactggcggcggaggcagggaggaggggagccggtggatccgtcgcttcacggtgctgcgaaggtcgtcgtcgtcgtggccaaggggagccgacagctcgcggaggcggcgtcgcggtcgtcgtcgtcgtcgttgaggagggagccggcggcggaggcgaggatgagggcaaccagcggcggaggcgggaaggaggggagccggtggatccgccgcttcacggcgccacaaaggtcgtcgtcgtcgcggccgaggggagccgacggctcgtggaggcggcatcacggtcgttgtcgtcgtcgaggaggggagccggtggatccgaagcttcacggcgccacgaaggtcgtcgtcttgcggccgaggggagccgacggcgagcggaggcagcgtcgcggtcatcgctgtcgaggagggagtcggcggcggaggcagggaggagtggagccggaggaggattttttttttgctaactttgtgagagagaaggagagagagagagagaggagggggagggaaatgagtggtggagaggagaggataaggataattgactttttttttggaggcataatttttgcaggcggaccacaatacgttccgcctgcaaagatcatatttttccaggcggacaacttaagaggtccgcctgcgaaaataaatgtatttttgcaggcggacctcttaagtggtccgtctggaaaaaatgattttcgcaggcggacggtgagctccaccccgatttatatttttctaggcggtcatttagctccgagggtcatacccgcctggaaaaataaaaggccaaagttgctaaaaatcatttttctagtactccctccgtcccaaaatagtgcagttttgcactattcatgttcaacatttgactattcgtcttatttgaaaattttttatgattagcatttttattgctattagatgataaaacatgaatagtactttatgtgtgactaaatatttttaattttttcacaaatttttcaaataagacggatggtcaaacgttgggcacggatatccacggttgcacttattttgggacggaggtagtagtgaataacagtggcaaagcattaacagcagactacatcatatctagattcagacttccatcaacagcagtagggatgaaaacggatcgaatacggtcgaaaacttctctatcatattcattttcaattttttttctcggaatcgaaatcggattctgaaacccggatacgaaaacggagtcgaatattatcgaatacagatacagagcgaatacgaatagaaacaaatatggtaacaaataattatcgaaatatcaagacccctcaaagttagcttcttaaatcgaggaagagatatagccattagttttcaaaagcaaaacatcaacattttcaaattttaattctatttgtaagggcaagggagagatagaaaatgttgtgtttactttgtatgttatcatgaaacaaataaattaattaatgtgtatcactgaaagagagaaggtacttgagacttcctagggttatccttgttgttgttgggctgggctgcctcttgggtagggctggcttataggctatggcagccttatgtgtaagttggatatccgatagaaaataccggatattattcgaccgttatccgattccgacagatatcacctatatcatattcgttttcatttccgaaaaatatatccgaattcaaaatttttcggatatatcggaccgaaactatcggattccgaaaaaaagtccggtcggatggaaactctccgaatcactttcaaccctaaacagcagcattacatcaacacaagcatcaacagtcaccacaagcatcgcggtcaaggtcatcgctgttgtcaccaagctgcagtcggcatcgccatcactgagtcagccgcaaaccctagacatagtcaccactgagggtcaacatggtcaagcttgcgtgtggagccgttgtgccgccgccatcaagggtcgtcgtcgaagttgaccgtcgccactgccagatctagcggtccaagaaccgccgtcaaatctagcgatcccaactcgactctcgccaccggccatcttcttactccctctcatcatcgtcctattcgccacccgctccagccagccagatccaccagcggagaggctagggtctcctagatccgatggccctgaccttcttattggctaatctagcatcagtacggaatgttgacagcttcctagagaggcgacagtagcggcacgccttggcggtggtggagagagggccaacgggagcaggtagaaggacgagggaaggagggagcgaggggcaagagagtctggaggtaggagggagaaaggaaggagatcgagaggcggggacaggtggtgaggtgggctgtgggtgttttaataagttgacattaattntgtgagcggtactctttggctaccaccagcgaaaaaaggttgctaagaggtccgactgaagaaatggcgaccaccagcgaaaatctattttttgctgatgtcctttggccggaattcctccgagacattttttttcaagtttttttttattcggcagtaaggataaaagggtgacaccataaaaagtcgttttgtatttaagaaaaacaaaacttttaaaaattaatctatgttcaaattcatttagtttttaaatatatgttcaaattaattcatttagttttgtctagaacggagtgaggacggagcacttgtctccttacaaacgccttggtattattctgttttgtctcgttgcaaatccccttaatttgtatgattctgtctgttctacttgctagtggtaatatttcttttgttcgcataaggagcttgtgcgtatgtatgcggccgttcacacacgatcactttttcttgcatgaatatacatagtatgtggatgcatgcttagctggcctaaaacaggatatgacatctatccaactttttacatctatgcatggtgttgatgcaccattaccatgcatggatggactcaattgtttaactccagaattacgtatcagccttctcattctgttttactattcatcaatttatttttaattttgtactactataatgaatttgggttaccggcacaatcgagcatgcatggctgcacgaatggcggcagtcatgacatcacgaacgaatgactatgcatatatctcgataactatgtacattaggtagggatcgataaaagaaatgaacttttcacaacctcttatcagaaagaaagcttcggcaagaagaatttccagcgcccctctccctcgggcgctgggctatataagcccttaacgctcgaacgaatattaattaattaccgtcacaaaccacaccgtagaattcacacagctagcgttaggccatgagcccgtccgatcaggtgttgctcttcgtctgcctacggcgtgttctcctgctctacgtcaccatctcggcggtggccgggcagagcatcaccgaggtcgtcgtcggtgatgaggtggtgcacgctgtcaccaagctggtggtgggtggcggcggcgtcgactccgcaaggaacatcaccgatgtggacggtggcgacatatgtcaccgcgaagtgcactccatcaccgaggaggacggcaacgtcgacgacgacgaggtgcagtacgccatcaccaacgagggcgtcggtgccgacgatgacggctccgacggaaaggtaacaccttgctttaagattctcttagcgttggttggggaagtttaagattctaagaagcaggtagttgaaagccaacttcaaaatcggtaaaagctgaattgtctagcttctagtttctagtttattttctgaattctgcaattatagtttctttgaatctagtaaaaaactggattgtttggaaagtttttgattctgagaagttaagcagctagaaactccctcaaacaagcccttaatcttcctctgcagtattttacctttttttccttggaggaaatgcagtattttacgtgaacctttactactgtttagatttcaacttttttcttcaaactttcaacttttcggtcacatcgaactttcctacacacacaaactttcaacttttccgttacatcattataatttcttcaaacttccagttttgacgtggaactaaacatagcctaactcagaaagacaaattccaggtttatagtagtgtactgtcgaatctcattgtgctggaaaaattgaaccagtgatgtttgaccctctgactctcatgatctgctccccctgcagttgtcatcagcgtccgaggttctttatgcggctagtgcgcagccgaacacggcggccgccggaaagtggcaccgccgcatcatgcccaccgccctgcagccagagctcaactccgacgacggccatggccagcagttcgatcggaccttcgaccaaatccaatcaagcatcgccgacagactgatcgccacgacgatcatcgtcatgctcatggtcgtcacgaatggtcgtcgtgcgagcgagaggaagaagaggagcggacgggcgacatggttctcaccggcggcggctctgacgatgctgctgttggtcgtcgctgcgtctgccaactctgcgacggcggcgcggccgttgcccgccgccggcggcggccataacgaagctgctgctgctgcagcagcatctgggacgatgccgctgaaggcggcagcaccaggacactcatcatgtacaacagatcccaatacgcagcagcctgtgcgttgtattccccactagctacatatctgagtatataccatgtgatatatagttactatatattactatataaataaagttatgtagtagtagatgatatgattgaaattatcaatataatcgtgtgggttttgtaatacagtacactatacatttggtttgtaacaaaatcggaataaatgggggcaataaatttggtttgtactcctacatatacatggtgagatttgtacgtgtcacgcacagctcgacctgttaatatttactatttgaacccgtcgtgcatgtacgttgacagcgaccgttcacgtgagctacgattcgacgttaacctaatctgttactcatcccgttttgtttatatgtactctgttttctttactgatttattatttactatctagtctctctttcgtccaagagattaggtcagatacatttgactagttcagtctttctcttatcaaggaaataaactacttactccagctacgcatatatcttaccatttctaattcgatccgggtatttttctttaaaaatcgatactggaatatttatgagaaaattccctatgtaccttcaaacttcacccaattctttctatgcctatgatatttactcattcccttgcatacccctaaatttcattttgaatccttctataccccttgcattagttgaccgttaaatttctatcataaagttcattctgccctttgatataaaaaatataaatttatgaagtatattgatagagtgtataaattcattgtatgcgactattatatgtatgagtttattttgtgagatattatttaacaaatgcaatattttagtttcgcctcgcgaagggaaaacaaaaataatttttatctatgacaaaatttattttagataaaacaaaaaaataatattttttaccattgaaaactgtatatataacatattttgttataatagtacaaaattctttatcagataaatcttgttattacttttgttaaataatatctcacacaataaactcataaatataatagtcggatataataaatttatacactccatcaacatacttcataaatttatattttcttgatatcgatgcgtaaaatggactttatgatatgaatttaacggtcaattaactgatggaaggggtatagaaggatccaaactgaaatttaggggtatggaagagaaaaatgagcatatcgatcttatagggtacagaagggattggacgaactttcagggatagaattttctcaatatttatttattcttcctccgaatagcacatgcaccgaaggaggtacaataagcatcttcgtaaaaaaaattaagtagatcaaagaagtgcggagactgaagttatctcctcttcgtaacaaacttcgcgacaaagaaatgcatacacaaatgtgccaccgatcgatcagtgttcatatcctcatctgtagtactcactttaatttgggaactaaattaaattaaatcaacgagtgctgctagctcccatccaaattaaaaacctaagaatcgttcaaaaggagaatctcgtgcatgaccaaagcggctggtttccagtgtccagtcagagttcgtactgtatatagctagctgctgtggactgcgccagatcatctccaccagctaccacatccatatcagagaatcgggcatgcatccacagattccgtggagaaatagtttagattcctaattataaattccaacactaaaaggtgctcattaccttctctgtcaagccatgcattacgtacccactttctcctagttatagtgaatgaacaattaaaatttctctattaactattttatttaattaatgtgccagctattagttgccaaattcgaccaaatagttatactcccccatagcaaaaaaccaacatacaatataatgtgacctattttaaaacaataaatctggacaaagacttatccaaagggcaacagtagatgctattaacaggagtagcaataacgtcacttgcaaatcacagatttttgtcatggtcaaaaagccaatctaagtatgggattatatttctctgcccttttgactgagtactactgtaaagtaacttggtattccatgtatggtacgtaggagtagttttttaagtggaccatgcatgtggatatgtgttcctttttctttccgaggatatggataggtatatatatgtgacttgacgttggctgacatcgtgttctgtacagcatcgatcttccgacgaccaaaccaaagcagccgtcatcacctactgtctgatcctttaattcctccggaatcggaatgttcgccgctagcaagccgaaccacattgccaacagctagccggagttcagctctgatcttgcccgtgggaggctgaaaagttaatcaggggtgtgtttagttcacgtcaaaattggaagtttggttgaaattggaacgatgtaatgaaaaagttgaaagtttgtgtgtataggaaagttttgatgtgatgaaaaagttgaaactttaaagaaaaagtttggaactaaactcggcctaggcttggtcgcctcgatagaaacaaagaagagcccaagacagtcgctacggcgcttctgattctcctagtacactccgtggaccgagtgatctaatcaagatatggattattagtactattttgaaggagagatctctttgtcatcatcgtcaatatcatctactagtacactccaaccgcgaaactagctagcaagatttcaaacctgttggatcaaaagcagcacaaagtgtgcatctgattaaacgccacatttttcatgttgcaatcaaattataagtcacaattagaaatgaatattataggtacatgctagctagtacgttcaaaatgaatatatctagccatagtacatctcataataaacaagtggatcgatctagcaattctggaacctaattttgtttactaaagcatatgaaattctcgggacacatacctatttcatatatgtatttcagattcgaaactcgcgactgcatgccctaagatgcagatagcctcaagatgctaccactctcaaccagacatgaatcttgacatttgtgtcatcatcggtacaaaattggtatttctttttcccattcttccatatcctcttttgaacatattgtcttttcttaggatgctaatctttaaagagtaatcatccaaatattttgatttccagaggaatttggtatttccgcagctttttgaaagggtagctaggcagctgcctgtatttctacagaaaaatatttcatagtgaatgatccatgtcttggttaaattccacaaaagttgcctttgtgacattcaggacaatgccctgacattttcttctgagttagtgaagaacaactagtagtccaacttgcattttcaattagtaactcagaagaacaacttgcattttcaaaacaagaaaaaaaaaaggctaccaaagaggaagctggatgcatggaaacggcattactttcggtagacaacaacagtagtatacattattcgacacggctaagaaatttctccgtgttttttcaggagccacgtgagaggatcggtcgggagcgtactgatgacatatatacatgcgacgagctgatgtgacgcctgatcgatcaagacggcagcacgaatccgttgtctcatctcgtctagctagccccttgtgcttgaggtttcttagaaggcaaaatttaaacagtgcatacgcactatttgatctcaacagtgcatgcatactttgctaggtgagaaagtgttacttattatccataaggatggcaagctaaatatctacttagctaggtcatgcatgtcattttttccatgcggttaaaacaattttcgcatgcgagtggtgatccgcacgcatgcacccaggtctttgcgaaaattagatttttgcatgcgggtagagcaaccgcgtgcacgcgaaaatccaattttcccatgtaggtggttaagtcattcgcacgcaaaaaatggaaacttatcaaaagaaaaatcggaaattcaaaaccatagcccagaaccctagcccaccgctaggaaggaggagaggagagaggagtggagtgggagagaggagagggatttgggaggggaggagtagccgagtgggggagaggagtggtggagaggaggggaagagagagaaaggaggggaggaataaaaagaatgtgaagagaaaggggtattttcgcatgtgagccacttaagaggccgcgtgcgaaaataggcctgccaataaaaattgatttttgtatgtggatttcttaagaagccgtatgtaaaaatgtaggtctatttttacagacgcatcgagttactatccgcctgcaaattataggggttcttgtacagaaaaatcgtttgtataatagtgttaaattacttatctgatttataatccgattacactgttatactcgtttcattcaaatctttacaacaagatcttaaattattacgttctaacaaaaaaatatatattgtaaattactttatcatatatctaatttactttagatttgcttaaattacttcctaggcatttatggaagtaacttcaataaatcctaaaagtaatttcgataaatgagaagtgattaataggacaattagtactctattgtgacaactattttgggacaaataagaatcctagagatataattataacttaatacaaaataagttacttaggacgatgaatgcgacacattgttgccacgcatggagaaggagatcctcctgtcgtcccatcactcagcggacaccatgtgagctgcatattcccttcaagaacttatcaataaaggtaagctcgtagtttatagattttagacttgtccattccgcaagttgctgcttatatatgttgattactaatagataacctctcaccacgtgaaggtggcgtcgggcatggccatccaacagacccttcagggacttaccactgcaggccgattccagcaggatactccaaggtcgaagtcgagttggtggaagccgcgtacgaggacctcgagttggactaccctggaggagacggtgagacgcatctacgagacacaagccacaccattatattatggcgcaagcggtacatcatcctccctgggcgacaagcggcgtctcgtgcaccatctcctccggcttcgccatctcctcctcaggctcctacaccgtctcctcctcatgctccagcatcgtctccacctcaggctcctgcattgactcctccttaggctcctacaccgattcctcctcaagctcctcatctggcaccttccaagtcaagggcccctcaagctccaccgcctgcctctacaagggcaacgaagaaggcgaaagttgacgccgccaaaaacaaggacccagggtacgattgcacccaagaggagcttgacgcttatgtggcatcaaaagacaggagacaattgaagcctcgaagtccagaaaagaagattcctatagacccgagtgttaggaacttcttcaggggtatgtctgcacctgccaaggaggctataaagctgtcggactatgagcgaacacttaagaaagcatcttctggaaagtccaaaccagtccctcagcttggagagcaaccaaaccaggagatcgagccgttggtgaccggtgaagaatttggaatacaagattttattaatgacaccgggctaactacatatcaattgctacgaggcgcaccaatcgaaaaggcgggagtgaaatacatgtacgaactcggtaaaccacttgtcaagcctgagcagctgcagtccctaccgacacaaatgtacaaattccatcaactgtacatggagatgagcgccaccggtagagagatgatcggagcaaggatcagggacacggacttcttgcaaggagaagatattctctggatcaatttcaagggtatctacgaactataccagctggacgccctcgacgtctctattatgagttgttggactttgtaagtatcgttcagttagatttcttattacgtttcctttaattaattaggtccttgtatataagtacaccatatataatatatacttccgtttatcgttgtagaatggagattcaaaggtcccgacggcggggggttttcgatactggattcatcgacccttggaaagtaaacgttgaaatgatcaccaagtatccgcaagccacagaggacaatctcgtccatctcctaaaggcgcagcattacaagacgttcatactattgccgtacaacacagagttagtttttactgtcttcctaccaaatttcattctcgtacgaacatgctaagtgtttcatatgtaatgcatctgacgcacattggagattccactgggtccttttactcttcgacttggaggcctacgtagtcaatgtatatgactcaatggataaaaaagagtctacgtttgacatggtttttgaacttatagacaggtacgactgtcataagttccaatgttaattacgaatcatgttataattaattgctactacgaatcatagctttaaactccatgtagggcttggtatcagttccgtcatttagtccgcggcaaatggagagaaagacttaggcagaagtttaaatttcatgtgagtacacatgctctacatttatattgaatctccaattcaaaaacatgtgtatattaattagatctctcgccgtttgtcatgtatatatagtgtgcaaagcaagcccagggaactaaattgtgcggctactacgtgtgtgagtattgccactgctttgcagaccaaatcatcaacacaagagagctcgatgtacgtacaaataaatatcattgcgtacgtatcgatttgttgtttactaattaattttatacattcataggttatttgcatgagggataacctcacacataagaaatttatcgcggcggttcaagaacaactcatgggattcatcaacgaataaatccttgatcccgagggtgaattct

SEQ ID NO: 6301 - DNA, 46266 bp, Oryza sativa
tgattggagcatgatcagagttatttctagctaggacagaagcctaggtgttagggaaaagactgatatagttcgaagaagtaaagacccaatccagttgttcaagaagaggatcatcttgcatattgctccacgtaaaggaccttccttttatggggatctcaagtacccccaggtgactaatgatatcattgaaaatgaaaatatcattcatgttacctccaggtttatttctgttatccaccaatctataaaaaataaaatctcccaagatcatccaaaaatcatttgccacatccaaatcgtataatcacttaacaacttcatccctttctggtccatgagagggaccatagacattaatcatgatccagttaacactatccaatttagaagtgaaactgactacgagagcatgttgggtttgctacagaagtctagcagaaaacatagagctacaccagccaataaaaactccacctgatgcaccaacaaaagggagagaaaaggaaaccatcaaactgtttggtagccagggttttgacaaattttgcatcaaaaagccctttttttggcttcttgtaaatagaagatcgaacaagcactttcatctatcttttgcttgactgcctgacatctgcctgacaagatttcttcatttgaagaggtgaggaactagagcttgagttcacatgtgaaagatccaaacctagcatatacgcactcctgaccaaaaagatgccatttttatctagataccaagcaacacagtcctcctctacatgagaggaaatacgaatattccagcaatgatattagcgtcaactggccagaaatgtcagtttaacctattaaggtcccaggcaccattctcagtggtaaaatttgaaacccattttagtctgcaattgcctctcttcgtaattggcttcctagagtaatctctaggaatctagtagtcacgccaaacctagattgatctcccattccaacctctccaaatgatacccttcttcaataactccaaaccgtactcaatcgctcgccacctaggggatgcattgcctccaaaacatgtatcaattagggaaccagtaggatagtaccttgctttgagtactcttgctcacaaactatgaggattcataaggagacgccaagcctatcttgcaagtagggcttgattaaagattttaaaatctctaaatcctagccccccaaagctcttcggttttgttagacagtcgtcccaagatttccaatgagttttccttttgttattttcagctccccaccaaaaattccgagttaaccttgttaaatcctcagataccgactcaggtaacttaaaaagacccatgacataaaccggaattgtttggataacaacctcgataagtatctccttacctccactagataagaaattatctgcctattgtatcaatcttttccagatcctggcctgcatactttggaacctgcctttttttagcctgccttcagaagtcggaaacccaagcctcaaaactagggtgtgcaacctgcaaaatacttctgatagattcacaaactgcagtaggggatgaaggcccaaacatcattgaacatttcactggattaatcaactggctagtactctgagcatagttttcaagaacttccttaatcaccaaatcttgctggttatttgccttgaagaacaatagggtatcttcagcaaacaacaaatgggagatactcggggcttgtctgcagatgtgcataggggaaagatcaccgttatgaacctttttgtctagcaataaggagagaccatcggctacaaacaagaagaggaagggagacagtgggtcaccctgccatagactgcgtgtaggagcaaaggtagacagaagagttccattgaatttaactgagtatctcactgtggttatgtaattcatgaaccagctaacccaacaatgagagaaccctagtctgaccattgattgctccaaaaaacaccaatcaactcgatcgtacgccttggacaaatcaagcttgtaagcacaagcaaccttctgtggttgtttatttttctggataaaatggaagcattcaaaagctatgagggtgttgtcggttatcaagcggccaggaacaaaggcactttggctttggggtatgaggtcatccagtataggtctcaacctattcaccaagcacttagaaacattcttataaattatattgcacaaactaataggtcaaaaatccttcaactccactggattctctattttcaggataaggacaatcgttttgtcattgattccttcaggaagaacacttcttctgaaaaaaagacagcaccgcccttaccacatctttcaaaataccccaattacaatggtagaaatatcccgggaaaccgtctggacccggcactttcagaggcccaatctgaaacatggcagtagcaatttccgaagtcaattgtttgttcaaaaccatcattttgctataacattagctgggtgtaacgacaataatggcaaatgattttatcaaaatgatacaaccatatcctctatgcatttatcataggtgggcccaacttatacccgcataaatgttgcaggttgtcagtgtgttctcggtgttatagataaggtattcccaatacttttgggttaggctcggtgtggctcaccatataccaagttttatcactactacagatttcatttttgcatatggcccaaatcgatctttgcacacaaacgggcggcccgcatgcactcaaaggtctgcaaaaattaggatttttgcatgcagttagcgtaaccgcatgcaaaaaatccgattttcgcatgcgggtccttaagccgaccgcatgaaaaaacaaaaatcgtgaataaataaataaaattcccaaaaagaaaataacccagccccaccgccgccggtcgcccaatcccaaaccctagcccaaaggctggccgctcatcaccgctcacaaggtccgcccgctcccaccgccaccgctgtcatcgccggtcgtcgtcgtcgccgaggtcgccatcatcgtcgcaggatatggcagccgctgctagatctgtgcaaggggagagccaccgccgccaaatccaggtgggggaggggccgctgcccccagatccgtgcggtggatggcctccgccagtcgtcgtgggaaagggccccgtcgctcccggccaccacgtgaccgaggtcatattcgtcgcggggagggtgccgccactggatccgtgtgggggaagggtggccgtccccggatccacgcgggggagggccgccgtccccagatccacgtgggggaaggccgccatcgccgggcgcctcctccgctggactcctcgcgaggatggtcgccgccgctggcctccgcaaggggcacaaccaccgccaccgcccaccatcgcgccgcactgcccacccaccagttgatatcaagaagagaggaggtgaggaggtgagagagagatatatatagagagaggagaagataaggttgagttagaaatttttgaactgttgagtgggaattagaaggtaagttagacttctagacagctccttaagaggtcccggctgcgaaaatcgatttttgcatgcgggcctcttaatgagccgtatgcgaaaatggaggtcgatttttgcagacgtggtcagttatgatccgtctacaacataacaagggtctcgtccagaaaaatcatttttgtagtattgtatatggaatcatgcctcatatattgaaggtgttccatatttactttttgtttaaatttttaatcttgattctaatgccacgtcaacgccacgtgggacgaggaccaaatcaaataatctacgtaggcgccacgtcaactaaaaccactgttcaaacctccttggggtcttatttgagatggtttttagagtcgagggacgtgttatatgtggtattttggtttaagggcgaataccaaatttgacgacaaattaagggagctaaagtgaacttactccctgtttgaagcagtgacgcaatggtgtataatttgggccttttggctatctgcccataggcccatggagactctttatgggctggatcggatggtgcctcggccataattaaggaggcacagtgtttcgaacgatttttcttcctataagcacatgcgcatgcgcccacctacatgtgagcatgtgtattgtcctgaatttatgtagtatttctaatcaaactagcaggcacaaattaagcaaatgatccatcatcatgtatttgctagtattacagttacagattatgatccaccctgttaatcttcctcctctgcttgctgatgccgcgttctatgtaaaacaaatcaaagattacagactagtatgattttgacgatccaataagcagatggattatatttgaactgaccgctgcagttccaatttacaaaacagaatgtaccacaaatgataataatgttttcattttcgacagcaaacagtcaattaggcctaaacaagttgctacgagctagtgatttgtcctaatgatcagtagcctattaatcgaagtccgatgaaatgacccctgcacacacctgagcttcttgattcgaaatataattacagccgttacgtgctcacatttaaaattagagggttgcatgtgcattcctagatacgaaaattaattggaattttggatttggatgggaggaaatatcagttgcaccatcgccgaagagattaattccaccaaaaccatatgtgtacgactctgcacgtttctttcccctaacaaatacatgtacacacaacaaactcttttggaaactactccatatatataaataggctatgttcattctaatgcccaagtgatggaagagagtatgacgaagcccacgacgatggccatttttctttctatagtgctactatccatggcacagcttccctctctcgtcgccggcaccggccggccaagggtcataatcatcggcgccggcatatccggtacgcacacaagtacttttaccgtcggtgatatctacgtcactcagtattctaagtttaccgtctacgtcactcatagtattctaagtgttactaatagaaatgatgttagctgtaatttatgaatttatatcacacatgttacatgttgttactcccttcgtcttagataagggagtgtgtattttatggctggtgcccaatatgcaagatgtaattttagtttgattcactatcttcctagattaccctttcataatgtgtatgcatgcaaactgccacaacctatacacgcagaaagcatgtgggcatgcaaaccaaccaggcataacactaactcactccttaactaaagccttagaacgctagcatacccaactgatacccacaaatctatctctaaaattatatttttgggatttataatttaattttaaggtgtaaatagatttttatctctaacatatatcttgaataaactcataataataaaaagtagacaaactcctaattaccaacatatacataaacaaaaatcgctctgcatatcatctccccacgcgcaatctctctctatgtgccaccctctccttttgttgtgcggaaatttggagtgagagtgtctctcaacctgtgaagagcaaaaaaggacaaggtgattctaatttttcggataaatatttaacactaccacataaatgattttcccatatggccaaaactcattattgttggcgggtggagcacctacctggagccaggtatctgcaaagaaaggcacttccccatgtggttgcaacaactgcatgcaaaaatgcattcttgcagtcaggcgtcttaaggaggccgcatgtaaagacctgatttttgcatgcaatcaagtaaggatgtctgactacaacgattttcaataataataataataataaagaaaaaaaaaatccaaaaccctagatcaggcactgccgccacaggcgtgagtccgccactaccaaggctgcgccgttggatccgtgaggaagaggaccactgtcgtcgtcatcgatgcagtccgctgcctgccgttgtcaacatcgcgaccccaccgcacccaaagccagcggcggtggatccaagagggagagggccaccgccgctagatccgttagagagagggccctaccgtcgtcgccattgataccccgccgcaccagaggccacctgtccgcctgtcctgaggccgttgccgccggatccgtgagggaggagggcccccgccgtaggatccggctaggagagggcccccactgttgtcgtcatcgataccccaccgcaccaaaggctggtggcggatccgccctcccgaggctactaccgccggatctgcaagggggatggcccctactaccggatccacgcagggcagggtcgctaccatcggatccatcgaggaggctacgccgctgccgccgttgacgtgcttccccgccgtcatcatcattgatatcctgcagcaccagaggccaccgctggtagatgcacccctctcgaggcttccgccaccagatccgtaaggaggagggccgccgccgaatccgccgaggaggctacgccaccgctgctgtccacgcacgcctctcctccaccggcttcagttttagaattaggtttatttaaggatattgttggtcatgctcttaattcactctctccttgatattaggaaaaaaaattaggaaaaaaaagtgcaccctctaattaacgacgaagggagtaatttatgcagaagctataagaacaattatagtcccatagatgtgtgctggtaacccaggtgcttgctttaaatcctgatcttcatacataaactaagacgacatatagttctatatagatgtacatctatgttgtgttgtgcaggtatttcagcggggaagcggctgtcggaggctgggataacggacatattgatcttagaggcaacagaccacattggcgggcggatgcacaaacagaggtttgccggcgtcaatgtggagatcggcgccaattgggtggagggcgtcaatggtgagaagatgaaccccatttggcccatcgtcaactccaccctcaagcttaggaacttcctctccgacttcgacagtcttgcccaaaacgtctacaaggagtacgtacattccatgagtgggtggatcgattgaaataattaaaactcgacacatgattaattatacagatttctctaaaaacatattttgcacatatttacgtgtgcgcatcatagtaatagacaagcactaatcatctgccaattccaatctgtcaccgctgttggtttgggaaaaaaagagagtaattaatgcccagttgtcagaagtactccacctattcacctttcatttatcaacaagagagagactaataaaaaaaaactttttgcggcccatgaaatggaatagtatacttctaaataaattaaaatatatatgcaacttctaactagaaatttgaaatgttaatgaaaatttcaaaaagagactgaaaaactttcaaaatgcaaagtttctgttgagattaaaactttcatatcattaaatattaaaatggccataggtaactgttttggacatccatatttgtcatttaaacagtatagttttgaacattaacttctactcggctgctagctgcgagaaagttatataaaaagaaattacgttatatatatagaattttacttcacatggtttggccaaataacatataaataaaacctccaattatagaaatataaataatgtagccatataagaaaaaaataaataatagatcgatgatctaaacatgaaaaataatttgaggaaatcctccaatgctaaaattatagacaatgtagcttccgtaagagagaagagataatagatcgggtccaaatgctgaaaataatttgaggtaattgtgatagaaaaagctagaaacaaaagatggtatgcattaattggaacagattcatgcagggtatgcaatttcggtaacaccgaaatttttgtggttgccaaaatttaaaaaaaatcatggatttcagtgtttttttaccgaaattatttaaaaatttaacatcttttgacttaattgaaacaaattttgatcaaattcataaatatttgaaaaaccaaaaattccagaggagatttgtgcttgttggtacggtctgaaattaccaaaatttctaaaatttaaaaccgaaattgcaaaccatggattcattgagaggagatggcaatttgcatcatgcataagtgatctaaaggctagaaacagatgaagtgacgtggcttaattagagaagataggattagcattatcttaatggagattcaactttgttagaataaatcaataaagtcaacgtataacaaacaaaatataaatttaagttttgatctttcgaaaaatagtagtacatatactcagacaaattaacgcatatggatatatacccaagtttcaactagggtacatatatatgttcaaaccgatgaatgtttgtgagtgacatgaatagattttacagcaaaacttaattaattgtgttttcagacaatagaaacaaactatgcatgcaaatatattattgcatccaaaatatatatatcctactagcatacatatgcatgttgcattatattgcctgaagttgaataatttcagcggtggcctctgcgacgcagcatacgtgcagaagagaatcgacctggctgatgaagcggataagagtggggagaatctctccgccacactgcacccaagcggccgggacgacatgtcaatcctttcaatgcaacggctcaacaatcagtacgtgcctttgccgctcaagtctttacttaaaaataaaatttaagcacttagaaaacacttcaaaagctatttgaattgatcattcatgtatttcaaatagtagctccaaaacaaatggaatttgcttaggcttgtgggcctctgaaaagttgtaggcttgtgggtttaggcccaaaatgaaactaataaccagtctagcagatacagagatacttcctcatgcaggaatgaatacgaaaccaatctatctatctattatctattattatttactaaaaatccatgaaacttcctacaaacactcataagccgccacgtggcactcctacaaacgctcctaaaccgtcacatggcacttttaatctaaccgtcgattttcacttaaattggtggacccactgttttagactattagattagatctatttagaaaagtcccagcttcatcgaaattataccagaaaaattaatgtacataccggatataaaccttccgtattgttctcttaaaaaaaccaaacagacgtatacgtacgtacgaagattaaaaaaaaaccaaaaaaccatatgtatgccgtaagaacaatacggtctttcgaatatagtgtagtacgtattgtgtatgcctttctctgttttttatttatcaatgaacagcaagtacatacttaagacttatctatctatccaccgtctttaaaataggatttcctatattataaaataaaatttattactccacaaatatgcactgttaaactagattaatataaagtaccaaatcaactgtctttaaatgttcatcttttaaattatttctcaaatatatatctaacttataatcctttgtctttctttaattaaataaaatactaatcacttataatcacttataatagttatatgttatatggaactgctaaattcattacgacacatggtgccaacatataatacgtaatgtgataattatttttcaaataatttagttaacatataataactaatgtcatgatcatttttaaaataatttcacatgacaaaaatgatcaacttggtgtcaaattcgcttgacaaatatataacactaattcaaatctacatgcagaaaaagtgaaacaacattgtggtttacaatcagatttgattttattttaatttatgtgatattgagattctcttttttttaaaaaaaatagaactatttgatgggaatttccaggcaaagaccttgctatattacgaccccttaatccatcaggagaattacggtcatatattgtttttctttgcgaaattggtttggtaacaaatgaaaaatcatttgcatcaaactattcatcatatattttttatactttagaaattctaatatatcaaacataattgatgatgtatgtcatacaccccactgaagtaactataaatgcactccaacaaattagttactttaaataattttggaaaatatattcttagaattagtaaagatgtcacatgtaattatgaacaatacatgaatgaaaacaaactgaagctaaactatatatcttagtcaaaatataaagaacaatatggtactcctagatgtcacggtcgtatgtctgtttagttatattttttttatcaaccttgctcatctgaaaagagaatattgtatctacacaataaaaaaaaagcattactgattaataccatgcacaattttgtctacacaaaactatgaaaaaattcactagggaaatattttcatcaccaacattccctcttttttttcccataaagggcaccaagcatgctgtgctaccacaagtgtagcaaatgtcatacatatggttgagttgaagccaccccggcaaaggccactattgacaatagtgtataactttgtacttactgatgcaattatctatgagggtgctgatagtgaactagacattaaaattatgcttcatgctggcattgcggggcataactatgtcgactcaagacctatgtttaaaggcagtggagaaataaagcctcgacagatacggttagcttcacccattaaaggggacattcatatatgattttaacggtcatcaaagttaaaaaatcttataaattataagaaaaaaatgatcaacggtttacttaaattatttagaaaaaaaatagaaaaataaagtccccaaaacctcgtcctccccggcacatgcacaaaacattgccggtccccttcaaccttggctcatgctctccgctctccattcctcccccttcctatgaataatactgaaaagaccatatttttaatatatacataacatttctaatctaattattgctctgttaaataattaaaccaacaattcttgatccataatgcctatatttttaatctaaaataagacttgtataaaataaaatagaaaagtagaaaaaaagtcaatagggattgaatcaaatcaattagagagaatatagtaataaatttctgaaaaatagaaaattggaacaaccattgtatgttccattgccataaccatccatctatcgtggtattatgagtttctcatatattattgcatatataagacatactaaggtagctggacgtagtagtacttagttggttaaaaagttatatatatatgctactatcaactttaaatttaggactcatgttgcctagggttttttttaaaagaacaccataaatcacatatataaaagggaaaggacgcgtaaaatatatatatctcctatgtatttattgtctcattctttcaagaaaataaagaagatcattgataattgcttatagtaatgaattaaatattatatagttcaaaccttacaaatgtcttgtaaaaaattatctaagcaatagcgatgaagaaaatttataaagaaatactccctccgtcccaaattataccaactataatcaaactcggtaccttttaactaataatcatactaactatatctaagtattatgcatgttacatcactagatttatattttgaagtactttcatgtgatgctaatttcatatttgttgggatagaatggaataaagtactggtcaaaatatgttattaaaacctgtgtaaaaaaatataggtcttataatttgagacagagggagtagtatttttcaagcatagcaggtattgtccgattgatactccatcatccgattgatattcccagtgtaacctactttacatgcccacgcgaatgcgcgggctaccttcctagttctaccagaaagggtaaatgatagtaccagaaaaccaaatctcttttaactaaaatagcccttaaacctcacgaagtttggtctgactgatgtatatgcgcgtcagtctgactccgtagtcctgctgatctaatcaccgtgtgcgatgaatctgcctgcctactcgtcaccgctggttaaaccgcccgtcgagtagaccgcttgtctgatgctggtctgaccattgagatccaaaaaaaacacgtctcgacaaaactcttaaaagtagatcaaccgtattgtatcaaattgtgtttacaaatcgcatctaaagcactgctctttcacctcatgtactagagtcaaagtctcaaagcaagaactaacttttctcccttaaaagtcgatatactcctaatatcaacccctcgcctatttatacataaaacatagctgtacctagccatgaatcctactggaactaggaatcctaatcacacaaaaaaacccctctcgaaccaggaaaacaacatccctatacaacaccaaacttctcaaacttaggctctaatctaaatttgactctactttccatacacacacaacaccacgtgtatgccataagagaactcatgtatattgttctctagtctgagcatctcgcatgatctcgttgatcatttgtacctcaagtaatgcaaaatttcatatccaagcacaagttcacaccaacttgtctcacatcatcatgcaaatagtatcacatatgtatctaaaccatttagaagtcatgaatatgaaccgattttaaaaatcgacaaaaccaacctgaacatagatgaaaaaccgaaaacattattcgtcgtattttcacatatacttatctttgacaattatttttcaccaagattacatcatcacatgatttcacacctccaaattttaatatatgatgccattggcattgttagatacttttggttgtccatattaattttgttattatttgatttgtcaataaatatttttaagcatgactgatatgttttatgcttaaaatttttaaataagacgaataactaaatgtcaacggcaacgtatattaaaaaccgatagagtttttttggccgggccagtggacggcgtcggccaatgtattaagcatgggaaagaaaaacattttacaaacaaacaacagtcactgctgtcgggaaactagaacatacaccggtagtaggctgggttaggccagagactaaatatataactggcccgcctgacagatagtatacaacatacttctatgtaaaacaacttaattctaaagatgtatctagataacgtgtatgtccaaatacaagctcagaaatggattagaattaaaaaaaattttaaagatagagggagtagtacaatagttgtacaagctgtgattcagtctctctgttcttctgggtggtggtggcgtgcaaatccatgaaatggccagcctgcccaacggcccgtcgtcgccggtggacatggtggtggactacttcacctacgactacgagttcgccgagccgccgcgcgtgaccagcctgcggaacaccgttcccctcccgaccttcaccgacttcggagacgacaactacttcgtcgccgaccaacggggctacgaggccgtcgtctactacctcgccggccaatacctcgaagccgacaagtccggcaacatcgttgacgctcgcctgcagctcaacaaggtggatcgatcacttctgtttctgtaactcatctcgatcagctcctgcgctaatgctacgattgttttcgtaattggtcttttctgtcagaaaagatgaactgattaagcacgcgatcatcatggtggtatatatgatcgatgcaggtggtgcgtgagatctcctactcctcgaccggcgtcaccgtgaagacggaggacaactcgacgtaccaggcagactatgtcatggtttctgcgagcttgggagtcctgcagagcgatctcatacagttcaagccacagctgcctgtcagtttctatgtccaaatgtccttgcatgttcaacatatcctcttccaaatataaattaagatgtgcatatcgagcagtcaaatttactttacgtttcttgcatgtttccatcagtcttggaagattcttgcgatctaccaattcgacatggccgtgtacaccaagatattcgtcaagttccccaagaaattctggcccgaaggggcagggagggagttcttcctctacgcgagcaccaggagaggctactacggagtctggcaggtacaaaatatgcagcaatatatacaatccactcacatcgaattgtagtacattgcgatgatctgaacattcttcaggagtttgagaagcaatacccggatgccaatgtgctcctggtgacggtgaccgacgaggagtcgaggcggatcgagcagcagccggacagccagaccaaggcagagatcatggaggttgtgaggagcatgttccctgacgaggacgtccccgacgccaccgacatcctcgtcccgagatggtggtcggacaggttcttccaaggcagcttctccaactggcccatcggcgtcagtcgctacgaacatgaccagctcagggtacgagctgttactccaaccaaatgctaatcgcaattcactacagatcatgtttttcattgctactttgatgtttctttggtcatgaacaaatgaggtttaaatttgagcttaatttggttttgtgtatgttttgctgtttctgcacacaaggcgccggttgggagagtctatttcaccggtgagcacacgagcgagcgctacaatggctatgtccatggagcttatcttgcaggtatctatgcctaatttgttagcctatgtctctaatgttagagagaccggagatgtaaaccatttttattgtcttaaaaaaatacctgctctagtgattgacgagatttgtaatgctaatatttgtgctttattatgtgctgtgcctttgcttgtttttgtcaggtattgactctgcagaaattctgatcaactgtgtgtgtacagaagaatatgtgcaaatgtaatgtcaggggaaacttgctttcccctgacattacattcttcagttaattaattctgcgtgttgatatgtatttttaggcgcaaacattttcatgatggaatgagaaatgtgagattccacaatttgctcatcgaggtgtgtagggccttttgtggaaaattatggtgtttacattaattgttttcttatgctacttcttgttgctgaataattcagcagttgagctgatgtatatatgttcggatatggtatcttcatatatcttcggatatggtatcttctctacagggaccaattcaatagtttaaactataattttcagataaaataatgtccaatatccccacttcgttttgttgggactctcatgtcataccctacaccttgtggatttctaataactaatggtatccgttctcttaaaaaaacattgtcaaattttcccaacatcgcaattatataattggtttgatcaatataattaatactaaaaagtcattgtctcttattgcaaaaacatactccctctattctataatataaggtgcggttaaagttggcacggtctccaaaactaatctttagcttataatttctcatatactataaggtttgtaacaacaaaattataacaatatgaaagaagatctaaatctcaatctattatactaagtattggtcaaatgttttaaaagttgaatcttgaaatacgtgcgagcattatattatgggatggagggagtatttaataagttattgatttatgataagatgggataattcttcgaaagaatttattattttacaaaatgttggcttaaattttaatttttatagtacattttgctaatcatgtgacatcatatatgggccgcagtggaacgtacgattgaattgattagggatcatttttcagtttataattttgatttgagcaaaggccagtttcccatctctttttctcatcagatgttatatttctgttttttgtgtgctccatataagataggctttggtcgattttgaataacggcgtttagtgtactttacaaaattaagaattcatttataatcttcacttgtcacgggttagtctagtcagctctttaaatgggaaaaaaaatcttggacaatatggaggaatgcatgaggccaacatgtaagacaaagtgccaattggactaaacccgcagacatgatttgtacagtttgggaatcgtgagtggtaggatatacgcgaaattcagctaaaagagatgggagatagagatttttatacaggttcaggccccttaactaatgggtaataaccctactcccgttgaccgaaactggtgttgcctttatatataagtatcacacgagtacaatatatggaatgacctaatctagtcttcgtcggcttggcaacatggagctctcacacttagtcgattgttaacgtagtcagctttctcgaatatgaacttgatgagattggagttgtctctagatctctcatgtcggtatttgtggcttctacattgggtttgtctatatatgtattggtttgtattttgacttagcgtgtctagatctgtctagatgtcttggtgcgttcgttactcctcttctctccccctatgggttcttgtatttatatcgtcgggtacccctttacaagtagaactagggaaacgagtatggatacgatccgagtaatccttatagtgcccgagtagactctgtttctttttccttatctgaaacaccttatgtttagtaagctccgccgagcccaacccaaaactattgggtatacaatatctataacactaacaccaaaggtacacccataagatgctaggcaaaccaaatcctaattcatgtgcaattatttaatttttgctagtgtatggctaatcgatccgaatgcagatatgtttgaggtactactctatatctatataatacggctaaaccatatttaattatttaataagatagatggtcagatgttggacacagaaaaccacaactctacttaaaatgggacagagggagtagctctctcagggttgcatcgctcgttaagattaaactgagagcactatcattctagattgtaccaattaaggaagtttgaaatttctctctataaaacgatttgttacaaatacatccctcgtaatgcaccttggtttgagattctcccaattgtcaattattgtccattcttcgcacacgtacgcgctcatctgaaaaataataggcaaggaaccgtggtcaccactcgtgttaggcatggccagataacatgaccatggtggcttccggcatcccatgcatggtactcagtacgtcattgggcgaaaggggtcacgagtctcctctacaagacattgcggacgacggaagatgagctatatattacgcttgcctcatggggtttcgtgagctgcctgatttattggacagattaagatgaggaagaaaatgtgtttgaaatagtatccatcatgagatgccctaattcatataacacaggtggaaagagaaaaatacaggaggaatctcaaacaaaggggaattaggagatcgaggggcaatttttaaatcttatggaaatttcaaacacagagtaacatttggggttttttttttggttgcaattttccataaaaaaaaggcgctgtggtatatataagtacaccgatggcacaaagcatataattaaatgaaaaaaaaagaatactccctccattttatattataactagctttgtctcttttactagtcaatttcttttagtttgatttaagtttatagaaaagatttaacaacatctacaatgccacattagtttcattaaaactaatatttaatatactttgataatatgttaattttgtgttgaaaatattgctatgtttttctacttgtactataaaacggatgtaggaatcaaacatgaaaaggaaatagctagcaagaaaaaaaagatacatcaactaaaaacatgaagggttcttttttattattatagtccgagtatttcataaaaaactagatgaagaagaaatgcaatcaggttcaatatttagaaaagccattttatatttaacataataaaaaagatataggtttttgacatgcacatattttagtttggttggataaaaaggaaagcaaaataacaattgaagcgagataaatggatatcatcagaaatactagatcgatattaattagagaagatcctctaggatatatatattctcgatcatatttgaacatatgattcagaccatgcgataattattttagacttttttgttagtgttggttgtgcttaatattataggatggagaaagtacagatgaaatagaagaattaatatttagaatgtagatatatatttcaatatttgttatcaagatgtattatggagattatttggatgtgaatccagccaccccggtcccagcctaccagcactgaacccaatcatttaattactcgcatgcgatgcaagttgccatgttgatgaacttctgagcgcaaaaagctaaacacgaacagctaacgaaatttaatcaaacaaaagggaaaaggacctgacaacaaatacctgcaggtcccccttttacaaatgaaaatatggaatacacgggatattttataaaataatcttcattttcaaattttaaaaagtgttccagttgtacgtacgcctcacaagtaaacaaaaaaatattaaatttaccacataaatcaaaatccataatcaattgttcatacattaacaacaaaaatattaatttaccacacaaattaaaagccataataaactgtttataaaatatcaaaatttaatattaaaatactagatataaaaaaaattataactctggcactcgcatttacaacttttttggaatggtaagcgatgtacctgatgatggctaggtgcttggataatttcatcaatcttaaaatttgtcaatccaatctcgcgagaaagttgtatgtgtattcgtttataagggtgggtgcgtacgtgtgtgctaatctgtagcgcccgttccgtcgtggcgcctagcgggaaaattatctcttaaaaaccctaattgcgaaatttgtttctttgcttgttgtctagtgtccgtgccatctcaagatctcaatccccgatctatcgtcgagttcaattccaaatccaaatccttccaatcaaattcctccgcaaaagtctattttgcctcccccgaggtcgatgggccgaatctcgctcggcccatcttcccctcttccccggccccctctctccccgggcgctctctctctctctctctctctctctctctcgcgcgcgcgctctcccatctctcccccccccccccccgctcggcctcgcccgtacgctgctcgcgcgagcgagagccgccccgagcgcctctctccccactcccctgctcagcctcgcccgcacgccgcacgcgcgtgcgcgtaagccgccgcgccgagcgccccctccctttcccctcgctctaccgcgcctgcagccgcgcagccgctcgtcctcgcgagccagcgtgtgcgcgcccgcgcggacgccgcccgttgcttcccgcgcgcgcgtgccgtggtggccgaccgcccggtcgccgccgccgtcagcctctgcacgcgcctgtcgccagatcaagctccggatctcaagcaaggcaagccacctttgaacatcttgagcctatatttgaaatttaattatattgcttgcgaaatattatgcattgataagatcacacttaatctgttgtcccgtctgcaaggcagattggcagacctacctaatttgttacatttgatccttcctttgttaattgttataccatgtccccttgtaaccacccagttgcgcctcgatattcgtgcactctgtgcgagtatcgacggtcgccttcaaacttaaaatctgagtaacaacttgggtaaaactggagttttacaaaagacttggaaaacccgacacctgggtcggtgcttgcgaactaaatgaatttccaaaaccacggaccggggaacgtaccgggtgtacggtttcccgctctcgcacttaaggaccgatttccttggaatttcatccaaacataagacaagtacgaccacatgggtggaatgggacacccctggctgagtaactagcttatcaggggagccttgatgccgagagacatgtggattcgccggggtggtgtcggggaggacccctgggcttcctggcacagtatggtctgggacctaacctgttgttggtctgggacccctctcgtcggcatatggtaaacctgtatcggctttcgaaatgccttgtcatgaaagcttggaggtctcccgacgtggttgatccccacgggctgggtgatccgggttagtaatgtcgtgtgggtaaagtgtaccccctctgcagaggttaacaaactgttcgaacagccgtgcccacggtcatgggcggatgtgaggtgattcctagcgtagttttgtctgactactgcttgtgaaattgctgttgtgaaaaggggttcgatgtttgaaaaatctgcagctgatgggatcagctaggcccgggtggccgtttgaaaagttgttggcccgggtggccgtttgaaaagctattggccgggtgccaaccctgtttcaagatctaaagactgatacattgcacatactccgaccggacgagacgcactgtctcctccgtgttgtttgagaagcactcacttagactttttagaaaagagttcaaacaaaatcaattacgaaaacaacagcctttccttgaagcctgcattaaacacttatttcccctggcttgctgagtactcccgtactcacccttgctctatataaataatccccccccagttgctgaagaagatgaagtggatcctgctgacgaggagttcttccaggagcaagtcggctacgatgagttttagggtttcggcctagttcccaagtcgcgcctgtgacgattggtccaagtcctggcttccgctttccttttgtaatgcagttgtgatctcgggatctgtccgcagcccaacatgactgtacttctactctataaaaaagagacctatgttgctgtgatactctgtctccctgtgataccagcactgtttcctgggactggtatcgattaacaggttaatttggagcgtcacgggctagttccggtcgggactagttcggggcgtgacattatcggcatgacggctatgcgtttctactgtgttttaattagggttttaaaattatgatactgatataaaaaaaccttttacgctggtttcaaaatagctaacgcgccaacggcgggccaattagataggaaattaagtgaggagacaagggtgtatcgcgcagcaagagggcatgttgtgcagcaagagggttagtggccaatttgacaagttcctcatcagtctgcacgagctcatccaacttcaccacttcgcccactactacaaaacattcaaataggtatcggtactataggtaccggaagtgctaaaaccggcacctataagccttttcccacctccgcggtccgaaaacacgaaaaaccgacacctttaagcaattataagtgtcggttctgtaaaaaaaacagcacctatattataggtgttggatttcagtaaaaaccgacacttataataaattaaaggtgtcggtttttttttaaaaaaacagcacctttcagatcgagctgtgagccgagccgcctgaggagcggataagggagaccgcgtctttctcacgcgtctttctctctctcggtctcttctcttcctctctcttctccaccgcacacctcctcttctcttctcttcgtcctctctttctcctctcccggcggcaggaagagcggcgggaggagcagcggtgtcggtgtcggtgtcatcagcaacgtgtgtcggcgtcgtcggcgtgcggcaggaggagcggcggctgcccggaggcgccctccctcctccagatccgacaggaggaagggcggcggcggcccgacagcgccgtcccctccgctgtagcagcgtggggcggcggcggcgttcggcgggaggagcagtggccggctggaggcgctctccctccgccagatctggcgggaggaaggacggcggcggcccgagatcaccctcccatctgcggcactggcttgcgacggcgttgtcggtggcggcagtggctgatttttgatttttgatttgttgatattttgatgtgatgatttgttcatatttgttgatgtgatgatttgttgatattggttgatgtgatgatttgtgatttgtttgatctagatgtattcatggatttagggtttttttgggatcggcttgacagcacgatgcatcaagccgatttgttttggctcgttttgaaaccggcacctttaggcttctgtgatctgtgccactctcgtggtgtcggttgggaaaaccgacacctaagggggtttcccaaccggcaccatttaagggttctgtagtagtgtccccaaatccagtgctcaacctctcgtcgtttggtggagtggggaagaagaggatatttcttcgtcaaggtgagaggaggggattgacgtggggacaaacaaggctgagtgacatgcaacatgcggtggggaaaatgatgctatagctcttgctcacttacatgtggcaatgtgggccaccagtccaatgtatgctttggtaacaaaatatggcggcctaaagtgaaagtagatggtccaacttgaaatttaatttgatgataaagattagttcaaagtgtaattcattttttgattttctttttgttataatttgtatttttattaaaggcactttaaatatgacttgttttttatttttaatataatttttcaataaagcgaatggccgtcaatttcatcgtacattaaaaatactggataggtaatgattactcccgatttgctggaaacttgacacacacacgatctggcttccaatcaacacgacccgaaccctgcaattgcagcaccacgttttctctagttatcaacctgattaacctcaccgaaggctaatccttgtgtgcgaatggaagaaaacaagtaagagcaacgtagattgcaactcaatttgtagatgaatgactaagcactcgaatagggttccacaaaccgaaccagtgacgcaactgtaatggcaaaaataatgtaagcaaaactcgagtctaaactatggcggctactgaataaatatgattagggacatcctagggttacccggcaccacccccttggtcttagcgcacgatacaatacaaggcccaaagctcaaatcagaatcagactatgtgaggtatgtgacttgttttgcagattcctaactgctaaggaggaattttgatgtgagaccaaaaccatatgaaagttgcctccataaactttccaacaagtactcatgtgacctaagattccttctagactagagtctagcttcatttgaagcttatgctataaggagacctgaatccgaatccgaaacgtgtacaatttcatcttttgccttttacagaccaaaagtggtgtggtaatgttggagtagactttgggaaggtcttgggttggtccccaataaacttccttgataatccatatatattctttgcgctcggtctctttccttttactcaagcaagtacctcttcaaacgagaacagacactagtactgaaagggtttttacagacggcccgaaaggggttttcgcgtatggtagggctagctgcacacaccaaatgatatgcgaaaatcgctatttttgtgtgcgggtgggcgcacccgcacgcgaaaatcagaggttcgcgtgcaggtgcttattttgtcctcacgcaaaaataaaaaaaaagaaccaaaaatcacgaaaccctaaccctagaagccgccgccaccatccttgttgtcaccatcgttgcttgaagccactgccgctgtcctcgtcatctccgccgtccttgtcctcatcctccacctcctcgtcgggcataggggtggtgggatccgcgtgggagaggaaatggacatcgggtccatccctcacgtcaccgttgccacgcagtagaggccggatcctccgccgccacgcctcccacccaccaccgtcggatctgcctccgctagcaccgccgccgccggatccgcccctctcgagaacagccagctgcggatccatgaggaaggcaacgaggcctctccgctatcaccattgctgacctcgtccaccgccgccaagcctcccacccaccaccactggatccgcctcccctagcaccaccgctgtaggattcgcccctcttgaggccagccaaccgcagatccacgagggaggcagagagacccctctaccgttgttgtcgctgacctcctccgccatcaccgtcacgcatccggcagccaccaccgccgagagagagagagaggactgagagagagagagtcacagtggaggaactagaactcgatccttaggcgtcgaaagtgttggagctcgagcttaggaagggatgtcctcttgttcttccccaccagcaagcaaaaagtgcatggtgaactcttctccactttctcatttttgctatcggcaaggaaccaacgcataacatagtcagtagtacaaaacgtcacattcgtgacgctctcatagatatcgattcactttaaaccaacacctacgagggatttttcatgcaaacaaggctttttaaaaaccgacattcatatatgatacatcagtgccacctatggattgagccgaaccgacagcaccgaagaaaataactctagctagccaggttggtttttaagtgcctgcttaaatgccccccacccccctgtgcacgcacgcgtgcaaattcgcttcccttcttgatccatccgccctcatcctattctcttctccatccacaaggcaaccatatttgtgtggggactttggggggaggggggattgatggcggtcaacacatcggcgggaagattcttgactccatattatcccatggggagcaacagcggtgatggtgtagtattcttccttccagatatgtgttcttgtctactgacttgtgcatgcttgattcaatttttttcttcgatgttcatggaaacctttcaatcttagggtctccatgttgttgttggatggatggtggcatatggtgttgatgaatgtgatgttaatcaatgtgttcttggatatgggtcgctacaatttctttggttccatggaacctcataggtatgggttcctaaattggcacctatatgatttctcctcattggttttgccgaaactagcacatatgtgggttcccaaccgacacctatagggtgttgcaccaatgagtgtggataggaacaacttaagctcgttttgccttgctcatggccacaaccgcaaactcagatttgtatggttgaagaacgagtggatagaaaagagaaacgtgctcaaggtgaaacattgcactactacagtgcaattgcatggacaaccgcacgcaaaaactgattttcacgggtggttagttatggcgctgcctaaaaaaaggtaaaacaataaaaattctaaaatcatgaatccttagttccgaaccatagctccggcggcggctgatctgccgctcccccgatgccgtcgtccctgtagctcccgaggcgagcccgaagcccagagcccactatacatgaagctgccatcgccagtagccaaccaccttcgcccctcgaagggccggcgtcaaaatctgcgcactacggaggcactgcctccgaatcggcccctcccagcagtatggatgcacctgccgcggggccgctggcgccagctcaagtttgctctgctgctctcgtcgccacccctcctttagttgcaggcactcccgtcgcaactgtcgtcactgctcccatcgtcggttggtggaggacacggtgaggaagagaggagaggatgagggaggagatgtctcgagaggagaggggaagtaaaggaggacatagaattttttaagggaggagagaaaataagagggagaagactaggtggccgtcctgttgctaagcgtgcctcttaacaagtttgcatatatgtatttatttgttagctcaaaatcttttaacatacgggtgtttttagcctgtttggagaaaaaattaaagggattgtctacaaaaccatttttagtgtactgtttagcaaacaaatctcgctcaaattgaggagggtagtttaacataccctattccaaattatacaatggtgtaaaaagagatgttccactatgcaatttactcttttttataagtcaaatgatttaattatcgaacacatgtctacaagataacaatgtcatagtttaagctagagaggaaatattaattagttgtttccatatatgacgtgacatgtatatgcatatatatgacttccaggtgcaccgttaccgtttgtttatgacactgaagttaaaccttagatcggaaattcggaaaggaaaacatttgacctgtacgcataaaattctcaagggtccggtgtagttatatttatagcgccgtattttttacttaaaaaataggcaacacgtatttatattgtaagtctctaaattacatatgtaaatttagtgtatttataatataagtttcaaaattacatatgtaagtctcaaaattatatagtttttacatgtgtaaatggtgtgtaagtgggatgtaagtggggtgtaaatttgtattaaggaatagcatgcatgcatgcatataacacgaaattaattaggagccgtttcactcggatttgcatgactttagaggttagctagcatgctttcaggtctcttggcaaggaaaaagtatggaagcacggatcttaaacacagatccaacggccagagaactaattgtaatcaactaaaaaatttgtcgacacaattatagcaaatacgaattctcaatggctacgcgttgaaatggaaggcgacgatcaatttgtttcgctggtcggtcaatttgttcgtcttacaaccttaaaacatgcgtgtacgactcgatctatatatgtgtcacgtttattttcctccaaattaacaatacaatgtacacacaacaacctctttcggaaactatatatatatgtaggtacaagttcattctcgtgccaagaagggagatcgagagtacttgaaagacagtatgacgaagcccacgacgatggccatttttcttgtcttagcgctatccatagcacagcttcttccgtccctcgtcgctggcaccggccggccaagggtcatcattgttggcgctggcatatccggtacgtacaatctatctattatattattatagcactagaaaaaagagccttcacgttcgctctgatggcctaaaaatttttacattaatcggagaaaaagaaaaggcagagtccatatagaaatacatttagaaatagctgaaattcggaattaaaaaataaggaatattagaagaggagactagagtccatatagaaatacaatttagaaatagttgaaattcggaattaaaaaataaggaatattagaagaggagactagactccatatagaaatacaattaggaaataactgaaagtcggaattaaaaataaggaatattagaaatagagtatagagtacttatagaaatacaattagaaaatagctaaaattcgaaattaaaaataaggattattagaagaggagactagagtccatatagaaatacaattaggaaatagctgaaattcggaattaaaaaataaggaatattaaaagaggagactatagtccatatagaaatacaattaggaaataactgaaattcgaaattaaaaaataaggaatattagaagtagagtatagagtccatatagaaatacaattaggaaataatagaaattcggaattaaaaatggggaatattagaagtagagtatagagtccatatagaaatacaattaaaaaaaatagaaattcggaattaaaaaaaaggaatattagaagtagaatatagagtccataggaatttaaaactaactaaaattcagaataaaaaggagcctccatgttcgctctcatgatctagaaattgtcacattaattggagaaaaagaaaaaagcagagtctatatagaaatacaatttagaaatagctgaaattcggaattaaaaaataaggaacattagaagaggagactagactccatatataaatacaatttagaaatagttgaaattcggaattaaaaaataattaatattagaagaggagactagagtccatatagaaatataattaggaaataacagaaatttagaattaaaaataaggaatattagaagtagagtatagagttcatatataaatacaattagtaaataatagaaattcggaattaaaaataaggaatattagaagtagagtatagagtccatatagaaatacaattaagaaaaaaaagaaaattggaattaaaaaataaggaatattagaagtagattatagagtccatataggaatttgaaactaactaaaattcggaataaacatgataaaattaaaagtagagtttagagtccgtataaaaatacaatttacaaataactaaaattcgaaattaagaaaaacatgggaagaagattttaaagtcaatataggaatacaatttagaagtaactgaaatttgaaattaaaaattaaagaatattgaaagatgagtttagagtccacatagaaatacaattagaaataataaaaattcagaattaaaaaaataaatattaaaagacgagtctagagtccatataggaatatatataatttataaataactaaaatttgatatcaaaaataattaataactaacatgtatataaaatacaatatgaatattacacattagtagtttcgtaaagttattgtaaaatttaaaattatgttgtcattgtaatatattttaataatataatgagaaaacatatatgctattatatgagagaaaatataatgatgctagccgcgcaatctgcgcgggccaccatgctagttacttttacagtggtatctaccatcactcgtagtattccctactccctccatccaaaaataaaccaacctcgtagtagggtataacgcatcctatatgttcagatttattgtatcctatatattaagatttgttgtattaggatatgtcgcattctaggttgtcttattttacgacagagagagtataacagttgccggatgaaaatccctcgtaggtgtcggattcccaaccagcattaatttggaggcgcctttgcccgttcgcataggtgccagttataaaatcaacacttatagagattataggtgtcaattctatagacagacccgacacctataatctttggaaaaaagggttgtggaggcgcaagggatcaccgacctggtagcaaagggcgacaaagctccttgtagaagtgcttgaagtgtcctagcaactcgtcgacagcggggaaagataggcggtgggccccgggcgtgcagtccctgtggaacttcaataggtgctcatccaccagggttccgagcgttgaacgaggagtccccctgtgcatgagcacgcatgtgcacacacaatgacacgaccacaccttagacaccaccggaccaaatcgttggagggaggaaggggaggggggagtggacattatacttgtcagctttttaattaattaacgcctatgatatattatatgtgtcattcgttttttcaaaatcggtacttatagaattaatgccagcttttcctatagctgcttaaaggtgcataggtgttggttttaaacgaaccaacacttatgagctgatatctattagggattctacagtagtaactccaatattattactatgttagccacaatgctatgtttttaattatgatgtatgttacatgttagtttatacggacccatagtacaaattatggttcacacattagagataaattggtccggtggtagataccatatataggagtagtacatatcatgagttaaaatctcggtctccacaagctgagaaccgcatgtacattgatttacatctatattgctgtgcaggtatctcagcggggaagcggatatgggaggctgggatagcagacgtattgatcttagaggcgacagaccgcattggcgggcggatgcacaagcagagtttcgccggcgtcaatgtggagatcggtgccaactgggtggagggcgtcaatggcgaaaagaagaaccccatttggcccatcgtcaactccaccctcaagctcagaagcttccgctccgactttgacagccttgcccagaacgtctacaaggagtacgtacattttcacacaaccacaagttggtggataaattggagcagctaacaacttgacacgtgattaatcagacatatttctctaatgacatgttttaattgcatatgttgatgtgtgcgaatcatagtacaataattaacacactcatcatcagttgtcaattccaaaccgtcaccactgttggttaattattgcatgcacagcacagcactcagaactgtatcatttagtattcatgcaccattcacttatcaacaagagtaactaataattggatactttgtgcggcccacgaaatggaataattatacttaatttgaaaaagttgatgaaatttcaacaagagatcaaaaatttcaaaatgcaaagcttttttttagattaaaacattcatataaatattggagaaatttcacacaattttcaggtaattaaaacattcatacacaatgttcaagcacaaaacattcaaatatagatcaagagatatatataagtgacttttctcccaacttttggttttaccttgaaactatctaccgtgtaaacatggaatagtacttggaagaaaactaggtattgttggtcaaactttttctctttcccggccactagctatcagttccccatttcttgagtttttttatttcttttgtgcgaggagttccttagtagtaaactatagatagtatgggttctcattggaagatagataggtaaacatgagagggtaaacttataaatactacctttgtcttagaacccgttctaagcagatacatcaaacggctaattagccgcacatgagaaatgtgattagcatataattaattgtattaattattaaaaactttttgatttttaatagcttgtatataaaagaaattttgtaggtaagacatcgtttagcaatttaaaaacatactaacggaaaatgagaaatagctaagttgaattagcacttcagaataaggtcttaaaattagtagctagaaataaaaaaaaattaggacgaagggagtagataaatactaaaccttctaaaccacttaagggcaatcccaacactcaaagggaaaaatatgaagaaactattatttcttatacaagacactagctttaaaggaacaaaaataaggataaaaagaaagagaagggagatgatttgatgagagtttattttaaataaatcgtctatattgggtatatagtttctgcgtacattgtcgatataacatggtatatatgaaaactagtaatagtttttgggttaagattgttctaatgatcaaccttctatttatttcacgctgaatgccacctcacagttgtacgttcgtaggcaagtggccaacaagataacagtgcccggccccatcatgcttatgggaaaccaatcgcaatagcatacaagttgtatcaaattggccataggtaatgtttacatgtgcacatggctttatgagaaaagatggacaatttgcaccatgcataagtgatcgaaaggttagaaatagttatggtaacgttacttctcatcagaagagaaaattggcattaaaaatatttagtggggattcaattttatggatgacgttctctttcgtggtccaatcttctggtgaggggataactctcggtttgatcgagtgcgacatttgcgatatggctaccaaccagaacaaggacatgacgttgtgcaatcgctacaccacaaacaatgtcataccaaccgtgacacacggttgatgatctttacaatgcaaacgagagaacattgcaagaacaagatataagatgcaatctaaatattgcgaataggtaattaagcacaaattaatagttgtgattaaagtgatatatctaatcgatccgataaatcaacacaccaactattaggggctctgaatctattgtcgccgactaattaatcgagcgaggactatagacaaggtgaatggcacttggcaaaatccaactaaaccaaaacacaattgttctagagggtatacatatacatttatagaggaaaatggatctagagttaagtgctaattcatggaggtggagggagacacttttgagatgggactagccatgtcttgttttaaagattcttgttgactcggaatgaatttggatgagaccggatgcgtttgaaagatagcgagataatctttccatcaagtccaggatcacctaaatcggagttggcatggagacgctacgtccgtttgaagtaagtactatctccggaggctgaactgaacttggacttgaaattatcattagaacgtgtgaagttacgtgcgtatccgatgaagtaatgccctcatcgtttattggaacaaatacataatgtcaacataacaaacataatataaattgaaattttgatctttcggaaaaaacaaacgtataaattctcgacaaattaacgcatatggatactgcaagtttctacctgggtccaggaacttatatttgttcaaaccgataaatgtttgtgacatgagtagattctacaccgaacttaattatttttttaaaaaaaataatggaaacttaattaattagtatcatgtatatttttttcctccaatatatatatgctaccatacatatatgcatgttgcctgatgttgtataacttcagcggaggcctctgtgacgaagcatacgtgcagaagagaatggatcgggcagatgaagtggacaagagtggggagaatctctccgccacactgcacccaagcggccgggacgacatgtcaatcctttcaatgcaacggctcaacgatcagtacgtgcctctgcccctcaagtctttacttgaaaaaaaaaacgttaagcacataaaagaacacttcaaaagttatttgattttttttgcgacaaaaagttattcgaattgatttgtcttactgtaagagtatagatagatatagaaaatcgtttgaaatttgtgtaaggactgaactaatcgtatattgggcctcgaaagatgtaggactatcaactaggcccaaaaagacactaaggcctccttcaagatttatagttggaattttgatagatcaatgaacaagttgattttgtgatagctatttgagggtatatacacaaattaattaattaactactacttacaaatttaaaaagttggttcagcaaaacagtatatagaaaactttacacaaaatatccatttagaagcttagaaaacgcgcaaatgaaaaatccaaaatccagtacaagctagctggcctgaataactggcctgacaagcagtacaacatagcactacaagctgtgaatttactttctgctgtttcgggtgcgtgcaaatgcatgcaattggcagcctacccaacggcccgtcgtcgccggtggacatggcggtggactacttcacctacgactacgagttcgccgagccgccgcgcgtgaccagcctgcagaacaccgttcccctccccaccttcaccgacttcggagacgacacctacttcgtcgccgaccaacgtggctacgagtccgtcgtccaccacctcgccggccagtacctcaacgccgacaagtccggcaacatcgccgacgcccgcctgaagctcaacaaggttgatcatatcacttctgatgccatgatcttttctgtcagaaaagatgaactgattaagcacgcgatcatcatggtggtatatatgatcgatgcaggtggtgcgtgagatctcctactcctcgaccggcgtcaccgtgaagacggaggacaactcgacgtaccaggcagactatgtcatggtttctgcgagcttgggagtcctgcagagcgatctcatacagttcaagccacagctgcctgtcagtttctatgtccaaatgtccttgcatgttcaacatatcctcttccaaatataaattaagatgtgcatatcgagcagtcaaatttactttacgtttcttgcatgtttccatcagtcttggaagattcttgcgatctaccaattcgacatggccgtgtacaccaagatattcgtcaagttccccaagaaattctggcccgaaggggcagggagggagttcttcctctacgcgagcaccaggagaggctactacggagtctggcaggtacaaaatatgcagcaatatatacaatccactcacatcgaattgtagtacattgcgatgatctgaacattcttcaggagtttgagaagcaatacccggatgccaatgtgctcctggtgacggtgaccgacgaggagtcgaggcggatcgagcagcagccggacagccagaccaaggcagagatcatggaggttgtgaggtgcatgttccctgacgaggatgtccccgacgccaccgacatcctcgtcccgagatggtggtccgacaggttcttccggggcagcttctccaactggcccatcggcgtcagtcgctacgagtatgaccagctcagggtacgaactactactccaaccaaatgctaatcacaattcacaaattgatgcggtttggatttgagattaattttggttgtgtgtattttttgctgtttctgtgcacaaggcgccggttgggagagtgtacttcaccggtgagcacacgagcgagcgctacaatggctatgtccatggagcttatcttgcaggtatccatatgtcagataggccggacatttaaaccatttttattgttctaaaagagaactaccctagggtagggatcgacgagatttgtaatgctaacatttgtgctcaagtgtgcgttgtgcctttgcttgtttttgtcaggtattgactctgcagagattctgatcaactgtgcacagaagaagatgtgcaaatataatgtcgggggcaagcacggctagtttgtggaggcaagtcaaactaccttgtcaattggctgtgagaacattccaagctatatcttcagttaattaatcctgcgtgttgatttgtatttctaggcgcaagcattttcatgatgggatgagaaatgtgagattccacaatttgttcatcgaggtgtaaagcaatttgaggaaaaagtgtttacactaattgtttacttatgctatttcttgttgctgaatatatatttcagcagttcagctgatgtatatatgtgctattgtttcgaaatgaataaaatcttgcgtagatttgtaaatctgtaatttctgatgactacaagatactccgttcattcaccaattcacgcttgggattccgatggaccaatggagaaggatgaaacggagagcaatctcttcggattagccatttcattttctacttatatgaatcagaaaaccgatatttttctctaaaaacaagcaatatctatagcttcgattatgactttgctgaatatctaaccagaactcaatgtcaaaaaaaaaaaaacaaaactcaatatagcagtgtatatatataaaacttgtgtggctaacactaaatccgaccttagctcagttggtagagcggaggactgtagtttgatgcagagaaatccttaggtcgctggttcgaatccggcaggtcggacaatttttgtttttcaggcattcaaaatgcaaactctttttcgttcttttagaacttgtttttcgaccaagtttacaggcattcaaaatgcaaactccaagcagctcgtgctcggttggactaatacacaacatttaacgtcagcatataaacattgaaaccatagaattttgccaaaaaaatatatatactgtaataaagaaaagccacatacatgtggaaaataattaatccctccatccctaaatttactttttttaaacatgtttgaccgctcgtcttattaaaaaagtttaagtaattattaattatgttcctatcatttgattcattgttaaatatacttttatatatacatatagttttatatattttataaatgtttataaataagacgaatagtcaaacataattaaaaaaagtcaacggcgtcaaatatttagagatgaagggactaaatatttggagggagtactaagttagatacaagaacaaaccatggggtgctccctgcaggcagggcaccgcttctcttgcagggcttgtttcatctcgcggttctccggtcgccggaggccaatctgctcgagcgtcgtgcggactgcggcggcgctgtctgttggcttcctcgatcgatcggaaagaacgggctcttgggcctgctggcctttcagaatgcctcttttgacgcctgcaacctgttccaggcccacggtccgcagccggcccatgcctcccacaaagccttttatccctttttttctttttttgcctatccatttatcaagtgataaaatcactcagagttttcctacattaagatttacatccaacgaactacgaaaaaaaataaaaatatatatttacttacatattatttttatcaaaattatagtgtacttacatgtcatatcaactgaatttataaatgcaattttagttatatagaattgtaattttatattttaaagaaaataataaatacatatttacttacccaatatttttattaatattataatacacttacatgtcatatcaattgaatttacatttgtagatatatcaaaggatcgagaaaaaaacataaccacgaagtcgccatgaaaaatagaacatcaaattatcaaaccaaactaacttatatggttgcatccgttcatattccttatttgtttatagtgtttgttgtgtgctcgatagaaatactactaggcggtctgtatagcgtgtatggtaggagacgcatcgcagccgttaaattaaattatgcgtgatccaatggaagcaaattcgagtgatttctagggaaaaaaaactgtcgtatgatgtttagcaaaatcgttttgattttaagtaaaattatgcccacggtaaaatgaggcgcattttacgttggcattccaaagtcctggcaccaaatatgtgctcttagttcgatatggtatttgttcttgaatttcacatatttcaaccaataacatgattgggaagagaatccaagcaattcaaagttcaaattttgaccactaaaatgtctaaaagaaaatgttttcctctacccttgttgttttttttacttcaagatctaaaaatagtactagtattttgaaacagatgccggcgtacttggcacatggcagaaagaatcgaataattacaagaaacatgacatattagagtatatggtagtcagagatatattaggataggattgatttgtttggattatcactctccctgtactatccaacatgacagagtaccattaatttctccagcttacagcaaaagccaaagtacatgcaaatgtggttgtggctactgaagatcaaaaacggcagcaacaacacgagctctctcggcctgaccgttcacttcaggggtggcgcccgtacgtacgcagcacgtcgaccctgcctgccactagccgccgcctcctccctttcgccggcagagctttccactgcgttaaattgcagttgccggtcgatcggttgatcgatatatccgactggccaacaagcagccagcttgccgcctcttggcactgcacaagagtcaagaggcaggggcactgtatctgtatgtgtaattccagtgaacctgaactgaaacatgaagagcactgcagctgcgccaagttgaggttcgtgcgtgtgtcctcagcttgcattgacgggtcggcaagctgccgtgtcgtggtcatggcggttcagccatccgggctcctgcgggtagactgacgtacggtggttttctccttttctgtccattcttgcagctcaaatatagggtgtgtttagttcacgctaaaattagaagtttgattgaaattggaacgatgtgacggaaaagatggaagtttatgtgtgtaggaaagttttgatgtgatggaaaagttggaagtttgaagaaaaagttaggaactaaaccaggccatagtgcagataggtaagttgctccatttggtttaatttagtcgtagataggcaagcgagcaaaaagtatagtcacaaagttttcaggtcgatataggatcgaggaacgtgataccctactcacgagagatttttacaaggtgggaacgaaaatgatccgcgttcgcgggacagggacagtgtttccgggtcgagggacggatcctgtgactaggagcaaaaccttcttaccgacaaagataaatcaatggttgtgatttaattcaacattgttatcgatttttgtcgctgcaaatgatcatgataatgatttgttatcaattatgtatggtactgatcatgaggaatgcacaatatctgattatgacgccccctttgaaacaaaatactcgtggagaaattttgtaggactcaaattctataggaatttttcctatttaatcatttgaaatatatgattgaagctttttgaatcctatgaaatttctaaaaaatggctcactaaaagtagattttgaataaaagttagcaagaggctcaacctcttggaaaattctttttaatctatctcactcattcatttcttgcatttttcctgaaacctattcaaatagttatttctgtattttttatgcgttttgcgattctctgttttgtatttacaattctgtcaaagttccatatatatattttctacattcatctgttttctcaatgtatcatttgaaaggactatgcatatgcacacttgaagggattgtttgctgttgacacatcatgagggacgctcaactctgcaatgatatcctggtctgattgatggactgatgctaattatatgtaacactagtatcatatcctacgcagcatatgacatcagtcatttttttttattctgaagcaaacgtcaagctttgaaagccttttcctttcattatacagagccatatgttgctttcgctgatctggcgacacatacttatcagaatcatcagtagtagttaaccaggttctttgctccctgacacccatgcatcatctgctgctgagcattgcacctagatcacatccctttacaatattgttctgtaaattttggccacaagcagctcaaacttgcatcactctctctacatatattttactgaaaagttcattccaaactgcagtgcttgccacttgtatatggtcccaaataccaatcgttcacttcacttgaaccaaaaaaacgccaaagatatatgctacttgcaagtgtcatttcagagtgcaagcctactggctaccagtaaccaggacccaaaagatggcgaaaatgattttaattttgggctggaaaacaacaacctagctacctgattggtgctgactcggacaagcccacacttggtagatgctgccaaaattaaaggttccttaaaactcctgtgtagcaaatcaagcaggtatatatgaaatagagaacattatctgaaaaattatgtattacacataatctaagatagttagaaattagcaattaagtgtttttcctaggatattagcaattaagatatatatgtatcacttttctcttggagccatctcaagttagtgatttcggtcagagtatctatcagttcaacagcacctgaaatttttgtggaaaagtcattgaaagcactgtttaattagctaggctacatacactattatacttctttatcaatacgctaataactatgtttatagctagaaaaggaacctatcaagtgagatttctttctccaacaaggagcaaggcccctccactactccatgtacttttttcttgtagggacagcactgagatcaccaaatagttcccagattaagttaggatggcaatgtcataataatttttaagatcttgttttggcaagtgattgcaactgcactagaaggggagactagtcagaatgcagagcatgttgttgggtaagttgcctcagctgttctgaaacttctggctctgtcactttacatgggctgtgtttaaatccaaagtttagatccaaacttcagtccttttccatcacatcaacatgtcatacacacacaatttttcagtcacatcatctttaattccaaccaaaatccaactttgcgttgaactaaacacagccatgatgcatttaattgccaattggctaatctaattgtgttccctctaaaacaaaaggatatatagttgtgtgattaccgtttggaaaatggttttgtgatatcaaaacgatcccgagtttagacatttaccatcaagagttatggatacactgttcatgctaaggcctggtttagttcccaaaatttttttcccaatacaaaaatgtcacatcgaatctttggatacatgcatgaagcattaactatagataaaaacaaaaactaattgcacagtttacatggaaatcgcgagacgaatcttttaaacctaactagtccatgattagccataagtgctacagtaacctacatgtgctaatgacggtttaattaggctcaaaagattcgtctcgcggtttccaagcgagttatgaaattagttttttcattcatgttagaaaaccccttctaacatccggtcaaacattcgatgtgacacccaaattttttcttttcgcgaattaaacactccctaagttaaatcatttcagctatagtacttaactttctctccctggtactattgctgaaaggaattattgccatttaaatagtctaatgacattaacttctaactaatgccggctgaattgttcaatgtaagtagactcagaactgaaatagtccacactcttttagcttctttttgacattatcgctgtttaattaaattcaaaattcctggattaattaaagctctatcaactggcacttagtggctacttatagagttataatgaagtgtcaaatactatggacggaggaactatacctatgcttttagcagggccgtcccgtcaaatttaggggccctgtgcaaagttgaaggataaaaacttaactgatgatataatataaaaataatttatacttcttaatatatttcatagaaatctagaatggcctaaaatgataatataaaattaaggagtactggattagaaattaccagaaagaattaggtcaggggcgcggcaagcgtcaggcggcaacagcgttaggcggcacgaccgcatgagagagagaggtgaggcgtcgtttactgctctcgttcgttgcgattgacgattggcgattggcgaggtccacaatgggagacgattcaagattgtgaaccgacaaaggcgtaatcgaagccgaaacaacaagaaaaataacatatttttgggactagttagctaccaatttacttattgagttatatatctagtgttgaagttttgggctcaggggcccctgaaaattgggggtcctgtgcgggcgcgctggccgcacgcccctaaggacggccctggcttttagtggcatttcatttaagcatgttgcttttattctcatatatggatgatgtttaggttttctagttaaagtgttcccatttaatgagttatattatttttttccaaccatatatatatatatatatatatatatatatatatatgcatgttttcaagatgaattaatacaatctcctctccatcatttttttggatatatatttcatcctctcccccctttcggtcgtcttgccaactaactcttagctaggataggaatatataaacggaagttagtcaaacaaataggggcgaaacctagggcaagagggaggcctggcccctccaacgatgaacctcccccccccccccccccggcgaacccaaaatgcagatcccttccgattcctatcatgctgcgttagtgatgataagattaagatgggctattacttgatgactttaggtcctatacacatacagttatgattttttacgaaaatttatacattaacgtgcgaaagaaaaaccatggaaattatagttttgcctgccaaattaaatagaatacgatgaagaggggggggggaagattgttgtttcagttggtactagctcatccatattcttcaaaatcgacggaagattgctaccttattctaataaaatcatgccaacatcatggaagttgcgcgagaagagaattactctaatatgcaattaaagtcctaaaatctccatggattgtcttgatatatttttttaactaacacctcataagttagctcgtcccgccctcatgtctagatcctagcttcgccaatgctaacgaataaggggaaatattggcatatttcgatcaagaaagagatacatattgttctcgctattgcagcaagaacccaacaattctctagagtttgggcaaacacacgcgtagaagttaaacatcattgtagaaaatacatgtcatcataatagagtgacctgctaatgagccgcccaggtcatccaggcctttggtccgcccttggttaatttgctgcagaatatatatgccagagtgccgcgctttggcaaatagagggagagctttacaaaagttttatgcatgtgatattcaattatttaaaaaactactcctattctaagcaaatatatatttattttgtgtttcaaacttgctcttaacaacttcttgtctacagtaacaactaataggaaaacttgaggtatactccgttatacgggagcgtatcctatgcacacaggccctcgcgtgtacacaccgtgtacatcaactaaaaattatcacaaaaaattctaggaaaattcatatatgtactttcaatagtattacatctacgcgcaaagtcacatcttcaaattcattctacatagagaataacaaaaaagataaaattctgacaaaattgcaaccttaaaactgtcggattttttgttttttttttgttacggctaaaatataatgaatttgacgttaagattttaaccctaggtgtaatacaattgaaagtatgtgtatggttttttctagattttttggtgacattttttagttggtgtgtacgtgtgtacacgtgagggcctgtgtgcataggatatgttgccccgttataaaacatatgaatttctacatatactcttcattcaatactaattaaacatcacgaaaccattcaacatttttatatatatatatatatatatatatatatatatatatatatatatatatatatatatatatatatatatatatatatatatatatataaaacatgcattacgaacttattactcttaccaacttatgttgtgtgcaccattaatttatccgtaacatttcatgttacaaagtgcagcgcatcccagtactagctagctacccgtcaacaattaatctagcaaaccccatgaatgacctttctttcaatttgcgagatccaagaatgatggattagttgtgtttatgtatcatacgaacgcggcgaatcgcaattctagatatcaacctcatctagcatgtggaaaggtttgggcggaagcgatcgcactcgtgctgtgcgtcgattacgtgttatatatatctgacgggaaaagcccccgtcgtggctttgtacagaagagcgcggccaggaaacaatcccagccggattacatgaaagaaacgatatatgcagtaacaaactacctaacagatgcatatctataacaaaccaagtttgttactgcatggatgaggatcggcaaagcctgatctggatcggccaagcctgatccgagcttatctagctaactaacaccctctctcaatcctgaccgtacaaggttaagattgctcttgaaattctccagaagtcttaccgacaatggcttagtgaaaccatctgcaacttgatcgttagttgaaacaaaatcaatctctagaagtttctgacttaccctttctctaacaaagtgatagtcaacttctatatgttttgttctggcatgaaacactggatttgctgacatatatttagctccaagattgtcacaccatatttttgcggccctaggacttttaattcctaattctgcaagtaaggtttgtacccacatgatttctgcagtagcatttgcaatagctttatactcagactctgtactagatctggaaactgtagcttgctttctggcactccaggaaaccagatttgaccccaaaaatattgcaaagcctcctgttgaccttctgtcatccaggctaccagcccagtctgcatcagaaaacccactaacaagagtagatcctgatttatgaaactcaattccaagctgagcacattgctttaagtatctaagaattctttttactgctatccagtgtacagtgtgaggagcatgtaaaaattgacagactttgttaacagagaaagcaatatcaggcctagtgagagttaaatattgcaaagcaccaacaatacttctatattgagttgcatcatcaggacctaataaagaaccttcatgaagagagagtttctcacttactgacataggtgtacatgcaggtttgcagtctgacataccaaccttcttaagtaaatcagttgcatatttttcctgactcaacacaataccattctgaaccttatttacctctattccaagaaaataatgaaggtcaccaagatccttgagtgcaaattccccctttagatcctgaagcaaagctgtagttgccctctctgaagaactggctacaatgatatcatcaacatacaccagaacaaatataattatgccacctttgtttgaaaagaataatgaggtatctgctttagaaccctgaaaaccaagatcaaccaacttcttacttaaccttgagaaccaggctctgggcgcttgctttagtccatataaggctttgtcaagcttacaaacaaagtgtgggttagcaggatcctcaaaacctggtggctgtaacatgtatacttcttcttctaaatatccatgtaggaaagcattttgaacatctaactgtctaagactccatcccttggatacagctaaagacagtattattctgatagtagcagctttaacaacagggctaaacgtatcttcataatcaataccatacctttgtttaaacccctttgctactaaacgagctttatatctatctagtgtaccatcagctttccttttgatcttatacacccacttacagccaattatattttaccctctctgaggaggaactagatgccaggttttattcttaactaatgcatcatactcagattccattgccattttccagtttttgtcctttatagcttctaaatcattagtaggttcaccagaagcagtaaaccaggaatgcttatatttaatagtaccatcagtatataccttctctttgcgaactccactctgaagcctggttcgcggaccaacttgtgtcgcatcaacttctgtcgatgtcgagtcagctgctgttggattactttcacccgtgtcaggcgcctcggctggttctgactgccgcgccgactgccggtgctgtagctgttgtgctgtccccctggatgcagaaccggagccgccaaccagggagcg

SEQ ID NO: 6302 - DNA, 12098 bp, Oryza sativa
tgttgcttggaagggattggattcatgccaattgttgtattccttcgaccatgcaccaatgcttgattcaatggcaaggcgacaaggttgagattgtaccagccgacaggtcagttaatgttgctagtgccgatctagctctttgggagatggatggccttgattgtttatccaggaagatttgggttggagattttctaaaagtgtccgattctgatatacagccgattgaagatgaagaacccaagctattattttgagggcgtcgtggagggttcaagcgtctacgccaaggacacggtagatgatctcgatgacaagcaaggttagggttttatgtcggccgatgatttagaagaagtggatataggtctgggtgatcgaccaaggccgacattcattagtaagaatttgtcttcagaatttagaaccaagctgatggagcttttgaaagagtttagagattgctttgcttgggagtattatgagatgccaggactcagccgatcgatcgtcgagcatcgattacctttaaagccagggattagaccacaccagcagcctccgagaagatgcaaagccgatatgcttgaacctgtcaaggctgaaatcaaacgtttgtatgatgctggttttattcgtccttaccgatatgctgaatgggtttctggtatagttcctgttatcaagaaaaatggtaaggtgagggtttgcattgatttcagggatttgaataaagctaccccaaaggatgaatatccgatgccagtggccgatcagttggttgatgctgcttcaggacataagatactaagttttatggatgggaacgcaggatataatcaaatctttatggccgaagaagatatccataagacagccttcaggtgtcctggtgcgatcggcttgtttgaatgggttgtaatgactttcggcttaaagagcgctggagctacgtactagagggctatgaattatatatatcatgatctgatcggatggttggttgaggtctacattgatgatgtggttgttaaatctagagaaatagaggaccacatagccgatttgagaaaggttttcgagaggactaggaaatatggtttaaagatgaatccgacaaaatgtgcttttggtgtatcggctggccagttcttgggatttcttgttcatgagagggggattgaaatacctcagaggagtatcaatgcgatcaaaaagattaagcctccggaaaactaagacagagttgcaggagatgatcggcaaaattaattttgttcgaaggtttatttctaatttgtctagaaaactggaaccttttacaccattgttaagattgagagctgatcagcaattcacttggggggcaaaacaacagaaagctttggataatattaaagaatatttaagttctcctccagtattgatccctccacaaaaagggattcctttccggttatatttgtcggccggtgataagtcaatcggcttggtcttgattcaggaacttgaaggaaaagagagggttgtgttttatttaagccgtcggctcttagatgcagaaacaaggtattctcctgtggagaaattgtgtttgtgtttatatttctcttgcactaagttgaggcattacttgttgtccaatgaatgcactgtggtatgtaaagccgatgtgattaagtacatgctatcggctccgattttaaaagggagagttggcaagtggatattttctttaacgtagtttgatcttcggcacgaatcaccaaaggcgattaagggacaggctgtaaccgattttattgtgggtcatcgtgatgattcaatcggcttggttgacattatgccttgggtattattctttgatggatctgtatgcagtcatggttatggtatcggcttggttataattgcgccttggggggcaagttttgaatttgcctatgctatcaaacaccgtgtgactaatcatcaggctgagtatgaggcggtcttaaaagggttacagttgcttcaggaagttgcagccgatgctattgaaatcatgggtgattcgttgttggtgattagtcaattggcaggggagtatgaatgcaaggatgatacattgatggtttattatgaaaagtgccgaacgttgataagtgaatttaggatggtgactttgaagcacatatatcgagaacagaatatagaggctaatgatttggctcaaagagcgtcgggatataagccaatgacaaaagatatcgagatagagattgctacaattacagccgatgattggagatatgatgtgtttcagtatttacagaatccatctcaatcggcttcgcagaaattgcgttataaggccttgaaatatactttattggatgatgacctctattatcggatgattgatggagtgttgcttaaatgtttgagtgccgatcaggcaaaagttgcaatcggcgaagttcatgaagggatatgtggtacacatcagtcggctcataaaatgaagtggttgctccgacgtgctggatatttttgccgacaatactggaggattgtttaagatattataaaggttgtcaagattgtcagaagtttggagcgatccaaagggcgccagcatcggctatgaatcctattattaaaccgtggccttttagaggttggggaattgatatgatcggtatgattaatccaccctcgagtaaaggacataagtttatattggtggcaaccgattattttaccaagtgggtagaggcgattcctttaaagaaagttgattctggggatgctatacagttcgttcaagagcatataatctatcaatttggtatccctcaaactattacgactgatcaaggttcaatttttgtatctgatgagtttgttcaatttgccgatagcatgggaattaaattgttgaattcttcaccgtattatgcacaagctaatggacaggccgaggcatctaataagagtttgatcaagttgattaagaggaagatttctgattatcctcggcaatggcatactcggctggctgaagcattgtggtcttatcggatggcttgtcatggatcgatacaggttcctccttataaacttgtttatggtcatgaggctgttctgccatgggaagttcgaatcggctcgaggagaacagagttgcaaaatactttaacagccgatgagtattataaccttatggccgatgaaagggaagatctggttcaatcacggctatgagctcttgcaaaggttactagggataaggagcgtgttgtccggcattataataagagagtagtacccaaggacttttcggagggtgaacttgtatggaagttgattctgccgattgggactcgggatagcaaatttggcaagtggtcgccaaattgggaaggaccgttccaaatttataaggtggtatctaagggagcatacatgttgcaaggactcgatggagaagtttatggccgagctctaaatagcaaatacttgaagaaatattatcccagtgtttgggttaatgcatgatcgactagtgttgccgatacatgatagccgatgtgtttgcatcgcctggagatggccgatattgttatatcgcccttagttgcttttcactattgtaatcggttgtggtttgccgatctacaaatggccgatattgttatatcgcccttagtcgtttctataattttgtcaatgttttcaacattgtaaaattaggggggcacatacatagagaattgcaaagaaaaatgagagaattgaaatttttgaacaagccggcacaaggatggcagcaaagtaattagggtgtcttagccgattacaacagttttctacaaactattacatggaaatcactgagacaagtatcgctggatagccgatatagccctttgcctaatttgatctatttcttcgatagcttgggcgtcttgagcatcggttccaggaatgactttcaaggatttagtcatctcagcaatgttcttgatagctgattttagccttgccttctgttcttcgacagcttgcatgagatcggttaacttcttgtgctctagatccagtttagcattgcattcttgaagttgtgccaagagttcaatcttgtgagcttcaagccgatcaacattagatttgatcgggccttcagataactgatcaagcttggctttctcttcatgaacacgctgccgattggtttggattgtagcctcgatgtccttgcgctcccggcgatcggataacctctgcctggctttctccagtttgaattgatgctgctcgaggtagacagctggagtaagagcatcggctaattcgtccgaaagaaaggcttggatatctgcaaatcttgcccggattgagccacagttggtcaccaggttatctagtgatgctcctaaccgatgggagatgtcttcgagtgttttcttcatatcatcagacaggagagctatcgctttactggtggtgtcttcttctgtttcatcgaggtaatctttgatgtcaaaggagaacagatcggctaagacctgcaagagacaatatcatggatgattaaggatcaagatatgattggccgatctcaaatttatgttaataaaccttactggaatagtaggtgcagctaattgttcctcctcttcaacatgatgactgcctgcagtcgatggagtgtggccgcctgattctgcctgcacaagaggggaagaaggaggaggagactgctaaagggataaatattagatataatcagcccaaatcagttaatgagatgataaaagtatcttactgtaggagctggtttaagggttgaagtagctgatctattcctcacagcaattttctttctctatatttattaaaattgtgaggaatcggctataaagtaaatgactgcaaaagtggacagataaagtcgcttacctttgccaattgagctgaagcagaaggggatggaggagattgcttaggtgaagccaatggtgttctttcagtatcgcttatttcggctgcagcttggtcgatgtcttcctcgatttcttcttcatccagagcttgttcaatggatggatctagggcgggtagatcgtcagctggcttagctttctttgtcttagccttattcttcggagccggggctgaagtatctgcagccgatgatctggttctccgcttcttgccggcatcggctggttctctgatgagtcctcggggaagtgctgaggtctttggggcattgtagccaatggcagaaggggatggcccacctccatttggaattagacccggagcatacttaatgaccttgccgctattgctctggtgaggaggagaagattctgttgtctgcaaaacagaagaaaagttagtcaaggttcaaatcggttgattgactattcaagcaagattgaagaaataaagattaacatgagggatagcatcagggaataagtctgtcatgtacatggaagccgattgatggaacagatgcagcttccactcgccccaccatctgtcaaatgtcctgctcctgaaccttgccagctttatgttctcgatgctgcccaacggaggtccagggatgttcaatagctgatccatcattaaagttgaggagatgtcgcctctgcattggatcttgttggcaaagtacagaccgattggcaattgtcccattccaagttgtctggccgatgacatcggatgataaaactcgtaagagacttggatatttctcccttgatggatgccgactgggaggatacatgggctgatagcagtagtaaagatttctctggattgctgaaacttctcatgattaatatcctcgaacctgaaatcggctggcagttcgaaatccattgagtcggcatagaagaaccaaactcgggcatctttttggaatccatcataaaagctgaagaaccagtccttcagaagttcagccgataactttgctcctgcatcggctggtgtagatgcatattctccgtatgacatacatctgcgatgggtgtgttcttctccatcatcttccacaatcggctccaaacttggaaattcagcttctgtcacagatggccgattgacaactttcatgactaccaggttcagctaggattgcaagagccaccatggtccacctgttccaaccactgagccgataattatcttggccgatgcgttgtttaatatctggtatagatagccgagaaggattttgcctaagggaaattgtttcttcgttactagggcctcggctaagaattgccagttggttgtaggaccgcagcttgatccgcagaaaaggaatttttccaaccacatcagcaaaaaagctacgtgctctctaggagtgactggccctttgcccatatatgctgtgatatatcctgaccaacccccaatgctcttagttttgaactcaaaagtgttcttggtgttcaggttcatagggttagctgatgaggttacatctaggccagtgagcatgataatatccagcagcgttggggtcatcggcccttggttgaaaagaaaagcattgagagtgttggaccagaaataagttgcagcagccattaggggttcatctttggccgaatttgctattgtgagggctagggcttggctgattccgatctcatcccaatgggcttgtttgctagccgatatccgcttataccatacaggccagcttttctccaaagaaggccaggatttgaaggtgtttttccaatggcttgtgtttggattggccgacctaaaaggggttctgttggtttcggctatgataaactcagtggggtctagattgccgattggaccgagaaagtattgttggtcatgaaacagactgggaaccgcaacaagattggaaagatgctacaagaatagagaagaagaaaacaagataaggtgagcgaaaaccggtctgatgaacggaaaagggggtctagccgatggggacttacctcagcgtattcggctgatgatgcggcggtcggattggtggaggtcgacatcgtcacgggtgaagatctggccgggagtggaatcgcctagaaatcgccatgcgtgttgaggaggtcgccggagagagaaaggacgggatctgtttaagcggtgaaaacggaaatcacgacgtgaagattctttggggcaacggttagtatttaaagtagagcgataacggacaggaaaacagcaagtgcgagtttctctcagagtcggtatatggcaaatccgaaacattatccaatattccggacttggggggcatgtgttaacgaccaaatttggtaaattctatcactattggcatcggaggtgaagatcagattgaagtgggatccaaaatgaagatcgttgcggaaacagagtaagagtcggctgcagtccaaatcggctaaggtcaagtcggaagagttcgagtcggacggggctagccgatacagccgattctgataatatgactcggtgtacgtcatcgggttcaagttgatgtgcttcaagatggttgccatgcatggatagagtcctgggaaggcaattgtatctattaattaggatattctatgtaatttccttagatatatgtttgggcaaaagtctgccgtaaagacttatgttatcttagagtttgttagagataatagtcatgtctgttgtggacgtatcttgtaattctcgggtataaatagacccgagccctatgtaaaaaagggacgacatccaatacaatctcggcgtatcgccaccctttttgctttacttttatttcgacgagttcgtactctcgggttgagctgcatcggtttcgatcttcaacaagaggtaaaacttgtcatgacgacttatgttctcaggattagtgcttccatctttatgatactctaatcttgtctatataattcgtcgagttatcatatatctcacataatcttcgataatatctttatctaacctataatcggctaacatctgttaatggaaggcagccgattaggttagacaatgacgttaacttagattatgtgatatatctaccactctatgaaacttccagcggcttgattgtctagatattgtttttcttttcatacttaatgctgcatcaattgagtttgatctattaagtcatgcttagaattgcaatctctagcctgctttctggtcgccgattagggtagtatcggagtttcagccgatcttatctgatttaactacttttattccatatgcttaatctatatgttaaatctgccctttatgttaagatcttgtcacatctaagtacattaggcttctgtttggtatattctacttgctttaatatcttaatatagagtggtatcggagtattagccaatacatgctagatccatttgatcggctatgctataaatgtatataatcccactattaatatatatttcgatctaagtgatttatactgtctcggcaaggcgaccgatctatcccaaccacttgattcaagtatatatcgatataaggattatatatcattaatatctacagccgatcgagtagatttagttctgatttgcttattgatatttgccgatcgatgtacgcatgacatcggcttgaaataaatgatatgtcatcggcacctagccgatcggctatcatttataggattaattgcggtttctttgttctatttcttgttgattgcaggatcaaatcaactagcacgctcatacatccgaacgcgagttttggacctgcactggagttaagcagatctcccaggcctcgtgttttctgtcaacacgcttttggcacgcccggtgggacgaattagaagtcagaaatcaatcttcctcatggccgagaagctgccaccttcgccatcctcggctagcccgggtactgttaaagagaaaatccaaagaccaggattgagcgaagtcaatgaagggaatattgtggctattgatccggaaaagctcacacctgaccagaagaaggacttcgaagcaatgatgcaacaagcacgagaacagttcttcaaatcattcacacagactcgcaagggaaaatttgtttaaaagtacaaggtaaaggtggttcccgatgagcctgagaccagtacctttaaggagggagaagggaaaagagttttagatggctcggctcaagagaatcagggtgacgactctcagggggcacatgcagttcaaggtgatggtgctcacgagccacaacgaggaaatcttaatcagaatggtgagacagcacaagatttcttcaacaatttccaagatcgagtggactacgccgtacacaatgctttgatcaatcaatctggagtgttagtcaacaccttgtctaacatgatgaagacgatagccgatggatcaatagttgagcatcaagctgcaggcccggtttacttgccgggaggtgtttttccgaattatcgatctttgatcactgatgttcagccgcttgctcaggcagttcttccgagtgcaccatcggctcagccgatggcaccgccattgacttctttgcctgctccatcagcgtcgacaccaggccagccgattaatcctcggctattgatgagggagcagccacagcatagcggacagacggtaaatcggccagcacaggatcaggtggctgctatgtttctacccctccaatctactgtcaattcgattcagcagacgccaccaaggcaacaggttgtgcagccgattcaacagactccaccaaggcagcaggttgtgtagccagttcagccaacacttccgggacaacaaactatacagccgattccgcagcaagctttgatgaatcaatcggctgagcaatcagctggacacgccctgaatcaggttgttccagaacatttggttcaccatatacaaccagatggtacgacgatgcctcagattgtgccagagcacttggtgcaaagtattcagccaaattaacagaatttattcagccaaattaacagaattaccaatgaggcaatataatcagtttgaaccaatacagcaacagtcgcaaggagcaggtcaacaacgaccatgggctgatgtaattgccgatgtgatgagagaacaatttgggcttaagccgaaagatactggaaaattgtatcggcaaccttaccctaaatggtttgagaaagttcctcttcccaaccgatttaaaatcccagacttctccaaattttcgggacaagatggtgtgtcaacttatgaacacattagccgatttttagctcagtgcggcgaagcatcggctgtggacgctctcagagttagattattccggttgtccttgtctgggtcggcttttacatggttttcttctttgccgtatgggttagtcaatagttgggccgacttggagaagcagtttcatagctatttctatagtggagttcatgagatgaagttatctgacttgacagcaatcaaacaaaggcatgatgaacctgtgcatgagtatattcagagattcagggagatgaggaacaagtgctttagcttaagtttgactgatgcccagttagccgatttggcttttcaaggcatgattcctccgattagggagaaattctgatctgaagattttgatagcctgtcgcatctcgtacagaagataacattgcatgaacagaggtttgcagaggccaggagaagctctaagagggttaatcatgtctgcccttacatgtatggatcggatgatgacgatgatgactccgaaatagctgcagccgaatgggtaaggagtaaaaaggttataccttgtcagtgggaaaagaattctggaaaagaggagagatatgattttgatattaccaaagctgacaagatttttgatatgctactccgggagaagcaaattcaactccccgctggtcatgtaattccatcggctaaggaactaggcaaaaggaggtattgcaaatggcataattctggatctcattctactaatgattgcaaggtctttagacagcagattcaagtagccattgaaggagggaagattaagtttgatgattccaaaaagccgatgaaggtcgatggtaatcctttccttgttaacatggtgcataccgttggtcggacagccgatgtgggacgagcgagaggtttttgcgtgaattcggctagaattataaataagtatcagaggaaatacgacaaacaacaagagaggcattatgaagaagataatgatggtttcgatccttattggaattgtgagttctttcggttctactggaacgaaggtatgaggctaccatctattgaagactgtcctgagtgcagtgatattacagagagttcaagccgatcgtacaatagaggcaatcggctgaagcaagctagagttcccgttcatcaaaggttgggcccggcaaatcaaaatgattacttggaggaagacgagaacgcgaagactcagtggtgtccttctgatatttttacaaagaatcagaaaagaagggttcaaaggttgaggaatagggagcgctttcaggaggtcgagcaagaaattggtcatcggctgaggaaagcaaagccaaggaaggagtggcgtgttaagaatcaagttcttggagccgatgatattgcagccgatgaagcaaagaggttggcaaaagggaaaagtattgtaacggcgccaattaacatggtctttactttgccagccgaattcgggattgaccaagccgatgttgacgaactggaagaggaattggctaagttggttctatcaccagaacgagcagtttttgaaaagcctgaagggacagaaaatcggcatcttaaaccattgtatataaatggctatgtcaatgggaagccgatgtctaagatgatggtcgatggtggggctgcggtaaatttgatgccttatactacgttcagaaagttaggtagaactactgaggatctcatcaagacaaacatggtgcttaaagactttggtggcaaccaatcggaaacaaagggtgttctgaatgtagaattgacagtcggcagtaaaactatccctaccacattttt

SEQ ID NO: 6303 - DNA, 8951 bp, Oryza sativa
tcgtttgctctgccatcaactcgaaatcacaaaatactcgaactaaatctctttcttccttcttccattcgagttttggtgctttgcttgatttcttcctttctcactacacaacatggggaaaaacaagaaaactgcggaaaagtcgaagtccaagaaatcaaaaagccacgaagatacttcttgtggtattggtgcctcttcgattaaggaaaaaaacttaaacgatcttgttgatgttggttggatatctggtcgaaacgttgtaattcgaccagtgggagaatcaaggccttctcccaagctgggatacactcttgtgtttgaggatttcttctacgccgggtttaaattcccatgcagcacttttttggttgaggtcctgaaattgttcagacttgagtttcctcaattgactccaaatgctttagttcgaattgggcttttcgaatggatgattcgaagctgcggtgggacccctcgagctgaagactttgcatacttccattgtactcggcactacaccaaacagaactcgaagtttgggtgtgtaaactttgctcctcatcccaagcgcggaagtccatggccagctgtgtctgctattcgagcaaaatgggggaacaagtggcaatcgaagtggttttatcatcaaatccctctcagcctgctgaatgataaggattgtcctttttcgttctctgggaagaaaccgaaaactgtctccgagccatcagtctctttgtcgccggagttcactgccatacaacctcgaatcgaagaacttgtttcgaaatttagctgccgagacctggtggaagagtttgttcttctcaaaattagacctctttcgagcggctgggatatcactctcggagaaatccccgaaaattgcccttccagtcttcctccatttgtggtttcgtctgatcgtaagtttccttttcgaactgcaaaccttgtttgtcttgaaaaagtgatttagttaagaagatttattttctccctttgttatcttcttccttgtagttgtgattccagaggatatggtccgcccagttcgaaaatttcttggcccttataccaaggatgagcatttgaaatttttgacacttcaaaatgagaaaaggcaaaatcgggtcttcgcctctctaggctccgatatccctgtccgcgttcatcctgaaattgtccccaaactaaagaaaaagaaatctgtgaagccctcttcctctgatgatgatgatgatgttgaagtggaagatattgacgaagaaattggggaagaaaatgctgaagaagaagaaggcgaggaaggagctgatgaagaagagaacgactcgggtgatgatagcgactcgagtagcagttcgagcgacaactcgagcgacttgtctgaatctggtgatagcaaaacagttcctcctcctactgttttagctgatttgaaaaggaagaaaactgccagcagtcctcctcctgaaccgagttctaaacgagtgcaacttgttattgacagtgatgaagagttggatgaagatgatatccgtattgatctttctgctatccatgtcaccccaattcgagctgatgctagttttgccctttcggcaaaagaagtagcttcactgtatgttgttgccccaaccaccacggttgtcgagaaagattgctcgacccaagtgggtgatactgttgagacaacaaaccctcttcgagctgatcgagacttggttgcaaaaaaggcaaaaacgcccgtcagtgcagccgaaaagtccgaagcagggaagagtgctgctgatggaggtgttcgaactacaggtagttcgaacccaactccacctccgtcaccgccgttcatcgcaaccccttccccagagctgatacaaaacgttcttggtggttttagcgaacgatgcgcaaaagatggacattggcttatgggtcttcctaatttcaacgaactcggggaaagtagccatcatggcccaaacctgtgtttgaatgacctaaagtatcgccaccccctgagttcgattggtgatgaactcgagaaagttctgattactcctgatcttgaaaaggagtttttggaagaaaatgatcttatgtcctcttggacagcacttgatgtatctgctgcacaggtatttttatttatctatttatttatttatttatttatttattattattttctttttaacttaaaacctattttctgatgcgcagactgcgagccttgctcgtcttcaacgtggtgttgctcggaaagctcttcgagctctttgcacgcaacggaagaaatcacttgatcgcatcgctaaactcgaaaaggatcgggattatcttcgctgcaaacttgatcgaatggccgacgagaagaaaatcaccaccgatctcgtgcgcaagttaagcggcgaaaagaaagagctttccgaagaaaagaagttgcttactgaggaaaagaagaaattactcgctcatgtaaaagcattcgagcgaaaaatcatcgagtatcaagacgtcgcacgacaacgcgctgaatcagaagacaagatgaaggagcaagttgaggtcttggagaagaagaataaagaactcgaactcgcctgcaaaaatcaaagcgagaagatatctgctttagagctcgagagcgaaagttgccgccaacttcttctgaaaagttgcgagaccgttcgaatcacgttgcgaagtctaggggctgacatcagcttgctatcggaagaaaataccttagcagctgtgggaaaatggttcgaggaattttccattgggctaaaagatagcgttactccctttgcatctcgctgctcgaagactgctgtggagagcctttcggcctgtctgctttcaaatgggtgtgaacactttaccacccttaaaactgatatacaaggtatacttaatgatgaggccaaatttgcacagcttcgagatgcagctcaacccgtcgtaaaggctttccaagtgctttactggaagaagaaaggatatgaagataccctgaggtctctccgagcatctcttgcctcgagatcaaagtcacaaccggccagttcgagccaacaagataaagacagtagtactccgagctcgagcgcacaggtgtgacgttcgtgaaaagaatagttaaggatgcttcgtatgttcgaaaacaatgctattttgctgcttcaaaaccgttatggttgagagcctttattgtaaaaattcatctcttattgcatgcttttcacggaaattccctttctttgggggggctgcatgttaactcgaatcgaaaacttgtgattcgacgcaacaacactttgcctactcgaaatgtgaagcacttagcatttcgagaccctgcaaagctttcttctaccaggaccgccgtctccgatgacgaactcgaagcctgttatgataatacttgtatatttgcttttaagtttttccgatggcaacgaagccatcgacatgacagtttacgtgactttgtacttgagtttagggaacggcgttcgaacaatactcttgctagtaaagccttttggcaaaacttccaaccatccgaacgccaacgtagaatatggaaaaggcgttattcaatagttccatatacagtaatgccttctcctctcaacattgtttatcccgactcttttctttcttctttgtagagtttgtatgtaacttgttataccttcttaacatcaaataaacccttcctttcttcttttctttataaatgctctttatttcaattgttcaagcacccttaggtaaactacgtcctccttatctttggaagaagttacgaaatcgaaacgtactttatctcgtcacgtgcattttccgccttttgagctcgagcgaggggaaaatagagttcgagcattctttagttggttttttggactaaggcaaaatagttcgaaaaccgccgtcctcctcacctttcgaaggagtgacgaggtcgaaacgtattttatctcgtcacgcggattttccgctttttgagctcgaacgagaatagagttcgagcattcctgagctggtttttaggactaaggcaaaatagttcgaaaaccgccgtcctcctcacctttcgaaggagtgacgaggtcgaaacgtattttacctcgtcacgcggattttctgctttttgagctcgaacgagaatagagttcgagcattcctgagctggtttttaggactaaggcaaaatagttcgaaaaccgccgtcctcctcacctttcgaaggagtgacgaggtcgaaacgtattttatctcgtcacgcggattttccgctttttgagctcgaacgagaatagagttcgagcattcctgagctggtttttaggactaaggcaaaatagttcgaaaaccgccgtcctcctcacctttcgaaggagtgacgaggtcgaaatttgctagtcgaaagtattcgactcctagcgtgaggagttatattttgtcgactttgctagtcgagagtatttgactccgagcgtgcggagttctattttgtcgactttgttagtcgaatgtatttgactccgagcgtgcggagttctattagactttgttagtcgagagtatttgactccgagcgtgcggagttctattttgtcgactttgttagtcgagagtatttgactccgagcgtgcggagttctattttgtcgactttgttagtcgagagtatttgactccgagcgtgaggagttctattgcaatcatacacagaggcatgttttttatacaggttcgggcctccattatggataaaaaccctacgtcctgtttatatacattaacttggatatcattcgtatttacatctgagtgagtatactacaaactcgagctcccgtgttctcctttttctctttctctctctctctcctttttttttaggcataaaatttctttaaagaaatagcattccaagtatgctttaactcatcaccatcaagatatgctaacttgaatgctcccgtttctgtcttctttttgactatgaatggtccttcccactttgactcgagttttccaacagctacctcattgagcactttcttcaagactaaatctccttcttcaatcggccttgtctttactttttggttgtaatagctctttgttccttctgtgtatgatgccatcttctccaaagcttcaacccttatttcatctagcatttcaagagttatgtctcttccttcttcatctttttggtcaaatatcattcttggagaatgtgcccctacttcgcttgaagtcattgcttcatcgccataaaccaatctgaaaggggtcatgccagtcgaccttactaccgtagttcttagtgcccaaagcactgatagcaaatcctccggccattttccttttgctgatccttctaacctcttcttgatagcttccatgattttaccatttgccctttccacagctccatttgtctgaggatggcctatagaggcaaagttgatttgcaaattaaggcctttacacatgtcttgaaattttccagattcgaattgctttccattgtcacatactatttcccttgggattccaaatcgacatattatgttcttccaaacaaacttttgtagtgctgcagaagttattcttgccactgcttctgcctcaatccatcttgaaaagtattcaattgcaacaatgataaagcgcaaatctcccttcgctcttggaagaggacctactatatctattccccatctgtaaaaaggccagactggcggaattggttgcagttctttgggtggtgcttttgtcattgggccgaacttctgacatgctttgcacgtcttgatgtatttctctgtatctttcataattgttggccaatagattccttgtcttatgacttttgaagccactgaccgtggtgcttgatgagctccacacaagccttcatgtatttctaccaccatcttcatgccttcttcccttgttacacactttaacaaaggagcagtaactccacttttatacaactgtccctctaccaccttgtattttttggatgttagttgtattctctttgcttcttcttccttttctggaagttgtgcactggcaaggtatttcaagatcggttctctccaatctccttctctctgtatgcatgctacttctttcttttcgtaacttggctgggtgattatatcgaaaaatgaattttccaatggttgacctgttgcggctgccttagctagctcatcagcttctccattttcttcccttgttatggcttttaccgttattcccaagaaatgtttctcattcagccttgcttcttccagatatttagccatagtttcctcctttgcttcaaaggatttggaaaagtgacctgctaccaactttgagtcagttttgactattaaccgccgagcccctagcgctcttgcctttctcatagccaataaaacgccttcatactctgctgtgttgtttgttgaaggaaaagctaattgaacagaatacttcaacgtttgcttcattggtgttttcacaactgcagcggctcctgctccggcggcattgcatgctccatcagagaatactatccatggtttttcgacttcttcctgttgttctacctcattgggagtccattctgccacaaaatctgctagtacttgtgactttatggctgttcttgatatgtatttcaggtcaaaaggtaagagttccattgcccattttgctattctccccgcgacttccttgtttgttaacacttctcctatcgggtatgccgatggtattgttatgtcatgcgacagaaaataatgcctcaactttcttgaagccatcacaattgcataaatcaacttttctacttctgagtatcgtgttgttggtccttgtaatgcttctgagacaaagtataccggcacttgcctattttcttcttcttgtaccaaaactgcgctaactgtcgctggagttgctgccacatacattaacagaggttgaccttttggcggacttgctaatgttggcatttcatgcaagtatttcttcaagtcctcgaaagcttgttggcattcagcagtccactcgaaggtgtttgcccccctcaaagtcttgaagaagggtaatcccttttctgctgatttagataaaaatctactcaaagatgccattcggcctgtcaatctctgcacttctcttgtgttttttggcggctccatttgatggattgctgcgattttgtcaggatttgcctctattcctcttttggacaccaagaaaccaagtaactttcctgctctaacgccaaaaacacacttttctggattaagcttaactgagcattttctcaggttttcaaatgtttcttgcaaatctttgccatgggtaaatgcttgtttactctttaccacaatgtcatctacgtatgcctcgacattccgtcctaactgcttagccaagacttttcctatcagcctggcaaaagtcgctcctgcattcttcaaaccaaatggcattctgataaaacaataagttccaaatggtgttataaatgatgtcttttcctcatcctccttcaccataaaaacttggtgatagccagagtatgcgtctaagaaactcattagttcgcatccagctgtggcatctaccaactgatctatccgtggcaaaggaaaatcatcttttgggcatgccttgttgaggtctgtaaagtcaatgcacattctccacttgccatttgctttctttactaacactggatttgacagccattctgggtgcatcacttctcttatgactttcgccttcaacaacttttcaagttcaatttttgcagcttgttgtctgtctatagacattcttctcaatttatgttttttgggcgtgtatcgtgacttaatcgctaggttgtgctcaattagacttctatcaactccctgcaactcatctggtgaccatgcaaatacagccatgttttctttcactacctttaagatttcttcctcaacatgtttttccaagttttctcctatcagaatgaactttccagggtcatgttcatccaactgtactttctttgttttcccttcaggaattggcttttgtatttttatgtattctccctgtttttggtcaaccacatgtactcctttcacacttggtgttccttaaagctcatactttcttcctgcaagctgttctcctcggaccgttattactccccttggtcctgggagcttcatacatatgtagttgtggtgtattatggcctcaaaaatattgattgttgaccttccaagaattgcattgtactgatatggcatatcgaccacatcaaatactatctcttcttttctcacattagtgccttttccaaagaccacttgtaaagatatttttccaattgcatgtacttgttgtccaccaaaaccttgtaaaggtactcatgcatttgttaacctatcttctggtatttgcattttcttgaaagcatcataaaacaacacatccgctgaacttcctccatcgattaacactctttgcacttcgcattgtgctatttccactgagaccactaaaggatcttgatgagggaaaagtattccttctgcatcttcaggcccaaaggaaattaccgtttttgagtatactggtggatttgactgatagcttgtcccgacatgatttacctgtctgacatatgcttttctttgcctttttgactcaattcctaacgaagagcccccagttatggcatttatcactctctttggcacttcttcaattgcctctatcttcataacttgcggtgcttctatggcgttttgtcctcgttgatcacgagctccttcatacttgttctcatatcgatttacgtgtttttccaacaagtgagtcatttgcctgcattcttctgtggaatg

SEQ ID NO: 6304 - DNA, 13489 bp, Oryza sativa
  unsure (1)..(13489): unsure at all n locations
caaaccttaacataggctagcttttttgtgcacttacttgagactagttgatttaggttttgaattgtgcaaaaccattttgatttacgcttccgcatacaaaattcggttttagccaaaagttttaaaaccgcctattcaccccccccccctctagtcggcctccttgatcctacagccaccccttttagttttgccgaaatattgtttcaacaagaactacgaggaagccgagataatgtttcgacaagaactacgaggaagttaagtttccaacaggtccacatctgataataaagagactctcaaggtttgctacctcaacttcttatctcttgaaggttattgatactgaagtgctagctgatagaatgttctatatccaaacacttgctaataccattgtggcttcggttcttttggaggctatcctagctaagctcagctcatttgcaatggacatgaccctatatttttcttgcatgttcatctaccaaagtagttggcagcatggtctcttcatctcttcaaacaagtgcaaatcaggtgaacaagaaatctattttgcttcccttcaatatcccaattattttcttctatcatggataatttgtattcttccacctctagggtaccagccaaaaccagctaaataaaactagtgtatatatataatatgtattcatccttcttgaaagaaaatcacataaatatcatgcatgtactattgtgatgtgttttttccatgccactacggcgcagcagaggctatgtgtgttcagatgatgagtagagctgtcacttggaataaaactgacaaatcaattactacatttcaacaaaaaatctggaggcatattgaggtttggtaaatttctagtgacatatatataaggaattttcctatagcatactatagttctcctgttcagttatgggcctgatgcacttcacatcagggattccaattttgttttggaaaaaaaataatcagaactgaaaaaaattaatgaccatatataattgtttgaactcgatttatgaacgtaaaattgtgataaaaaaattcgaagcctaggtaccttggtttacacagataataatatctttcgagtttcacaccaaagagatgttgaaaccacaatagcttacattttcttctctctctctccatgaacttggcgtgcttaggctcgaatgagtcatttataacaatgattcatgtcatactccatccgttcacaaacataagagattctatattgtttagcaaagttaagattgaggttcaaattactttgatgtctgtcacgcccagaaatttagcccaaaatttcatactattttgtgtattaaatccttgttcaggaattagccagggtacacaaaacgacaaattaatatacaagtacaaacgtaaataaagcgtaaaatacttacagaagaggcacttagttctcacaccaaaaccgaagcagcagcaacggaaaaaggcgatcatagcgaggcttcagctccactccacaggcaaaactcaactggggtctgagccttggtcctctaacttcgtcttcagctcagaagcactacacttctgaaaagggggaataatagcaaggttgagtacaaccaccgtactcaccaagccacaccaatgatgcactcatgcaacgggagacaaagagaggtttgtggctatttgcataaaggtagttgcaaaacattttattgagcaaaatagtaaaactgttgattaattaaggtagtactaaatcttcactgatcaacgctacaccacgttgatcaggcctaaccatcccacctgaactaaaccagttcattaagccaatttattaagggtgagactaatcacggtgaatctggtcgatcgcccattaccacgggcacggttatttgaatagttttactctggccagaggtgcacaactgtacccacaagacacaatccaccggcatgtcaccgtgcccggctggacacgtcaccatgtcgagtgattgtggcaagacccttcatataactccctctgaccaatcgatgccacacctcaggtttcacccctcccccagcaggcagcaggcagtcccccctcgtgccacggtgaatccggaagcagcataggccgtcgcagggcccatccatactcgatcacacccaccctagcctgggtacgtcagccaaaggaaagctatactacaagtcaagcaattacccattcctgcttgtggtacgcgcggtaagtcttccagtgcatccagcgaaccagtccttaatttgctatgggcgcaactagaaaaaccatgcacccacaaaccaccattaagtcatgttttagttggataattacaaccaatgaaacatggctagatgtctcgagcacgcagctcgtcaagatatatactaggtgtctaatgatgtaattatcccattatgtgaactagtggtaattaagtatggataagcatataattctagctaggtcaacataagtaacacaaaatagtcgaattatcacctaagtttgacaaaggacgaacatcaagtaatatggcacaagcgaagaagtagataaaaccctgatcccatgtaattagcatgacatgcaattttatttgcaaacgataaaacatttataaattaggatcaacatgctcaaggggaatgtgtgacttgccctgcttcttcaaaagaatcctctgaactctttcctcgtaatcgcgagcttccgaaacagcggaatctacgcgctggcacgcaaaacaaggaaaaactctaataaaaaccaagtaaacagtatatgaaaagtaaacaaacatgtagagctcaagtttagatgaattttgcaagttgaatggcccaatttggagttcttatgaattagctatgaattttagaagttttgagccatttaaatgaatttctataattattactcgaaatattgcgcaattaaagctatttatggtgtcaaccgaggggattaggtggagccgacaagcaggccccacctgtcggtgactcaaggagccttggcctaccgtggaccgagtccacggaggcacgggctagtgcaccacgtggcgcactcgtggcgccgatggggcaccgacgtgctggccacctatgcggacacacgggcggctcagatggaggccggggccgatccgacggcccagatcggccgcgcgacaggggtggcggcaactggctgcccggcgaggacgcggcgcgcggcggcagcgacccgaccggacggccactagcggcagcggcgcgtcgcgagctggcccaggatgcgaccgacgaagcggagaaagagggagagggaggggagcgctcatcggggaacgacactgtagggaggcggccggcgaagctcgaggcggagggaggcggcggagctccagtgacgagcgacgctcaggaaggggtgtacgagctcggtcgcgacctggggatggggtttaaaggggttagggaagcgcggggtggccggaacagcgaggaaggatggccgaaggcgatgagggtggcggagctcaccggcgagcgagggagatggagctccggcgaggttttcgacggtgtggggcggtgcccgtggtacggcacagtgcaacgacgctggggtgaccatcgtggctcgggatggcgggtaacagtgggaaaacggcgaccggaggcggtgaatgtggcggctgcctcgggtgtgtggtgggaaggtcgttccggcggcgttttggggaaagggaggggacgccaagatgtagcttggcacggtggtggcggtgcagtgcggcggtgacccaagcggtggtggtgggcggctgaacgacactggtgagcggctgaggttggtggcgcggtggggcggcttttcgatggtggtgggggaaaacggagtggcggcctggcttgcccttgcggcggcgaagctggcgatgacggcggagtagagcggtgaagactagagtggtggtggcgcgcggccaaagctcaccggagggtggcggaaatggcggacggcgtgggcagcacgggaggggttgaagggagctcgggcaaatggggaaaaagggagagggaggtgcgggcatcctttttgtgggctcgggtcaatgggatcgtggccgattaggggcggcaacctgcgaggaagtggcatggcgacatggggaggatggtggctggatttggtgggaaggagtggggaaaatgggcgcaggacggacgcgaggtggaggagaggggtggcatctgggcccacgcgagagagaagcgcggggaggcatgaaaaaggtggcagcgtgggactgtttcggcagccatggagccggcccgaggagaaagaggaagatgacacgtggggcctcgggtcccacctgtcggggagagagaggggaaattggcaaggggaggttaaatagacttcatgggcaagcggaccgagggagagaggccggcccaagagaaaggagggaaggagggaggggaaaatgggccaaggagagagagggagagctttggaatagaaggggtcgaaagtgaaggagggggaaataatttgttttccatttaatttaaatgggtttaatgaactttatgctatttaaattatttcttgagctcggaaaattcgcaggaaaagttcagagagtattttagggcacagagaatattacaaaattatttgtagccatgatttttaaaggaaattttaattccctccttatttcacttgattaaattgctttaatttttaatataatttctagaaatgatttatttaatgatttttaatctcgaacgaaaattggggcgctacaatgtctgtgtgtgtttgaattaggaaagatcacgcctatcaatgagaataaatgtagaggttggatggattgggaaagtagtgctgtaaaatctcctatattcgtgaataaatttaaaccccaaatcccttatttttgtagagagagaaataagtatacgctgttaacgaccaaatttggtaaattctatcactattggcatcggaggtgaagatcagattgaagtgggatccaaaatgaagatcattgcggaaatagagtaagagtcggctgcagtccaaatcggctaaggtcaggtcggcagagttcgagtcggatggggctagccgatacagccgattctgataatatgactcggtgtacgtcatcgggttcaagttgatgtgcttcaagatggttgccatgcatggatagagtcctgggaaggcaattgtatctattaattaggatattctatgtaatttcccttgatatatgtttgggcaaaagtctgccgtaaagacttatgttatcttagagtttgttagagataatagtcatgtctgttgtggacgtatcttgtaattctcgggtataaatagacccgagccctatgtaaaaaagggacgacatccaatacaatctcggcgcatcgccaccctttttgctttacttttatttcgatgagttcgtactctcgggttgagctgcatcggtttcgatcttcaataagaggtaaaacttgtcatgacgacttatgttctcaggattagtgcttccatctttatgatactctaatcttgtctatataattcgtcgagttatcatatatctcacataatcttcgataatatctttatctaacctataatcggctaacatctgttaatggaaggcagccgattaggttagacaatgacgttaacttagattatgtgatatatctaccactctatgaaacttccagcggcttgattgtctagatattatttttcttttcatacttaatgctgcatcagttgagtttgatctattaagtcatgcttagaattgcaatctctagcctgctttctggtcgccgattagggtagtatcggagtttcaaccgatcttatctgatttaactacttttattccatatgcttaatctatatgttaaatctgccctttatgttaagatcttgtcgcatctaagtacattaggcttctgtttggtatattctacttactttaatatcttaatatagagtggtatcggagtattagccaatacatgctagatccatttgatcggctatgctataaatgtatataatcccactattaatatatatttcgatctaagtgatttatactgtctcggcaaggcgaccgatctatcccaaccacttgatttaagtatatatcgatataaggattatatatcattaatatctacagccgattgagtagatttagttctgatttgcttattgatatttgccgatcgatgtacgcatgacatcggcttgaaataaatgatatgtcatcggcacctagcgatcggctatcattaaaggattaatgcggtttcttgttctatttcttgtggatngcaggatcaaattanctggacgctcatacatcgaaagcgagtttggacctgcactggagttagcagatctcncaggcttcgtgtttctgtcaacataggcatactcagtanacataatcggttccaacgctgtctatgactgtccacagatgtanntggtatgtntttaagattcnagccatcgtcatcattcttcaagaatgatagctagatcacaaaagagtaggatatgatatggcacattaaccacaaattgaatactaccttgaggggatcgatcgtttgctctaatttgtatagtatatggagttaaataactggttcgaaatacaaggtaaaatggtctaatttttttttccttatgaatcatatttttagaatcgctaccttgagggaatcgatcgtttgctataatttgtatagtatatggagttaaataactggttttgaaatacaaggtaaaatggtcttaattttttccttatgaatcatatttttagaatcgtagagcatataatacgtgaaataattcagtaaataagcagaaaagaacggggctaataatcaaattaagaatcactccagcgcaatcatattttccaaacctatgccccttccattgattagtttcatcaactgaaagtttgatgcagtacttgtggggcagaacatgcagaccaatcaacatatatcaacaggtaaaattatacagttgaatattatgaggttataatttctcagccaaagcttcattctcaaatgaatatatcaaatctggttactcacactataaggaatttgattttttatgactgcaaaacatatttatgagtagacagtcatacatcattaaagagtggctaatctactgcgttcatcaaccaaattaaatcttgtatcaaattgatatgtaatttgtgttcatcaaccaaattaaatcttgtgtcaaattgatatataatttagcacatgttttacatgttattatttctcaatcgaatcattctttgtcttcctatctttaaccatcatctctagttttccttctcaaatcaacaggctcaaataaaaaatttgtgcctcattcaatatatatagtatacattcatctataacattgatttctctgtcttcctatctttaaccatcatctctagttttccttctcaaataaacaggctcaaataaaaaatttgtgcctcattcaatatatagtatacattcatctataacattgatttgtaagccacatgactattgataagaaacagatttaacagtttagtaagcaaccctcttgtttttctccaatattttatcacatttaataatgatcttttgcggtataactaacccatattatttcaatcatgcctaaaactagcactcctatatatcactggtacgacataaacacatcatgtgtgcaaagttagctgtatgatgccactatatactatcactgtcatttaattgctatggcatcatgtttatgttccttgcccacttatttgcttcataaatcacatacgcatgaacgctagctactcccgcatgaatcattagctagcttactttattgaaatgcagaacgatcatgcatgtaacatgtttcaatttttatgttttttttagcgcgccaattgatctctacccttctctgccctttttgttttttctaaaggtatcccaccctcgtactatctttggttgattggatggaccgacgagatgaatggagaactatccagttcatgctttcttgacatcctactgtttggatgcataaacgggattatatgtgtttggagacagcaagatattacctccgttatcacatagatgacattatagaatgcgtctagtcaaaccttgatatattaaattaagcatacataagtattagaatttaatacacaaaaatggtattgatagatttatcatgaaaaaaatattcacatggttatatgttcgttatttttataaatatactgttataaaaaaataatggcaaaacacatgcatttgagacggtgtcaatgtccaaaatgctcaattaaaaagaacagatgcatatatgtttcactaatattctcataactccaaagatgtgtatagttccgttccatataaataatatggttttggagcgtggttctttggcaagtaacaatatatgctggagacgcaatatatgtgaagatatattatttaattgacaaaacaaaacaatgaatgagatgcacctacacaaggttggcccaatccggtagaaatggaaacaaaaccaatagaaacaaataaaaacaagataataaaaaagagaaaataaaatatgaacaagaagataaggacatgcaatgaaatattatcgaggaagattatgatttacttacgtaccaacatctctatgaaaattagaaataacataaattttacccaaccattctgggtcatcttttacaatattatcaaccaaataaattgatcaatcgaaccgtagatttgatcaaacaatcaataagtgtagttattctatcctaacccccatccaacacattgtcctattccattcaacaacatccctccaacaaaacatagaatataatacatcaaatgaaatacaccttagtcataacaaatgagataaacatagaatataatccatcaaatgaaatacaccttagtcataacaaatgagatgtgtttttttacacatatcatagtatacgtgtatactcaattacattgtccattaaattttattcaatcagaacccaaccaatattgaggataaatagaattggacataatatgctcacaatttgtaggttatgcggacaatgaagataatatttgtttgagtatatcatcctccgatgaaattacaattatgagacataaaaagttacaacttatagtactatttaatatttaaaacctaaagcccactacttaaaacactaaaaatgatataattgggtcggtttaaataataaaaaaatcacaccaatcatttaaatactatatataattttcctccctgtacagagagatttcttcttaatgaaaaatgtagatatattatttctcccccatacagagcgattgcttcttaatgaaaatatggagtgatcgaatgtttttttataaaactgtcatatgaaccatatcagaaaattctatcataactatcccactcgcaggtttgttaaaccataacaaaattgacatgaatatctgttcaatctatcttcacatattttcttcaaaatctggtgggtaagaaacccctcttgctttcctccaatattccatcatgaattaatgtttctttttcagtggataaatatgtattctcatcaatactatctaatacgagccaaagctaataacctagccaaagcatgtattcatcactgatatttatatatggcaatgtattcatcactcgctggaagaaaatccaatagatcatgcgtgcagtgtttgcatgcaactgtatgttcttcatgtcacttaattacttgctgtacatgacacactattcatgtttctttactgttaatctcttccatgtagtttaagaaggttttgcatgcaactagtcgcacgttcgcgcgactataaccttcctatctattagctgctattacaattaacaataaattttccaccattcagctaaatcaataattaatgtatagactcagggtttatattcatcttattcgtgttgtttcctgctttacttgatttaatattcgaaaaaagtatttggtcggaagtgcatgttcaatacaaatactatgttgttttgatatgtaataaatacatattgtaatgaaaataaacaatttactataattacgctaaacttgtgatattattgtaagaatcaaaattaaatttcactactacctcggattccaaatatcctgggtctacatttaagtaaaattgcacatcataattgtaactatgttataagatttgtttgagatgttaactttttttttctatatctttgttttgattgttgctgactgatttaaagtgttatatgtagaataatttttccctcttatgaaattatttaattggttatctagtctaaggaccgtttgggttgattggccaggctaagccagccctaggcctatttgggaggccaacatgagataaccaataagaggtaatgagtggctcaaactcttccttctctctatattttactacttctagaagattcctcatttcaatggctaggattcttccttgctattttgtcattttgtgaatccaactgctattttttgacaaatcatgtggctaattctggttgctttttgagttttacttttcaattaggtagatgtctatgcattgcaatgcaatggaatttagagtagggataagtctatttaacacccttcaactttttgctttgttaaaaacacaccctcgaactataaaattggtttctaacacactcaaactatcaaaaccagacatttacatcctttagaggttttaggatggttttggtatagctggacatcactttggatgccacattttaaaaagatccacatcagcaaagggaagtgtcccattagtcagttccattccacccctcttcttcttccttcccctctaactcgctctcccctctcttcgtggagcagttaaagttgacagcgagctccatccgtggagagacccccaccctctcggcttggagctccacgctatttcgccgccgttggcagtaacactgctcaacaagctcgagttggaggtgaagatggcgcgggcgacgacaaactcttggtggtggaggccctgcggcatcgactcctccgtcgagttcatcttgggatcaaggccgtgctgccggcacccgtctctttaacctcggcaaggagggggagggggtgggggtgctgggtctagggtggtagtggcgcttggataggaagccatctacgagctccctgagcttgacgaggagagtgccgacggcggtagtggtggagcttgggtaggaggggacggcaaaggcttcatggaggagagaattgaagaaccacaccttggtctcgtactctcgtcgacatcggggaggagagatacctccaaatttcaactagccgtagccagatcaagatacagttgggtcgatccgcatccatcaaccctcaccagagcttgccaataaccccgtcttctatgtgcttggcgaaccctcttcttcgagcttgctaacagccccttcaccaatcacggccaagggagcaggctccgcgtcaagcttgtcaccaacctccctcttcccttgagcatggccaagggggtgggcaccgcatcaatctcactgtcaacctcgtcatggccaccgccaacctccctcttctctcgagcatggcgagatctctatggccgactcaagctcggtgagggagggagtcaaaagagtgagccatggcggcctcaagctcggtgaggggtgagcgagtcgaaagagagagggaggaggaagaaaccactctaactagtagggccagctgatatggcaataccaaaaatgccacataaaatcacaactttcacggagaaaggagaacaactgtattttaaagtagtagagaagtgcatatctcaaagaccaaatatgccacataataatacagctttcgcaatacacatttgctttattaaccactaatgcatgaaagccaacttgagcatgaatcgtttagcttagtttgctggagcctggagacgcaaaatatgatcatgcaaacgttcagaattttatatactgtttgaaggtatgcagttcgtctccacccttgccttctccccttgataatcaaaattccccatttcccctatgaagcacatcttgaccttctccccttgaatcatcaaaatgagatgcagtttccgggctacttttcagagtttacttaattatatgctcaattacattgtgttcatatgtgatgaattagtcgttctgtagagacaaatgggaaggcggggtgagctgcaaaagagcggatgagaaacgctttgcatttttctttcatattccatttgtcatccacactgtctatgtaccctcaaagagaatatatatgcactgtattagctacctacaagctatatcatccacaagtgtcaacctcattcttgaagcaccaaaacaacgcttcagtagatcttaacaaagtacaaactcattatctacctggaggctggagggaatctcccttgtgccactgggaatatgcccttgaattttgtttctcccatttatggtactatttccaaatcttatgccaaaacatgctgtggacattggccatgctgtactgaggaacgcaatgatgatttatgcccccatcctgtattagacaaacttaacgacatactctgttcttcactcatgatggtggtagctcatctgaaatcattagagacaagaagtcaagaacataaaaagaacaatttatgctatgggccaaacggagacatgagacacaagtactgtgtatttagaaaaagggtaattaccatattataaaaagggtaatttcctcgaaaatacgataaccaaggaaacggttggtaaaacaacaaaatcatttccatttctgtttctatttttagagtaaagtccatcaccggtccctaaacttgtaccgctgtgtcatcccggtccttaaactcgcaaatcgaccgttcaggtcctcaaacttattcgactatgtcatcctggtccctaaacttgcagatcactcgtttaggtcctccaacttgctcagttatgtcacctcggtccctaaacaggacggtctaaaaactttatatcaaaaaataattcataactttttcatgtgaactctaatgaagacaaactttatatcaaaattgtagccctcgacgtgacctacaactttttagttgaaaagtttttgaattaaaaccatttagggtctcaaaatattgttgcatgtttatagattttgaaattttaatttcacaattacattttgggacaaa

SEQ ID NO: 6305 - DNA, 47884 bp, Oryza sativa
cattatgctgaggacaaacatattaaatgattatatgtttgggagaaatatattgtattgtgtcagtgtggcaaggccgttagttccatatctaaccaaatatggacttcacttttatagaaatgaacagatcgatagttttttccccctgaacatgtaggagaactgcatccctttgcattaaaaagaaagatatccactaaaactaaaaaccataccacaccaaaaacagagtaatgaagcatgtatatccattgcactgcagaagttggatatctttctttgggtcttagaaagatatccactaaaattactggaatgacaactatgttcttagaaagatatccactaaaactataaactaccacaccaaaaacagagtaatgaagcatgttctgaaatgacaactatgttctgaaggccaactataccttcatcatgttctctgtcttcccacattttccaagaaaatttaaaacatggtttagtgttccaacagaaatggatgagagcgaagaatccaaatattcaatcatctcacttgctgttttccagtcacgtatcctgttatgaggaagcagaacaaaatagaatattgagttattcaatgcatcaaaagcttgtaaacaacataacaccagatgtgtgcggtaaaaaggaatttgtttctgctcaacacttgaaaccaccaatatatcacaagtccaatacaagttacatgatgaaagcatggcagcatgccatgatagcctgattatctaaacctacaaacagtgataatgaaaggagcagaggctcactggcaagttgctgtagcccatcaaggaaaatgaaattatcaatgagctacaatccgaattgtgtaagcgaacaaatgtagattgccaatacagtaaccccaacattcaattgattcaagttgtcaattactggaatcgaattaacactacacagaacattccaccctgctatcttaataaacttgaaacttcatactgtttttacctattaaaaacttatcttttatatcgcatggttgcttaagaagaacaagcagatgtttgtaagtgactcaaatggtcacctgattaaaataatcctaaagcaaagctgcacatgacaggtaagatgactgagtcatgtacacctaaaagccataaacacgatgataccaaagcaagtgtgaatgcatatttatagtgttactagatcagcagatgttgcacactgctcagataataataatagacctaagttaccaatttagaattgcctgttcgacttaagacatcagtaaacgtacatggtgcatgaagctattatctcaaaataagatttttggttcaacgggatggattttttcttcatgaattccatcaattgaaggactctttcaggttcgccacccttattgaatgcttccatgagagatgagcatataatggcatctggtggaataccatttacttccatctctttgaacaggtccaagctctcttccaaccaccttatggtccataagaactaaaagatcagtttaattcttgagaagctaaatcaattaatcataataacaaaagaatattaccaccagcattataggcttggatcaatgtagtatatgtcaaaacatcaggaaaacagcctgattttttcatagaactgaaagtagattctgcttcagatagtttgccctgaatacaaatcattgttaggatagcaaactttttagagtaaacaacagagaaaataagagcaacacttgcctgtttgatatacgaataaatcaatgaagagtaacctccttggttgaagaaaccttggagtccaccatgtcctcaaaaaatctcaaagattccgtatactttcctaatttactagatccactgatgagtatattgtaggttacagcatctggtttcacattgctctccctcattgatgtatacaactccaaagctttctcataatctccaaaacttaaataacttttaatgccggagttgtaagcaactgtatttagatcaatacctcgggacctagctgcttcaagaattgtctcaattcttgttatctgcctgcagcgaccgcaggcagccaacagagtacttatggaaacaacatctggctgaatgccatctttctccatttcatgcagcaagccaacagcttccttcaacattcccgcagacccataggcatcaataagtgcattgtaactgactttatttggtttgcatgagttcttcttcatcttgttaaagacctccctagccttctcaggctgtgcagatctaccatatgcattcagtaaggaggtatacgaaactatatcaggtcgtaacccatttttctttattaaattaaaaattgccaaggcctctctatgcatacctcgtgaggcatatgcacccaaaagcgaattatatgctacaatattaggcttcactccttcagcaaccatcaaatcaaagattgctttgcaattttcaacttgcccataaatacaataagaatgcatgatgctagtatatgtaacaacatctggaggacatttggttcttctctccctcattgagttaaacaattcaatagcttccccacactgtccaatctttacaaggcaatggatgataatatttaacgtgaaagtatcagaggtgacatttgctcctttcattatttcaaaataagatattgcttttgagtactgagctccattcttgagagcagacaagacaatgttgtgtgtaaccaaatctggtcccacaccattttctgtcattttcttacacagttctaaagcttttttccagttgccagcagccccacatgcatttatcacattattatacgtagtccgggtaggaggtatctgcagcaaaagtccggaacacaaccttctttaataaacaattatggcaactaaactaaaaaaatgaaatatataaactttgctggttttctaatagtctctttgcatttcaataacgtaaggactgatgaggcaatcaacagtgatgtgtccttgcacaaagtgagtgcatggagccaaaaactttatatggttccaagattctcttcaaattcaacccatattttagagagaaaaacttcaacccttaatcaagcaattttaccttactcaacaaactcccttaaaacaggattgcatttctcgctctgaacctctggtagttgcaaaacatgtttttcctgttattttttaactcttcattattttctttggtgcactaaatctaccatagccattactatgtatagtagaaaacagaaggaccctattgggtttatagatgaaaaattagctcaatatcaagaatggttatagcgaaatgaggaaagcaataaacgcattgtactcattgtaaagaagaagcatttccaaaattatttatctaaaatgaataaggttaaaagcacaaaagttaatgttttgtattacttcgaaaaataaaacacacaaacacatcaacttaggcatttgcaagatgagaaagcaagaatatagggtttatgtttcaaggaatgatactgacagcagcacgaagcatatcttccataatgttgatggcccaacgccattgaccagctcgagaatgagcatggatgagggaattgtatatatcagcatcaggtttacacctaaggttataaatgtcagtattttgtccaaaaaaaaaaagagaaggaaatgacagataatgaaaaatgatatatttcttatcacagtagtggaaaacaaaatatagaaatagcaaccacatggaaattgcacttagtattacacatattacagtttattatgataaagtataaatttcctacatgcgagatcagcaaccatcacttgcgctgttccctagatgatctgggaagattttggatttgcaaactcaaacaaattgaaccataacacaaacatgttatttgtatatagacaagttaccgacgagacaattactcaattatgaggtgataaatttttttagtaatatcaggcaaaactctttttgatggttgaaggaacgcagaagccaaattaaaaccttatgtcagaaatatatgttataacattcataccgccattcctgcatctcaaagaacaggccacgtgcctgatcaacctggttatgcctcgcatatagtcgtatcatcatgccataaatgtcgttacgagcacagtagttatcctgatttttcatccagcagaacacatggacagcatgctgtaaattcccagaaattgtgatctcctacaagtgatacaacatgtgtaagcgcgttattacctgaaaaggctagttttatgttagcaaatcgagagatttgagcctcgtctacaaaatttgcatgtgcagctggtactaccataacaacacagctagatcgattgaattgttcatgatttttgtaatttcaagcaatcgataacattttggccccaaaaccagtttgtcattagtgcctccacgcaaggcaaccatggcagccacattgatgtatatcatcagcaattttcaattcatgaaatgctacagagcgtggggatgatggccttacgcggatgaggagagggaagttgcggcgggcgaagcggccggcccagcagttgagcacggcgtcgacggcgcgggcctcggcgcgcgggagcgcgagcacgcgcgcggcggcctccgacaccttccagtcccgctgccaccggctcccctccacgcgcaggcggtggcgcgcggggagcgaagcggcgcccacgccctccacctcggcgcgggcctcgcgccggccccggtcgtagtccacggacacggcggggcggcgctccgcccaccccggcggcgcggcgcccgggtgcgccagccgcggccgcggcggccgtgggggcgcgcggaccacgcgcgtccgggccggtgacgctggcgccgccgcgtcgggcgtcgcagccggcgaccgcggcggcggcggagcggaagacatcgcggcgggtggtggagggggggagaaaacctttaccgttggggcggtgtgagagcgggttttccggataaggggcgatcttttcctcaacagaaaaaccaggaaatgaactccatccgtcctaaaatatcctcgcgaaattagaatcagattcgtaaaacgagaaagcattctgttatatcctagatttttatattttaaaaataagatagtaatttacaagcaccgcaatctaaaaatatcaccgtagaaatgcttttattttagaaactaggtgaaaccctacgtgttattgtaggagtttagtattataataatataagtaaaaaataatgcgtaacatagctagacaacataaactaaagtaagttgatgtgatttatgataatttaaatttaaatagtatataaaatgatgattcaagatatcattttttcaatacgattttgtatccgccaaaaagaaatacctggattcggctccgatacctatgtaaacatatgggtagattattttaccctgaaattattacagattaatatggacagacgggaaatacatgtcccgttttcaccccttgattcgatcttacccgtcctattttcaccccttgattcgatcttatccattcccgttctctctctgagtcgtcgtcttcctccttcgcctctcctatttcacccctccctcccccctcctctccaatacagcaaagaactcctttatgcaaacatagcggccgtgataatagggcttttatctaagggtaaatgggcaaacgggcacgattaccatgggcagcctccctccaaccgaagtaccgaacctgcgccgagggagacagtgcttctatgggccggattttgtcgccgtgggccaggtgagcccgctcgtttttgctaacctcgctggttgccgtccgatgcagatcgtgcgctccatctccccgctatttccctccctctgactccgaatccgaatccgtagtcgagtctctccccccttcggcgtaaaaaggagaagagaaatcccccgtctcctccgctccttgcgacaagaacagggggagggagaggcgccgatccccatctgctcgagcaaagcagcggaggggaggggatcctgcaggtgagcagcatccatccacatcctccttctgattcatggattcatctctctctctctcccacccctacttttgtctggaattcgctttgtgtgcgttcgttaaccctagctttctcttgtagatctggaagaagctcatctcttaatttcagagagagcctcaaccttttgatacaagagtaacagtattgggggttcatctgaacccccaaatgtcccaagttggatccgcccctgagacgatggatctggagacggagaatcgtcttgcttctttacttctcgaggaggcgaggaggttgcaggcggaggctgacagggaaggtgttcacgcatatctgcgaaagcccaatgtaaggcaccgtccgaattcgcgcttccttacggccacagttcgtggagttcagcaaggttagcatcgtagtttcgatttatcgttattccatacttgatacctcctcctgttgattgattagctatccaaggcaactataataatttcttagtttcttgactcattgttaatcgtttggtagacttttatctggaattgaattattttttatagaacatattaattttattgtttgcccaaaaaaatgtctgttccatgtcttaaaggagaattataggtgtggttaaacacaaaatataaaccaatcgtgtaaaacttacttcctttgtctaggaatgattcgctggatagcaagtaatgacaatctcataagtatagctgatctcatgttgctaattttcttgtccaaagatatcagcggtgttctggttgtctacttactgaattggcatgatatgtgctgttcacctacagcgaaccgtgttgtggaggtcaatgaaatgtggcgtgccagagagaaggaacttgaactggagtctaagatgaaaaggagtagaggtcttggtgacgccagaggtgaaaaacgcaaaagtgacttgagaaaccagagttccagtccaagggttgaagaagaaggcatagcttataacagttcatattcggatcaggaggatggtctaggggacgatgacattgagaagtttcttcattcgaggtctgtattttctatcttttggttgttctagtaccaacattttacacaagtagctatctgcaatgttgctgacagagatgtaactttggtctgctatagggtgaagcgaggtcgaggggccgttggttctaggatggatgagcctggtccataccttaatgttgcatctcgtagtcaagagaacgaacctaatgctgatactcaggtggaagaaaaatgggaacgaagagtacaaggcccggagaaaccagtgtctttgagatcaagatcacctgatgactattggcgtagggaagcactagatggagaaccttccagccctgaactccacaagaaaaaagagaagaagaaggaaaagagttcagagaaaaaggacaggaaagagagaaggaagaaaaaagacaagaagaaatctaagcatcgccaccaccaccatcacaaaagtcggcaaagggagtgattgttctgcttgctgagcataaaaaatgtacacaagaaacatgttagcttctaattgctactgttacttctcacttgaaacatgttgtaccaaaaacttgatatcgtgtggaatggagaactgttcttctcacacggagtgttgatacaaagccatatgttagattttagtgctctcgttggtcttgtgtatttattatcatgatgactaaatcacaccctcgttaattaggaataacgtggttttggtagctaaatgttacagcttccaatcttatctgcaactattgtatgttgtacaaatcgtacaaatcgatcaaatttgtatgctgtctgtctgtcaggcaaggattcctcaattggagcactttggagtccctgtttactggcattctagtttcactttcacatcagtagcccagatcagatattctgactcagaactttaaaacgctgctgatttgcactttgcagtatgacctcatgataatcctccaagcaacatgtaccttcgagagttcttccctagaactttcatttcgaaaaaaaaacaaattcacaaaaataaagagagatttttctctcctttaagaattagtttacatttcctgttcatagcctgataatgcagcataatctgtggaacttcatttgagtatcgatcaaaacagttcagtacccttgctgagagggtgaaaaagaacatagggatgacatgattgttcatatgtagttgcacaaatgtttacaggattacatgacataaaaaaaatgtaagaatgaaaagataatgacctagagtctaccacttctgtttacgcctgaaggcaatcagtggaacgctaatcgagatttatgggctctgtacagtataatgcaatgtgtattgaaggactggattcgacaaaatctatctgcaaaaaacaatgaaattgttactaatcagatcaaatgatcagaagcataataagggacgaagtgaagataagtagtagtaaataggcatgtggaatatggttaaactgatcatgtaaacatcattcacaaacaagcatgatgagcagtgatatttgatagcttaagaatagttgtgccaagcgaaagagacttaattctggaaggttagtaagaatcaaccacatgttcgataaataaaatggtttcaagtttcaacatacacaaagaagttaatgaccattgtactattctagctgctgtcattgagatggtttggagatttcaagtagtcaaggtaatttgtatattttgagaatttttgttgggacctgtaatgactacaaaaaattaacatactcaacaacatgtttaaatttaaaagtgtatagcgaaattgtatcagttactcccactcattcattgtgcaggtcagtcaaagctactctatgaagaaatggcactttagcttagtaagtggctattgccttagaaccatgaggcatatgtctgaacgatcatgattaacctgcctctttcttaataaaagagaatagccaaacctatatctcattgcaaactacaaatagctgaaattttagattgaacaatcgaaaatttgaaatgttgtcagcgaaatactccctccgtcccaataagtagcaacctaggataggattagacccatcctaagactagggtatgtccaaattcgtagtcctaggatgggattagacccatcttgctacatattgggacagagtgagtactcacattgcttagcagtgaaaagtacaaaacataaaaggtgagaaagatagcactgaatctattttctttaagggaaagcattgtgctgtgcaagttcctcaacatccatggctattgagcaacaagaaacaaccaagagaaggacctgaggcaatcacctgcatcaatgaatgaaggaagaatggcccaggaggattcagccaacaacaaaggggctgatctccccgttccgcatgccgcgggctatctcaccggcgatcaccaggcacgttgaaacccagccggcgagcaccatccacaccatgtccacaatgtgagccgcaagcccccacgacatcgtcatcctcgcactcttctccctcaatttcctctcctctccagcctttccctacagctgcttccagggaggcaattccacaaacacctagcctgcaagcccacaaggaacccccaacagtttgcccccccccccccccccccaatcatgagtgagccgacaagatgccatggaggtgaacaagggttagatctatctagttctccaataattgattccatcttctaatcgatgggattgacaaggcacagaacaattacctctgtataatcctgagatggcaaattcacctcaccatgcaacaacagaatcgactccagtttgcaagaacccttcacccatggcagtgattgaatcaggatcttgtgtttcaccaccccagcacgtacaattcttctcctgcttcaataagattggaaaccaaatagaccttggggaatcttcagactcttcagagtgggactgtttccccctttgcttccgccctcagattctaccaaaccatggacggatagatccttaaatttagacggaatcaagaagagataagacaggaaaaataattttttttagaaaatacaccatcaagtttcttgcttgctttccccaaactcttgcctttcacctgtcgctgtcaaactgacccaactgagcaaattcaagaaacacctaggaccaacctgcacaagaaccaactggagactgccacataggagtctctgaccaggaattttggaggagatcctcatccaaattggtttatccaatcgtctttatctgtttggttagaggattagataggggatttggacaagtatacaagtattcttcagttttgtctcatcgtcaattcgtcgaaaaacacctgccctccaggtcagcacagtacattgaacagaaaaggttctactgctgagtaaatgcagattaatcattttttttaaagaaatacagtacagacacacgctcataacatgcacactcacgttataaacgcacacacggacatctcattatcgattggtatgtcatctaccactaaaaaaataatcgatctttgactccatcaacagttgtcacaatataagccattggcttgttgagcttttcaaacccaatcttaaattgttgcaagcatttttttttcatcgttttttttttctagcccaagtcctactcgaaaaataatatcttgttgacttatttatttttgtacagcatgtgagtctttttttttcatttctcatacatattgtgtttgcttccctgagccagttccggcttataagatttgagttgattccatcatctcctctctatgctacagtagctattcttaattaattgaatattgataagtactaataagttctctagatcttttttagaaaaaaagaaaagttctctggattgttgggtcagagactcatccaaatttgggccaggctctgggtcggcctgctgtcactaggccaaaagtcatgatccagtggcccagatcttattaggtccctcactgtcattaggaaaataatttggggaccaggtgaccctgcttaaaaagttgggttatgttcaaagcagggtctcctaatctcctatgattattttccggatttcaagcattgcgatagataatatatagcgggttggtcgtgaattaatctcttgatagcagattgtgtatagagagtgctatagcggctagtatgttccaacatacttcctccgtttgtaaatatttgacgccattgattttttaaaacatgtttgaccattcatcttattaaaaaaattaattaattattaattcctttcctatcatttgatttattgttaaatatacttttatgtacatatagttttacatatttcaaaaaaattttaaataagacgaacggttaaacatgtgctaaaaagtcaacggtgtcaaacatttagaaacgaatggagtattatcttgggtccgctaactttgtagtgctagcagtagaggactaccaacattatagcggtcgccattacggccactgcaaacactatattaattaccttgcttccaagtaactgagctacatgtgtagaagtctaagaagtggatctgaagtgtttgggttaaagtcactatattatttatatttactagcgtataatatccatgcgttagatcagaattaaggaaacattgtcattaatacattctcggcacaacaggcgggtcctttggcccccacgcacaaactccattttttcccttcacaacagtgtgcagggagttgatggtgtgagtgatggatgcggattgaccattcatcacacctagttgtttcatttaaattagtatatgtatacctagaaggtaatatcatggtttaagcatgaccaatgagtttatttttcttctagaaaggtataattaacaagttattactttgttacaataccaaagcgaatcgattttcttttgattcatcactgtatgtacgtagtatgtgctgacttatcatcaaatttacacttgaaaagaaaattgtgctgatctttcaaaaataaagaaaagaaaattgtgcgcggttcgttgtttcaatttgttcaaacaaggtaaaaatatgaaatactactcatcacctgctctttattgcccatcacatgataattacacaccgttgcaagaacaagcatagcacgcgaccataatcattttattcgtttgataaataaataatctagaatataacaatggcgattattatttatcattaaacagcatcagatatcaattaatcaccaagtggcaacggcgcgatccgccgtcgtcggcgcgcgtgtcgaggtcgcactcgtcgcgcccggggagcccctcggcgatggcggccatggcccccttcttgcacgccagcggcgcctcctcctcctcgacgagcacctccaccatggcgcgcagcgcgtcgcagcggcagcgcgccgccacctccctcagctggtggcagcaccgcgcccgcacccccggcgggtcgccgccgccgcaccgccgcagcaggtacgcccggcaccccggcagcgggtccttgggcaccacgccctgccccggctcgcacccatccgccgcgcgcgcgacgccgccgtagtactcctcgccgcccgcagccgccgcgacgacggcgccgaccaccaccaccatcagcgccaccagcgccaccgccaccgacgacaccgagagcttgctgttcttcgacgccattgtcgccgtcaggaagagaaatcgatgagcagtgcaaggtttgggttgttggggggggggggggtggtgagattttagatggttggaaaaagggagagaaatggaagcgtggggaggaagacgaacagttgctttttttgtttttttgaatttgccgggaagcgaagctacgtggagagggcgtcgtgcatggcgcgcgcgggaattgtcagtgggcgtaagggattagcgtccaaattaaacaaaacgaattcatcagtgcatttccagggccgggctgcctacttgcttaatgggccgtgaaagattgggcccaaaagggacctgcacgaatctcaactcgatcggacaaagggtctcatcttttcgcttatacttattcttatcagacaaaatttgaatttttaaacttaaatttggatttgattttaagattttttcatcgaagtttatttttcaatctttgcttttaaatcgctaagaacacgtatataaaagtttaattcacaaattacttttcgtttgcaaatatgtcgtttcgcttattcagcgaaacgatggctccggaagggtttacttactactgggcccgcatactacctctccctttgtgtttccactcaccccgcctataaaaataccgccatttcatcagtatactatttactatagcatttattcatttgtattaaaatatacttatcattgagaccatgtaaagcaatttatgtgacttctaatgtccaagttgtcaacctctattctctcgttttctgcacgcacacttaccgaaccactaaatgatgtgtttttttaataaaagtttctataaaaaggttattgtaaaaatagttaactttggcgtgaaggactaatacttcggtttcaatttgcctcacgaagaaaagggtggatggaggaagaagattgatctgaccggtgggttccatgagtagatgaggaagaagatggagaaggaaggagatggatggaaaatgtgatggcagtggtggtaccaattttgtaaattttcaatggcatggttacaaatagatgaattgtagtagcatttatctgaatcaacatatttataatggcatggatccaattaacctaaaaatcaatacgtactagccctcttggaatcgtctttttcgtactgtaactaccttttactctagttcgtccatttttattggtttgcattgtaaattaaccatccatccttgctgtaaaagtgcgaatctgttaatcctgatgggtgtttaccccaatttgtctaaatttaatatgctagccgattttgatctcaattatcatcttggtcaggagtttttctagatcacggttattagcgattatattcatatcctaaggctctcggtggtacatcgtggtgattggtccctgaaaaaagggtcaacaatggcaaatatgcaatttatttcaaggcccctgaaccatattatctgaaagtttacttggtacgtattatctaaaagtttcctctatatatggttggctgttttttcttttacctttttctgattgcatgttgtccctagggactagtaattatattatatatttcagtgtccctcttgcacaaaggaattaaagaacaattcgagcgggctagtgaatcaacataagaacatcgaagttcatcatttattcaccacatacatacgtttccatgcaaatggaaacagtaattacagtaactacaccacaccacacaaagtagctatagcctagtggccagtcgccgggttcctaagataacccagccattagcaaacaccaccgatgccgatatggatatccacaccgcataatgccaggaggctcgccaccaccatgcatttcatgttgtctctccggcagccagggaatacctcgtccatgggttgcccgtgagccgccgtgccgagctccttgtacatgcctaccaacttgtggctgagcaccggacacctacataagttgttgttgatggtggcgagctgcctacagcagtctcgccagacttgctcatccacgttaccggctgcgccaccgccaatgcactggcccttcaccattgttcggcagcgtgggagtgggtacacatcgagtagtctattcttggctggcaaagctggctgggggtatacaccacctagcagtggtggtctgccattgttgtcgttgccacaagcatggagacaactatcgagagcaacactaagaaccatagtataatttgaaatttcattctccactggcaagcataaatctccctgaattttttggtttttttggtcaaaatttatttaaattcagtcaaaatatgttaaaaattcaaataatttcggtcagaaaaacccggaaatcacaccatattcgttaacccctgaaattacactaccttgtttggtgccattttgtttttctttgtgttgcagaaaattttagttagtctcaaattgtatgagagggtgtacaggtaagcgctacatcaatggtggttttatatgtagctacaaatactaaagtgattccagaacggacacaatttttatcatgagtgagtagcttatggttttgcatgtaatatttattgtggttcaaagctaatctaggcatcatttcgaaaaaaaaaaacccttcgttttatatggaccacactcttttcattttcattcttccatgcaagaaaacaaatgcacaaactgccaacagatatatagttttggaaggtaacaaaatcttttgatctttatttgcatggctttttctatatatagttgatccaatttggtaaacaagaaaaaagataatacttcagaacaaatattgttaagaggaatgctctggaagctaaaaagcatgcagtaaagaaagctgcaacactagattcagaaaattaagaaacgtgtgtttagtgaagaaacgtgtgattatgtcggagtattctgaaacacaagacgcgcacgttcacttaatttccttttattgtgtactctaatcttgagaggactgggcagttggatctaagtaacagagttattttaacaagccacggaattatatagggaagcacgtacgcataatcactttgtcaaaaaaaaaacattacaaattaaaggctagagatattgtgtgttattaccttgtcgtattgcaatttgcatagaaatgttttaagtaaagagtaaggagagcacaagaaataggtctgaagtgtggtaggtttgtcaatttgcgaaggaataaaaagagcgttgttagcttggggagtgagtttaatatctatcggaaatgtattaatttatttttaaatcttggttttaccatatcaattatcttaatcattgtaaaataaactactccctccgttttaaattatttgttgttttagttttgttacaaatcatatgtcactacaataaaaacctcatatgggacttttctagaggagtttacaacaaaaaccttatataggacttttctagaggagtttgtaaattacctctaaaatcatgagttctataacgtagaggcactttgtactttaaaaactgcccagaaaaccttttactctagagacactttttatatattttcaacatattttgttaattcttatctcgtagaggcattttttcggcactttaaaatatgcctgatatgtataagaaattttcttcaggcattttaaactctgtataaacactgtttagggccactaaagggtaagaccctgagcaaacaagccaggcctaaggtcaaacctgtaacttgcctagcatatgtttggttgctacccttaggattctagcatgatgaatcttgcctgagcaagccatgctatctcgctccacctgcctgagtaaaatcaccgcattagtgaaaatgagaccacttcttcctcctcctcctcactgctagcctagggtttttgcagaggccatttcccatcgattcttccatcgctcccgcagcggtgaccaaggaacttgcagatccggtggccagttgtttctttttccagtaaaaatcctgcatttggtgatctgttagagcgtacgctactggagaagtgatctttgctgagtcatacaaaaatcacatagtcccggttcgagtaggaaccgagactaaagatattctttagtcccggttcaaaaacctaggggtactttttgatctttactcctagttgaatagctgttagaccctcaacaaactttagtcccggttggtgataccaaccgaggctaattgtctctctcctacagcatctgttctctctctcttccttatctcctcctcctcctcctgcaaaataagctgccatcaaaccgtcttgggacttattttgtatcggttttaatagttgagggatatgttgtatttggttttccggttgaaagacgaaaatcggattcgttgacaagttaagggacctcagatgaacttattccaaattaactgtaatatatatttggttggttgcttattttttagcctagtaattataaatttcagtattccctcttgcaccatggagttaaagaaaaatccgagccggctagcgaatcatcataagactatcagagttcatcatttattcaccacatatatatgtttccaagcaaaaggaaacactaattatataggtaccacacaagacacacaaggtagctatttcttagtggccagtcgcggggttcataggataactcagccagtagcaaacaccaccaatgccaatgggaatgtctacattgcaaaacgccgggaggctcgccgccacgcgtttcatgtcgcctctccggcagccagggaacacctcgtccatgggttgccctttagcgggtgcaccgagctccttgtacattccaaccaacatgtggctcagcgcggggcacctacagaagctgtcgtcgatggcggcgagctgccggcagcagtcttgccggacttgctcgtccacggcaccgccggcgcactggcgcttcgccagcgcccggcagcggggcagcgggtacatcgggtagccccgtccggcagcgcatagctgcccgggggtataaaccacctggccacggtgatccgccattgtcgtcgttgccacgagcatggagacaactaccgggagcaacaccgagaacactaccttgatgaaagccattttctttctattgttgttgcagaaaattttaattattctcaatcctcaatgagtggttttatatatgtagctactaagactaaagtgatagtgattcaagaatggacacaaaacttttagcatgagtgattagcttgtggttttgaatgaaatatttattgtgattcacagctaatctaggcatcatctggggaaaaaaaagttggctaaagtggattcatatggaccacactctttaattgtttaaacccattttcattcttccgtgcaagaaaataaatgcataaactactaacagacacatagttatggaaggcaacaaaaatattttgatctttatttccatggctttttgtatagtggtccaatttgataaacaaaaaaatgatacttcagaacaaatattgttaaaaagaatgctctgcaagctacaaagtatgcagtaaagaaagcggcaacactagattcagaaaattaaataacgtgtgcgttctctgtatatacgtgcctgatcaagcatatattggagttttctgaaaaacaaaattcatatataagatagctttgatgtgcacgttcagtctttcacctactttttttttttgttgtactgcaatcttgagaggcctaggcagttggataacagagatatattaacaaggcacggaattatatttatatggacataagaagcacgtacgcataatcactttgttgaaaaatgttgcaaattaaaggctagaaatattgtctgctataacttttcccgttgcaatttgcactactaggaaaagcattatcgcaagcggccgaaaagggtcttcgcaggcggggcggccgtccgcctgtaagccaacgactatgaagatcgccgatcttcgcaggcggggaggccgtccgcctgcgaagataattttcgcagacggacgttggctagtccggtccgcctgcgaaaataggaatcgtccgcttgcaaaaaagaaaacttccgcctgcgaagataggtagaaaatattgaaatttaaatataatttggccgtaaattacttttaaattatttattagaaattcttgcaggtacatatattggaatattatcaagcatttggtactgagaaatctacttatattgcataaatcaaaagtgttgccaaaatatatatattacaatattgttttacattgtcacttcaaataacgtcatctagttacattatggcatagcagtgttccactcccgaagatccttgaattcgtcacttgccgctagggcaccctctgggtcgaagaaatctcctttgacatgacagcactcatggtggatgaagtggcacagatcacgctgcacatttgtgatacctgtatcgtcaaagcttgttcgacattctaatcttggcaactgcatgcattgaaattaatcaatatattagtatcataaatatcaagagctgtctagtaaatagtatagagacttacatcctccgcgttagtcctgtaccgtccattaaccctaaggaattcgcacgcataatacccgcaaaggaccgttcctcgcggttgcttgtgacactgaaggacatatcatagaaaaaagtagttataatttgcaattagtgaaactattggaatacataaagtgagtggagtattaccggccaataggtacgtactagcagcttctcccgtgttcgtgtctgttctccacccttgaacttgtagtattggtatgcactgtatgaatgtcataccatttcagagtaaggaggatatttatttgtaatacatccatatacaaatgcaagagtcataataacttactactgtaagattgttagaaattctttgtattgcttgtgtttgtaatcgagaggatccaagactaccacggttccgtctttagggtggatgagtaaacagatataatgatcgctacatattaataacattataattagttagtaacagctaaaataagacatatgtgtacaagataaatgtaccgaacttacttaaaattataagcggccatgacgactctcttattttgaaagtgcaagaaggctcgtccaatgtactgtgcgacagtaatcaatttctccttgtgcaagcccttcttgtattctgctatctctttcggattcttgcccttcagctggtctgaccctggatctagcgtaacggtatgctgtgtttggcagatctgagttggatccaagaagccgatgggttcttttttcttcttagcatccatgtattgcatcctacataagaagtttgttagtagcaatcacatggagttgtattgtacatattttttatctaattaattaaaattcgtactcacatgcaccaaacaccgacatagttgacgtccatcttatcccgacgatatatggcgtggagatctgagaaatctagccatacgtaaccttcttcgccgaaacaatctgccggtgatcgagctattatattgcccaagcctttcttgctggcctccatgtagaagttatgtaaccttctcatctcccatggtgcttctttcagtgcccattccggcaagagtgctttcccatgttcgtacttttccgggcaatcatcggttgcgaagtatgttggcccggctagcacagaagccttctgggggtcgtcatctctgagcttggcacgttccttaccccctctgaagacggttagcatgaacttctccttgttcgcatctttggacttggattcgtggctcctaatcactcgtggcacctcgggttctttcgcaggagaagggtcttcaaatatctctggctctgtaccatcccattccaatcctggtacttcatctttgactgacccgactgatgccacaaattccacctctggttctgccactgtaatctctatgggcacatccggcacttgaatctccatggctgtctccggcggtgcaatctccatggctgtctccggcggtgcagtctccatggctgtctccggcaatgcaatctccggtggcacttccggcactggattttccttaccaagttcaggatcatccgccttatcagtcaccttcctcttaggaggcctcggaggttttcccaaacccggtttaggcaacacaggtttttccccggcgtcggtgcccaatccaaagaatatgtcattcttatgccagagaattacaagatcgaccgcatccccaagtacggatataccatctgcagtcgggtagtcaatgtcgtaggactcaaacccttcgtggaccacttgtggctgcaccttggcatacgcatcgggtaagaactgttcattgtatgttctaccagggatagcaatggctgtagcggcctcaagagttttaccggagcgtccaatgggaacgtccaatctgcagggtgtattctccttgaggtcatcgaaggggtaatctggctcagtttctttggtttcggggcgaagcaaaatcatgtgcttcgaccgtagaaatcatggacgaacggtcgacgacgagcttcggtcgtggacaacgaaggaagggccggcgacgaggttcggccatggacgacgaacggcctacgacgaggttcggccgtggacgacgaccggccgaagacgtcgttcgcggccgaggacgtattcgctcgtggacgacgatcggccgatgaagccgttcagccgcgagcggaggggtgggcaacggtggtggaggggccaacggcggcggtggccgtgcgcgcggtggaggggccggcggcggtggaggagccgatggcggaggagagcgagctcgacggtggcggtggatgagccggcagcggtggatgagctcgacggtggcggtggcggtggatgagccggcgacggggctgcctcggtggagcgtggtggacgacgacggtcggctgcggcggaggacgacggtcggagagcgaaggtcgcaggcggggcggcggcggaggacggcggaggcgtgcggcggtgaaaaatttcggcagcctgacggcgccaaattttttagggttcccgcctggacttagaaattttggcgccgcgggcttgcccttatatagggcaaagatcttcgcaagcgggcggtccgcctgcgaagatcttttcaacaaactagtaattgcacataaaaatatttacacttttcaaatattactaactttaaatttttttaactaaattttcacaattcaaatggtaattgcacataaaaattagtacttagaaattaatatgcaaaatgttgagtacaattgttcgtcaatttgcgatacgatcacacatacgaccattacataactactaacttcttagatgtttatatgccactcaacaatcattaccctttaacatttttgcccacaccgtccgtgcgcatgtaaggcttcacggtcttctgagtagatgtctcgacattcttaatcttctgtacaaactgactataaagtggcatactatcatattggttgtaatcttcgacatcttcaaccccatccactcccaatatcttttgtttccctggtagcactatatctttcttcaaatttgaagggtctttcacataaaacacttgtgccacgcgattggcgagtacccaaggatcatccttgtgacccactctcgcaaggtcaacaacagtaagaccgaacttatcaacatttaccctgttcgggtattttacccactggcacttaaatatggggaattgcattgtgtgcccatagtcaatttcccatatttcttcaataaacccgaagtatgattgtttttcaccggcttcatcaattgcctccacacggacaccgctgttttgtgtacaggtcttattatctcgggctcttgtgctaaacgaatatccattaatgtcatatccctgccaagaatttactgtagttgatggaccacaagccaaccgcttcatagttatttcatcggtagtttctccctcaggtaagtctaggtctcgcaaccaatctatgaagagacgcttgtgttctttcattatccactcggtggagcgacccttattgttagctcgtattagttcgatatgttgatcgatgtacggctcgacgatagcaaactgatgaagcacgctgaagtgagcttcttggaatgatttgtgatcatgggtgacgaatctcttctttcctatcgttcccctgccactcaatctgccctcgtgttggggcacaggtactccaattgcatatccatccttgagataatcgatacagcactcgacaacctcttcagtactataatcctcaaccattgatccctctagatgtgcacgatttcggacgtaacccttcagaaccgccatgtaacgctcgtatgaccacatttgatggaggtacaatgggccaagcgcaaccatctgcggcacaatgtgaacaatgaggtgctccatcatatcaaaaaatgacggagggaaacacatctcaagttggcactgggtctcatgtgcgaatgtacggagatttcctaactcttcgagactaatgaccttctgtgacactgcgttgaaaaagtagcacaaccttgtgatagcaacctttaaatgctccggttttatggctcttattgcaattgcaagaaacacggtgagcaagacatggcagtcgtgtgaattataaccagataccgacaaatctttcattgaaactagtcgactgatgtttgatgagaaacctatgggcagtctgacattacggagtgagttgcaaaatgacttcttctccttaggtgtcagtgtgaaacaggctggtggaagatatactttgccattcttttctccttcttgagggtgtaactcttccctgattcccatctcgactaggtccatcgttgattgcagaccatctttagtcttcttcggcatgtccaacaatgttccaactatgttgtcaaacacattcttctctagatgcatgacgtctatggcatgctgaacctccagatctttccagtacgggaggtacttaaaaaatatggaatgcttcttgaatgggggagggagtttatcatctggcttcgaactgtcatcttgcttcttactatcccctcccttcgtattcttctcgggtttcttgcgctttgtcccctttgatggtttcttagtcatttttccaaactcgcaaacaattttctctatcattgcacacacattttctcccgatgtaggttttggtgcaggatcagtctcttcagtaccatcgaactccgccttcatcttacggtacttgtgatttgtgcgtaggaaccgccggtgccgcatgtacacaagcttgttggaacccgggagatacctataggacgttccattcaagcagatcacacatcctgttttacctttaatttgacctgaaactaaaaacattgctggataatcgttaatggtcacgaagatgattgccttcactgtgaagtattcccttaagtactcgtcccacactttcaatccctctttccataaatcggccatatcttccaacaatggtccaagaaatacgtctatatcaataccaggctaacggggtccctgtatgaggatacagagtagtacgtattttcgcttttgacaaagccaggtaggaagattatacatggtgagaagcactggccaagtactatgtgaactgctcatgtctccaaaaggattaactccatcagtactcagggcaaatctaatgttccgtgggtctttagcaaactctctatactgcgcatcaaaggttctccattgacgagcatctgccgggtgtcgaatcatcccatccttcttgcgcccttcttcatgccagtgcattagttccgcatctcgcgggtttgagtatattcgtgtaatgcggtctttcacaggaaggtaccacatcacaagctgcgggatttttctctgtcgtccctcagttgcttcagagggttctaggctagtattgctattcgacttgtaccagcttgcaccgcatgttggacattcatccaaagaagcgtactctttcctatacagtatgcagtgatttacgcacgcatgaatcttttccacaccaagtgaaagggggcatatgagtttctttgcttgatatgtgctggatggtagtgagttaggcctcggtagcattttctgcaggagttctaaaagactgtcgaaactggtatcagaccatccatgtctcgcctttaacctcataagttcaagaactgaccggagtgttgtgaaatcactgtcacagcccttcgactcatcgtacaaaacttcctttgctgccttctgtaaagcttcaaagttatttagccctctggccgaccccatcagcacctcgggttctgcattacgtaacattttctctaggtcgattttgtcctcaacagaaccatcgtcatgcaccatgtcttcaacttgtgtcggaactacattttcaggctcgtccacttgttcttcgccatgacgtgtccatatttcgtacttgtccataaatccgtgagttaccaagtgctccttcactttaaaagcatcgtcaaagtcccaggctatttcattcttacagtcagcacacggacaaattatcttcctcatattgttcttctcagcgtgaaccttggcaataccaataaatttagccacttcgtttctatatggagacaaaaacctcggccaatgatacatccattcccgactttctatatctctaaaaaatacacgtaaaatatttgcacaattaataccaaatttgtagggtttattgaaaaaacttatagctattcaaaactaattaactaaaggttaagttgtaaagtaataaaaaatcatagtttatttcaattttttttacacagacatgccaaattagcacattaggaaaatctaacaaaatcaattcatcggcatattacaaaatactataactattttttgattgcactgaataaatagacatttaaaatttttttctctctctatacatgacaagagctagatctagatctagaactaggtggtggatatgatagcaaaaaattaaaaaacaagaatttatgttaccacattaaaccactacaacaagaggcatcaagtattacacatacatctaacataaacaaatgacaagaaataaaattaaaaaacatggagctcttccttcaaaattttggatgcataaatccatcacaaattaaggtctaaaagcttaaaaaaaatgcatacctagtgtggaaatgagtagatctaagtaccgtagaaaaatcccccgaagatttgaagttcaaaacctcccccctatatttaagtcactttaggagagagaaacgtcggggagaatgaacagggctcggggaggaagaagactatataggggcatctttgcaggcgggccatataagcgtcgcctgcgaaaatttatcccctacgacgccgaaaatgagatttctagtagtgttgcaccagcccttcccttattttataagtaaagagtaaaggagattaaaaaaatgtcttaagcggggtaggtttgttcattcctgaaggaaaaacgaggccggatttgttagcttggagagcgagttaatttaatgtctttcagaaatgcatttactttgaaatgttggttttaccatatatatccatttacgatcttaactattgcaaaataaactataaactatttgtgatttttttaacttgtcagacaaagtctccaatccatataggtttgttgccattcatgtttataataatatattcataaaaaatatttaaataaaacaacacaagtatatttattgtaaatctatgaatgcaattattcgcatagattatattatatcgcatagattgtatagacctgtgactaccatatgttttttgacacgtcatgaaaccaatcctactgtttgtcagttgcttatcgggtgacacatttgatgaaaacaagcgtaggaataataacaaaactaaaagaagagaggaacatcgtttctactcctttcaattcagattataagtcgttttgacttgggtcaaagttaaattgcttcaagtttgacaagtttatagaaaaaaagtagttacactttcatcacaagacaaatatattatggaaatatatttaatatatatatatatatatatatatatattaattgaaactaaattactgttgtaaatattactatatttgtatacaaacttagtcaaatttaaactagtttgattttgaccaaaactaaaacgacttataatcagaaacaaagggagtactcttatttcttactagtaaaatggccgtgctttgctatggataaaagaaaatatattataatatgtaatagatattaaaaattatcgaatatattaatgccacttgcttacttgtttgaatatacagtatttacttgtttgaaccatatatttggactattccataatataaaaaaacaggagcctatttggaaaacagtgggggtggcagattcactaccaccacatctagggacttttatgtacaaccttcgttttgaatataaggatgtgtctatgttgtttatcaggtgtttgtcgaatacttatatcaaaagattcatttttagtcacttcagttgtcaatttttgaattttgaattatttagatatcatttacaagaatctgattacctatgcaatcactgaaatgatgggaatcaaagtaatcagtgcatgaatacttatagtgtggtaccaaagaatggagggagtgaataagaaatgcaacattcaaatattatagatgttactattaattgtcagatcacaaaaaaatacggcagcttattatagagggcacctttaggctgcgattcggccgacatgggcgctctcctcaacaagaaattccctttttccatcatgaaattaaagaacaacgaaggctagctagcaaaccagcaagatatattcagaagaacattgaagttcatcatttattcaccacatatatataaatagatgcttcctgacaaaagaaagcactaattatttagcaaccccacatagtcacacacacacagctaactatagtagcctagtgaccggttcttggggtcctaggatacccaagccagtagcagacaccaccaggcccattggggatgtccacgttgcagaacgccgggaggctcgccgccgcgcgctccaagtcccctctccggcagccggggaacacctcggccatggggtgcccggcctcggtggcgccgagctccctgtagatgcctgacagcatgtgatcgagcgccccgcacctgcaccagccgtcgtcgacggcggcgagctgccggcagcagtcttgccagacttgctcgtccgcggcgctggccgcgccacggccaacgcattggcgcctcaccaatgttcgacattgcgggagtgagtatgtcggatagcttattcctggccgacattgctcaccggggctgtagacttggtggtggtccgccatggtcgccatcgccgccgcgagcacggagagaacgacgaggagcaataccgagaacactaccttgttggaagccatattttgcttagtttgtgaaaaatcttaattaactgtgatagctaggctcttcgtctctgggtggttttatatatagctataaagaccaaagtgattcaagaacagatagaaattttttggctgttcatgagctatttatggatttgcttgtggttctgtatgaaacatctattgtgattcacacgcctaatctggggcatcatatggacaacagatggttaaagtggattgatatgtactacactctttaattatttgaatttgtttgatccttacgtggaagaaaataaatgctatatgtggctatagaaagactaattaaagtgattcaactttgaagaacggccacaaaattgttttagctgttcatgcgtggttagtatgctcttggggttttgcatgactggcatgagcaatttgcttgtggttttgcatgaaatattttttgttattcacggctaatctgagcattatatattttgacaaaaagttggtttaaagtggattgatatggaccacactctttaattatttgaactcattttcattcttccgtgtaagaaaagaaatgcacacaccgtcaacagacatatagtactatgggtaacaaaatcttttgatatttatatttatccaatttgtttaatgacgaaaaggatagttcaaagcaaattatgtttatagctacccgtggcatgattttgttgttatgtcatatcggaagtggtcttgaagtaataacaccttgatgtaatttgtaagatcaacaaagtttcctttgtcttcaaagaatgtttgctaatttgcaaaaggaaaaaagagtattgttagcttggggattgagcttaatgtttttccataaatgtatttattcttaatgtcggtttatcatatcgatgatgttagttatttcaaagtaaacaatactcattgggaaagactctgagggaaaaaattatgcgggatctttgatgaggacatcccagctacacttgacgtgaacaaggctgatggttacgttatacatcacatggagaaatttgaagatgacgtaaaccaagttgatggcttacgtcttagtaagaacgatcaaacatatcatggtccaattatgcacagccatgctaagaaaatacaactagaggtgaactcactctttgctcaacttaacccaaattttaatgagaattttatactacctaaatattctacctttgtcttgctaaggtttacatcggaagacatcattactacgccaagaaggatgggttatgttgaggatgacaagagttacaccgagcaggaattagcccatgcactaccagcagctgtctacgccaacaaaaagttggtttacgctacaaaggctcaacatccaaggcttgtacgacccagccagtcaagttacgggttgcatggcatacatggttggaaagaggggcatgtctagcttccaatgcttcaaaccccatctcaatatcactttccaataaaaagttagagcatttttactgaggactgcgcaggagctgaagggctgtgcgtgaacccgagaaaactttttgcattctcatttatgttagccttgatcaccagaacgtggcttcttatgttcacacctacgctaggaggaatgttcctagtataaatacacttctaattcatccattagacaacttttgttcaattgaaaacctcatgtatgagagattattgaagtctgcataagtcttaccctttttgttctcgtgagttcttttgggcttgtgagaaggatcctcttgtgtcccctagttcgtgattttggccctcgggcctcttgtgtggattagttctggattgtggttctgtaattgctcgttttgacgggtcagagtccaggaaacttcggatcattctcacactcaccacttggtcgcatccaaccttggcaggtataaagctagttatcctctagctacgagtagctagttaccctcttgtgtacaatttatgccggtgctcttttgcttcaaacctactaccgtgaagatcgggtcacctctcgcgattgcgttcgcaacaaccttggttattcgctcttctagaaatacttctatttactgtcggcacgaatcttcacgaaagcaatagcttacatagacatctttaatactatagaggcattgcaaaaatatcgcacaagtgccttttgaataatctctataaatggggaaacattttatagaatgtctccattcacaatgtgatttttctagaagcatttttatgtgtataagagagtggtaaattttaaagtgccaaaaagattgattctcaaacaaagtaaatttgtctctaaaataaaaaaagttccaagcaattattaaagtgcttctaaaatgtgtctctaggctatagaactcctaagtttagagatgatttcaaaatcagctatagaaaagtgcccacgtacttaaagtttttcatgtgcttggagcagtcatcacctcctacctcagctcatgtccccaaattctcaccttctctcttgtctcaactccccacctcccttccttctccttggccggaggcccaatctccgtccagagtgcaatccatgtgcaggggcagcgagctaccccaacttttcctactctctcccactacctaactctccttccatctaagctgaagtcccaatgtttggccagatgcgtagtgacggtgccaacgtcaactcatccaaccatggggacggccgtcaaatttgttaaggtttattttggttacaatctgaaaaaccgtgaagtattttgggattggtgaaaaaccgaggtcatgcataatttcttccacatactttaggaaaatatatcgtaataagaatttctaaaagcattacataaaaaaaaacttccaagaacaaaactaaagaagagaggaacatccattccacttttttatttcttattagtactatcacatacataagaggagaaaattatagatgctacaattaattgttggcgatctcaccaccaaattaaaatagtgcagattattaaagagggcacttttaggctgcgttcgagcgcaggagaaagagagaaatattgtttcgtttttcgcgcgcacgcttcccgaactactaaacggtatgtttttttcaaaaaatttctataggaaagttgctttaaaaaattatattaatccatttttgaagtttaaaatagttaatactttattaattatgtgctaatggctcacctcgttttgcgtatcttcccaatctcctcaatcccctccttctcaaacacacccttagtttgcaaaatccgcactccgtcagcatggatgccatgcctgccatcctctggccgacgcagcccagcagcggtgctattcggtcgacatgagcaccatgaaattcttttttttcacaaaatgaaattaaataacaacgaaatattgctacccaattggcaagatgtattcagaagaacattgaagttcatcatttattcaccatatgtatatatgcttcctgacaaatgaaagcactagttatttagcaaccccacagagtcatacacacagctagctttagtagcctagtgaccagttctcggggtcctaggataacctagccagtagcagacaccacctgtcccattggggatgtccacgttgcagaacgccgggaggctcgccgccgcgcgctccaagtcccctctccggcagccggggaacacctcggccatggggtgcccaacatcggtggcgccgagctccctgtagatgcctccaaccatgtggttgagcgccgagcacctgcaccagctgtcgtcgaccgcggcgagctgccggcagcagtcctgccggagttgctcgtccacggcgccgccgggtgcgccgtggcccacgcactggcgcttcaccaccgcccggcagcgtggcagcgagtacatcgggtagcccattcctggctgacaacgctcgccgaggctgtacaccacctggtctttgtggtggtccgccatggtcgccgtcgcggcgagcacggagacgatgatgaggagcaacgccgagaacactaccttgttggaagccatggctttttgtttgcagaaaatctttagtctgaatttgtatgagagggataggtttaaggtcttcatctattggtggttttatatatagctataaagactaaagtgatttaagaagggacataaaagttttagctgttcatgagctaatagattaacttgtggttttgtatacatataaaatattaattgtgatccacgcctaatgtgggcatcatatggactaaagttggtaaaagtggattgatatgcaccacactctttattaatttgaaccttccgtggaagaaaattaaagaaatgcacataatgtcaacagacatatatagttttgcatgcaaggtaacaaaatcagttcatctttatttccatggcttgtatagtgatccaaattgtggaacaataaaaagaatagttctgaacaaatactttaaaaagaatgctctggaagctgcagtaacgaaagctgcatcactagatttcagaaaattaagaaattaacgtgcctgatgaagcatataagtattggagttttctgaaacacaaatatcatatatatagatagctttacgcgcacgttggataacagggttatattaacaaggcacggcattatatatggccaggagaagtacgcacgcataatcactttgtttaaaaattaatgatacaaattaaatgttaggaatattttgtgctataactttgtcgacttgtaataaagtaaaaaatacgtgaggttaaaatataggtattatgtgaggtggaaggaagaggttttttatttcgtgacaaaggaaaaagaaacaagctagagggttgttagcatggggtgtgagtttaatgtccttcaaaatctatatttatttggaattgttggtttgaccatatgaatgaccttagtttttgcaaaatatactatactccttgtgttcctttttatttgtacaatcacgacatagtctctctcgccaattcattaatttttatcattcctattgataatcatatattcataataaacagttcaatataactacagttatagtcttttttttatgataaatcaatgagtgccatctttgaatattaaatcatattatatttttgcatctataagtgattaaaaaaataatcaagatttcattgcctcctatacatccaaaacagcatctatttgtgaacggaagcaacactttaatggcttaacaagtgatcttatttgtgcagtcagcgatatactctatctgtactctatctcaacaaaggagtatatgagaacccttttgttgtgtatgacatgtaggggtgaaaacagtacggaatttttccggattccggtcatgttttcggaaacggaatcggccggtcggaattttttcggaatttctcggaatcggaatcgaaaacggaaatattttctcggaaacggaatcgaatatgataatagcagtttccgtcggaacccggaaacgatcggaaacattccggaaaaattgtcggaatttccgaagttaaaaataccatagattcaatagtccataattcatccctagcttcccagcccaacccaaatcgcggcggcatctaccctaaccggctaaccctataggagagagaccgtcagactcagaactcagacgcgactcgcgagttggaggcggagcggcggctgcggcatccagatcgcggcatcgcggcgccggcgtgccctcacgcccaccgcccgtggcgccggcgccccaccgcccactgctggtcgcctggccggctggcccccgccgtcctcgctcccaccatctcgcgccgcccttgctcttcgtcgtttcgccgccggccgccgccaccatctcgcacctccgccggcctgctcggtccccgccatctcaaggcgccgtcccaccgcgtctcgccgtttcaccgtcgccaccaccgccgccgacgacggaacaaccaccacaccgacgaggcgacgacgacaccaccactgcagtctcttcctcaccgccaccaacgccgacggctcctcgcctcgcagcagccagcagcccagcggcagcatctgagcaaccagcagcagcaggtgtatatagtgattgactttgcacttttactaatgctctatcattttttttgaaggctaatggaacggaacaagagacagagacagtagaagcggaatgttctaatgaggatggcattgcgccaatggatgtttgaagaaaatgttggtcaatttaattttcaagttacatctaatttcaagtttccatttcaaattagtgtactcctgctgcacaagtggatgagatatgtttgaaccatgtactgatgtgttttgtgattgaactatgttttgtgatgaactatgtatttatagggtgatgtgttttgtgattgaactaagtactgaaacactgatggactgatgtgcgttgctgttctgtgatgattgatgaactattgctgttctgtgatgattgatgttgtgaccttaggtcacgaacaagatcggggataggccggaaagaagtgttttcccgcctatccttagaaacgagctcgaacagcaaacacaacttttgaggattacttttgtattcaagatgttttgtcctgctacaggtttttgactggcttttataaccagtggtcgtacacgtgagattacatttttacccctgtgggtctttgtaagtttactctaatgcccctgccacatcagcgtctgtgggggcattctagtacatctccaggggtcttttagtcttttaggtgctagctggcgagagtggttgaaggtggtccccacggaatcttcccttggcatcttctcttgttcgagtagtgctcttcctcgaactcttgggaaaaatgccttttccgtcctggaccgtcttcttcctcccgggaattcgaattcccctttgccttctctttcatccttggaaaacacctgtgaaattgtaacttgtccaaaatatgtgtagttgtattagcgattatggaatgtccctaaaaaggtgttcttcacccgaagaggtattttctattcgaatgagtgttcttcctctgggaaggtattttccctttgggaaggtgttcttcctcttggaaaggtagtttccactcaaaatgagtgttttcccttctggatacttaggtcttgcaaaacctcgtagtgttttgaccgaattggaggaaaaggtgtttgcaccctgctacaacaagcccctcacgggtaagggcgatgtgtgttttcggccgaaaccgtgcctgagtttatggaaaaagggggaaaaccgccgtcctcctattcggtcgaaacacactattcaaatatgcatatacgccacgtttactattcatttatttttattcttattatttttcatttttatttatttatttattgtgtttttttttgaatgccacgtgccggtatttcattggtgcgctcaaggggtcgcgtcgcttcgggtttcgtgtccgctcgtaaacccgcgacccttaccaccctgcgctatataaggccaggaggggtcgctatcacgtgacccacgccaccactcgtttgctctgccatcaactcgaaatcacaaaatactcgaactaaatctctttcttccttcttccattcgagttttggtgctttgcttgatttcttcctttctcactacacaacatggggaaaaacaagaaaactgcggaaaagtcgaagtccaagaaatcaaaaagccacgaagatacttcttgtggtattggtgcctcttcgattaaggaaaaaaacttaaacgatcttgttgatgttggttggatatctggtcgaaacgttgtaattcgaccagtgggagaatcaaggccttctcccaagctgggatacactcttgtgtttgaggatttcttctacgccgggtttaaattcccatgcagcacttttttggttgaggtcctgaaattgttcagacttgagtttcctcaattgactccaaatgctttagttcgaattgggcttttcgaatggatgattcgaagctgcggtgggacccctcgagctgaagactttgcatacttccattgtactcggcactacaccaaacagaactcgaagtttgggtgtgtaaactttgctcctcatcccaagcgcggaagtccatggccagctgtgtctgctattcgagcaaaatgggggaacaagtggcaatcgaagtggttttatcatcaaatccctctcagcctgctgaatgataaggattgtcctttttcgttctctgggaagaaaccgaaaactgtctccgagccatcagtctctttgtcgccggagttcactgccatacaacctcgaatcgaagaacttgtttcgaaatttagctgccgagacctggtggaagagtttgttcttctcaaaattagacctctttcgagcggctgggatatcactctcggagaaatccccgaaaattgcccttccagtcttcctccatttgtggtttcgtctgatcgtaagtttccttttcgaactgcaaaccttgtttgtcttgaaaaagtgatttagttaagaagatttattttctccctttgttatcttcttccttgtagttgtgattccagaggatatggtccgcccagttcgaaaatttcttggcccttataccaaggatgagcatttgaaatttttgacacttcaaaatgagaaaaggcaaaatcgggtcttcgcctctctaggctccgatatccctgtccgcgttcatcctgaaattgtccccaaactaaagaaaaagaaatctgtgaagccctcttcctctgatgatgatgatgatgttgaagtggaagatattgacgaagaaattggggaagaaaatgctgaagaagaagaaggcgaggaaggagctgatgaagaagagaacgactcgggtgatgatagcgactcgagtagcagttcgagcgacaactcgagcgacttgtctgaatctggtgatagcaaaacagttcctcctcctactgttttagctgatttgaaaaggaagaaaactgccagcagtcctcctcctgaaccgagttctaaacgagtgcaacttgttattgacagtgatgaagagttggatgaagatgatatccgtattgatctttctgctatccatgtcaccccaattcgagctgatgctagttttgccctttcggcaaaagaagtagcttcactgtatgttgttgccccaaccaccacggttgtcgagaaagattgctcgacccaagtgggtgatactgttgagacaacaaaccctcttcgagctgatcgagacttggttgcaaaaaaggcaaaaacgcccgtcagtgcagccgaaaagtccgaagcagggaagagtgctgctgatggaggtgttcgaactacaggtagttcgaacccaactccacctccgtcaccgccgttcatcgcaaccccttccccagagctgatacaaaacgttcttggtggttttagcgaacgatgcgcaaaagatggacattggcttatgggtcttcctaatttcaacgaactcggggaaagtagccatcatggcccaaacctgtgtttgaatgacctaaagtatcgccaccccctgagttcgattggtgatgaactcgagaaagttctgattactcctgatcttgaaaaggagtttttggaagaaaatgatcttatgtcctcttggacagcacttgatgtatctgctgcacaggtatttttatttatctatttatttatttatttatttatttattattattttctttttaacttaaaacctattttctgatgcgcagactgcgagccttgctcgtcttcaacgtggtgttgctcggaaagctcttcgagctctttgcacgcaacggaagaaatcacttgatcgcatcgctaaactcgaaaaggatcgggattatcttcgctgcaaacttgatcgaatggccgacgagaagaaaatcaccaccgatctcgtgcgcaagttaagcggcgaaaagaaagagctttccgaagaaaagaagttgcttactgaggaaaagaagaaattactcgctcatgtaaaagcattcgagcgaaaaatcatcgagtatcaagacgtcgcacgacaacgcgctgaatcagaagacaagatgaaggagcaagttgaggtcttggagaagaagaataaagaactcgaactcgcctgcaaaaatcaaagcgagaagatatctgctttagagctcgagagcgaaagttgccgccaacttcttctgaaaagttgcgagaccgttcgaatcacgttgcgaagtctaggggctgacatcagcttgctatcggaagaaaataccttagcagctgtgggaaaatggttcgaggaattttccattgggctaaaagatagcgttactccctttgcatctcgctgctcgaagactgctgtggagagcctttcggcctgtctgctttcaaatgggtgtgaacactttaccacccttaaaactgatatacaaggtatacttaatgatgaggccaaatttgcacagcttcgagatgcagctcaacccgtcgtaaaggctttccaagtgctttactggaagaagaaaggatatgaagataccctgaggtctctccgagcatctcttgcctcgagatcaaagtcacaaccggccagttcgagccaacaagataaagacagtagtactccgagctcgagcgcacaggtgtgacgttcgtgaaaagaatagttaaggatgcttcgtatgttcgaaaacaatgctattttgctgcttcaaaaccgttatggttgagagcctttattgtaaaaattcatctcttattgcatgcttttcacggaaattccctttctttgggggggctgcatgttaactcgaatcgaaaacttgtgattcgacgcaacaacactttgcctactcgaaatgtgaagcacttagcatttcgagaccctgcaaagctttcttctaccaggaccgccgtctccgatgacgaactcgaagcctgttatgataatacttgtatatttgcttttaagtttttccgatggcaacgaagccatcgacatgacagtttacgtgactttgtacttgagtttagggaacggcgttcgaacaatactcttgctagtaaagccttttggcaaaacttccaaccatccgaacgccaacgtagaatatggaaaaggcgttattcaatagttccatatacagtaatgccttctcctctcaacattgtttatcccgactcttttctttcttctttgtagagtttgtatgtaacttgttataccttcttaacatcaaataaacccttcctttcttcttttctttataaatgctctttatttcaattgttcaagcacccttaggtaaactacgtcctccttatctttggaagaagttacgaaatcgaaacgtactttatctcgtcacgtgcattttccgccttttgagctcgagcgaggggaaaatagagttcgagcattctttagttggttttttggactaaggcaaaatagttcgaaaaccgccgtcctcctcacctttcgaaggagtgacgaggtcgaaacgtattttatctcgtcacgcggattttccgctttttgagctcgaacgagaatagagttcgagcattcctgagctggtttttaggactaaggcaaaatagttcgaaaaccgccgtcctcctcacctttcgaaggagtgacgaggtcgaaacgtattttacctcgtcacgcggattttctgctttttgagctcgaacgagaatagagttcgagcattcctgagctggtttttaggactaaggcaaaatagttcgaaaaccgccgtcctcctcacctttcgaaggagtgacgaggtcgaaacgtattttatctcgtcacgcggattttccgctttttgagctcgaacgagaatagagttcgagcattcctgagctggtttttaggactaaggcaaaatagttcgaaaaccgccgtcctcctcacctttcgaaggagtgacgaggtcgaaatttgctagtcgaaagtattcgactcctagcgtgaggagttatattttgtcgactttgctagtcgagagtatttgactccgagcgtgcggagttctattttgtcgactttgttagtcgaatgtatttgactccgagcgtgcggagttctattagactttgttagtcgagagtatttgactccgagcgtgcggagttctattttgtcgactttgttagtcgagagtatttgactccgagcgtgcggagttctattttgtcgactttgttagtcgagagtatttgactccgagcgtgaggagttctattttgtcgactttgttagtcgaatgtatttgactccgagcgtgcggagttctattgtcgactttgttagtcgagagtatttgactccgagcgtgcggagttctattttgtcgactttgttagtcgagagtatttgactccgagcgtgcggagttctattttgtcgactttgttagtcgaatgtatttgactccgagcgtgcggagttctattgcaatcatacacagaggcatgttttttatacaggttcgggcctccattatggataaaaaccctacgtcctgtttatatacattaacttggatatcattcgtatttacatctgagtgagtatactacaaactcgagctcccgtgttctcctttttctctttctctctctctctcctttttttttaggcataaaatttctttaaagaaatagcattccaagtatgctttaactcatcaccatcaagatatgctaacttgaatgctcccgtttctgtcttctttttgactatgaatggtccttcccactttgactcgagttttccaacagctacctcattgagcactttcttcaagactaaatctccttcttcaatcggccttgtctttactttttggttgtaatagctctttgttccttctgtgtatgatgccatcttctccaaagcttcaacccttatttcatctagcatttcaagagttatgtctcttccttcttcatctttttggtcaaatatcattcttggagaatgtgcccctacttcgcttggagtcattgcttcatcgccataaaccaatctgaaaggggtcatgccagtcgaccttactaccgtagttcttagtgcccaaagcactgatagcaaatcctccggccattttccttttgctgatccttctaacctcttcttgatagcttccatgattttaccatttgccctttccacagctccatttgtctgaggatggcctacagaggcaaagttgatttgcaaattaaggcctttacacatgtcttgaaattttccagattcgaattgctttccattgtcacatactatttcccttgggattccaaatcgacatattatgttcttccaaacaaacttttgtagtgctgcagaagttattcttgccactgcttctgcctcaatccatcttgaaaagtattcaattgcaacaatgataaagcgcaaatctcccttcgctcttggaagaggacctactatatctattccccatctgtaaaaaggccagactggcggaattggttgcagttctttgggtggtgcttttgtcattgggccgaacttctgacatgctttgcacgtcttgatgtatttctctgtatctttcataattgttggccaatagattccttgtcttatgacttttgaagccactgaccgtggtgcttgatgagctccacacaagccttcatgtatttctaccaccatcttcatgccttcttcccttgttacacactttaacaaaggagcagtaactccacttttatacaactgtccctctaccaccttgtattttttggatgttagttgtattctctttgcttcttcttccttttctggaagttgtgcactggcaaggtatttcaagatcggttctctccaatctccttctctctgtatgcatgctacttctttcttttcgtaacttggctgggtgattatatcgaaaaatgaattttccaatggttgacctgttgcggctgccttagctagctcatcagcttctccattttcttcccttgttatggcttttaccgttattcccaagaaatgtttctcattcagccttgcttcttccagatatttagccatagtttcctcctttgcttcaaaggatttggaaaagtgacctgctaccaactttgagtcagttttgactattaaccgccgagcccctagcgctcttgcctttctcatagccaataaaacgccttcatactctgctgtgttgtttgttgaaggaaaagctaattgaacagaatacttcaacgtttgcttcattggtgttttcacaactgcagcggctcctgctccggcggcattgcatgctccatcagagaatactatccatggtttttcgacttcttcctgttgttctacctcattgggagtccattctgccacaaaatctgctagtacttgtgactttatggctgttcttgatatgtatttcaggtcaaaaggtaagagttccattgcccattttgctattctccccgcgacttccttgtttgttaacacttctcctatcgggtatgccgatggtattgttatgtcatgcgacagaaaataatgcctcaactttcttgaagccatcacaattgcataaatcaacttttctacttctgagtatcgtgttgttggtccttgtaatgcttctgagacaaagtataccggcacttgcctattttcttcttcttgtaccaaaactgcgctaactgtcgctggagttgctgccacatacattaacagaggttgaccttttggcggacttgctaatgttggcatttcatgcaagtatttcttcaagtcctcgaaagcttgttggcattcagcagtccactcgaaggtgtttgcccccctcaaagtcttgaagaagggtaatcccttttctgctgatttagataaaaatctactcaaagatgccattcggcctgtcaatctctgcacttctcttgtgttttttggcggctccatttgatggattgctgcgattttgtcaggatttgcctctattcctcttttggacaccaagaaaccaagtaactttcctgctctaacgccaaaaacacacttttctggattaagcttaactgagcattttctcaggttttcaaatgtttcttgcaaatctttgccatgggtaaatgcttgtttactctttaccacaatgtcatctacgtatgcctcgacattccgtcctaactgcttagccaagacttttcctatcagcctggcaaaagtcgctcctgcattcttcaaaccaaatggcattctgataaaacaataagttccaaatggtgttataaatgatgtcttttcctcatcctccttcaccataaaaacttggtgatagccagagtatgcgtctaagaaactcattagttcgcatccagctgtggcatctaccaactgatctatccgtggcaaaggaaaatcatcttttgggcatgccttgttgaggtctgtaaagtcaatgcacattctccacttgccatttgccttctttactaacactggatttgccagccattctgggtgcatcacttctcttatgactttcgccttcaacaacttttcaagttcaatttttgcagcttgttgtctgtctatagacattcttctcaatttttgttttttgggcttgtatcctgacttaatcgctaggttgtgctcaattagacttctatcaactccctgcaactcatctggtgaccatgcaaatacagccatgttttcttttactacctttaagatttcttcctcaacatgtttttccaagttttctcctatcagaatgaattccagggtcatgttcatccaactgtactttctttgttttcccttcaggaattggcttttgtatttttatgtattctccctgtttttggtcaaccacatgtactcctttcacacttggtgttccttaaagctcatactttcttcctgcaagctgttctcctcggaccgttattactccccttggtcctgggagcttcatacatatgtagttgtggtgtattatggcctcaaaaatattgattgttgaccttccaagaattgcattgtactgatatggcatatcgaccacatcaaatactatctcttcttttctcacattagtgccttttccaaagaccacttgtaaagatatttttccaattgcatgtacttgttgtccaccaaaaccttgtaaaggtactcatgcatttgttaacctatcttctggtatttgcattttcttgaaagcatcataaaacaacacatccgctgaacttcctccatcgattaacactctttgcacttcgcattgtgctatttccactgagaccactaaaggatcttgatgagggaaaagtattccttctgcatcttcaggcccaaaggaaattaccgtttttgagtatactggtggatttgactgatagcttgtcccgacatgatttacctgtctgacatatgcttttctttgcctttttgactcaattcctaacgaagagcccccagttatggcatttatcactctctttggcacttcttcaattgcctctatcttcataacttgcggtgcttctatggcgttttgtcctcgttgatcacgagctccttcatacttgttctcatatcgatttacgtgtttttccaacaagtgagtcatttgcctgcattcttctgtggaatgacctcctggaccatgtatatgacaaaacttactgtaacattcttctgtggaatgacctcctggtccatgtgtttgacaaaatttggtttggtcaggtttattttctcttccttttcctctttcattgttccaccatcgtcctctacctctgcctgaattccaccattgtcctcgaccttttccagattgcccccaattgtttctccctctgcgagtgttgtcccattgatgttttcctttttctctttcattgttggatccatctccgataaaatttacctgtttcttctgatcttgtttatagtcatacttgaaccttttccagggctttccggtatagacggcttcttcctcttgcactctcaactcatcttcttctcctcttgcaaaactttccattctttcaaacaagtcttttgctgtctttggtctatttctagcaagatcgaaacgaagaggaccgggtagcaatgccctttttgctgccgctatgagcatttcgtcatctacatgcctgatctgacatcttacccttgaaaacttcacgatgaaacttctcaatgtttcccctggaagctgcttcatggcatacaagtcatctgcctcttttggttcttcatacgccccaatgaatcctgctcgaaaggtgtctctcatatgttcccatgaatagattgtcattggtggaatggtagtgtaccatgataatgtactccttctagcattgttgggagtatcttagctttcgtggtatcatctccacctgctgcttcaactgctgtctcatatactctgaggtattcattgggatctgtgtctcctttgtactttgtgatgttggacaacttgaagtttattggccaaggtgccatttgcaggttttgacttaagggattctttgtatctattgctctggtcggttgaaaatagggttgtgtgggctggaattgaaaggcctggttcggtatttgacctgcatattgtatatggttggccatttgtgggatgtacccttgttcaagcatcatctctggttgttgcatatggaaaggggaaaaaccttgggggacttggtgatggttttgagctgcttgagtgtttgttgattgcgtatgtgtgaagttgggcaaagatgtttgaatctgtggtatttgggtttgtggaacttgtatttgtggtatatcattttgtgggagttgtgttcgtgggatattactttgtaggatatgaggttgggggatttggatttgattgggaagaactgggtgggtttgatgtaattgtgtttgaggatattgtacttggttaggaatttgagtttgaattggaatatgcggctggaaagaaatgtgcgtttgaatgggaatttggttttggctagggatcaaggttcgagctaggttctgagtaggaatggtaatttgagcttgaggtgtattctgggtaagaatgggaatttgagcctgagatgggttttgtacttgactgggagcttgggttcgtggtagatcttgagcttgggtggctttggtactttctccttctttgttctccccctgggcatctccttttgcctgatctgattgcttttccctagcccctggtattgcacactgatcacttgatcctcctgctcctactgtctgattgtgtagggtttgcaatctttgtaactctttttgcaattcctcatattgtcctttactcaccatgacagccccttgcgcttggaccaattcagccagctctacatcactcatgggtgttttccctgtttcttccaccaccgcaccagcaattctttcttcttgagttgtttcattacctcctgctgctgtggatgtcttggccatctctgcccactgcttatcaagtgtttccgttgctcttgccaagtcactttcttccactgccttttcccactctctctcgagtgcagctgtcgcgcttgcaaaagctcctgtatagcgtactggcacagtcttctgtcgttgagaacgtcgcatttactgtttgagcccaattcaatggagactttccgtccccacggacggcgccactgttgtgaccttaggtcacgaacaagatcggggataggccggaaagaagtgttttcccgcctatccttagaaacgagctcgaacagcaaacacaacttttgaggattacttttgtattcaagatgtcttgtcctgctacaggtttttgactggcttttataaccagtggtcgtacacgtgagattacatttttacccctgtgggtctttgtaagtttactctaatgcccctgccacatcagcgtctgtgggggcattctagtacatctccaggggtcttttagtcttttaggtgctagctggcgggctgcagga

SEQ ID NO: 6306 - DNA, 48478 bp, Oryza sativa
  unsure (1)..(48478): unsure at all n locations
aaaattgtagccctcgacgtgacctacaactttttagttgaaaagtttttgaattaaaaccatttagggtctcaaaatattgttgcatgtttatagattttgaaattttaatttcacaattacattttgggacaaaaaatgacttaaaataaaaaaaaatcaactacaaagttgtagatcacgtcgagggctacaagtttgatataaagtttgtcttcattagaattcacatgaaaaatttatgaattatttttaaatataaagtctttagaccgtcctatttgatccagatgatattcaaatccaagtttagggaccggggtgacacaactgaacaagttggagaacctaaatgagtgatctgcaagtttaggaaccgagatgacacagtcgaacaagtttgaggatttgaacggtcgatttgcgagtttaaggaccgggatgacacagcggtacaagtttagggaccggtgatggattttactctttttttttaccatttccatttttgtgtctgtcagtaaccatttccatttctatcagtaacaaatcatgaacgattaccgttcggtcggtaacaaatcatgaactatagccagtcggtcaggaattaccaggggcactgtttttcacaacttcacccgtaactgaccacggagtggaaacagcgccaggacaccttgtgcatgctcactcctgttatgcactcgtgacagcaatgaggaggcaccaagcccatagtataggcttgtggaccagaactgcaacagccacactgggatgtacgcagtggaggtgaggctgcacaggcattacccaacctacatggaggtggcaagaaatgcaaagttttcccagaatgatgcatatcaattatcaaagcagtggctcgaccaccccagatgagcatatcagaggtgcggttacgcactcgttgcccatcctatgttgaggtggcaagaaatgcaaacttttgccagattgatggatatcaaaccttaaccagcgacacgatcacccagatgagcattagaggtggagagatgcaatcctcatactgccctgttctaggtgcttccctttggatgtgtgaatgccaccttgccatcctttataagaaatgggatgtgtcaattacggatgtagagtttccttctttctttgggtttatgtgtaatcagatggagagtagaggtgccacttggaataaaaatgacaagtagtacgtttgggccaaactgtgttaccgcccgatgcatattccggcataggttcacaaaggagtgccatatatgggagaagcaaaaatctggtggcatccttttcctttgggttctagttcgggaaccgccagttttctcaaaacatggatttggtttcaggatctggaaatttctagtgacacgtaaggaattttccaacaatttcagttatgggcctaatggacttcaaaccagggattcccagtttcattttggaaatagattctgggcgataaccagaaatttcagaaaaaataacacctagaattgtttgaactttgatttaagaatagaaaagcgaaaaagaaagaaaaagaagaaggcaaagagagaaaaacagaacagttctcataccataaatttctttttgtcagcacatatgtgttaccactgaaggaggcaggcgtttctgtgttggaagacctgtgtttaaagccgaggtatttcctgcttaacatcagagagatgtaaacatcgagagctcacgtttgcttgtctctcaatgaacctggtgtgattaagctcaaatgagtcatccataacaatgattcatgtaggtcccatcggttgcccatattccctaataagccaaaacggcttattagagaataaaaactaacttataggtaaaacttttatatatgtgttcttaacaacttaaaagccaatactaaaaaagaactacgttgaaaatattttaaaatcaacttcaaaattaagtttgaaaattcaaattttggctttggcttattagggcaaccgatggggctcgtaatatatgcaagctcatcaaaacagaaacaaaataagagataccaaaatattccctccatttcatattataagtcgtttgactttttttcttaatcaaagttccttaagtttgatcaagtttatagaaaaatatcctaacattttcaatacaaaacaaacatattatcaaaatatattcaatgttaaatttaatgaaactaatttggtgttataaatgttgctaatcttttctataaacttggtcaaacttaagaaactttgactaaggaaaaagtcaaacgacttataatatgaaacggagggattatattattgcatgataaattcatagtcttcttgaaatgataattagagtaggacgtatcatacttattttttcttgcatagtagcagcaaaatccatgccattttctctccagatatagggaaggacattttgaaacatatatagtgttggatgaactccagagtcctccatccactgcaaaacctacaggcacaaaaaataaagctcaaataaatatcaggttttgacctattactcttgaatctagcttgttgcaagcggtattctgagatgatcagatgatgtaaaaatgagaaggggccttgttacctcaatatactttctccatttcccaacaactaggagatttctaagaacaaccgcataagtagaaagacccacagtagaacatgaagtcaccatcttgtaaaacagctgcataagagaatcaaataattaatgtagggaacagaactgtaaatgcagatcattatttctcttacaagtgtagtggcatgtttgtgattccatggcttcctcaagtatcaatgtgtattgatgtgagaaggtgatgaactgatgatttaaaactagtcaagataaaattgttcttattgctaaatccatttttattttggacaaggagcagcaggaaaatataggtggtacatggaagtatggaattactggtagtacattgatacttgaaccttcagacattcaagaaaaacaattcactgccaaataagtaagagtagatgaaatcataaaatatttgtcaactcctctgaaaaggagaatcctataaatctatttgattatgctgaggacaaacatattaaatgattatatgtttgggagaaatatattgtattgtgtcagtgtggcaaggccgttagttccatatctaaccaaatatggacttcacttttatagaaatgaacagatcgatagtttttttcccccctgaacatgtaggagaactgcatccctttgcattaaaaagaaagatatccactaaaactaaaaaccataccacaccaaaaacagagtaatgaagcatgtatatccattgcactgcagaagttggatatctttctttgggtcttagaaagatatccactaaaattactggaatgacaactatgttcttagaaagatatccactaaaactataaactaccacaccaaaaacagagtaatgaagcatgttctgaaatgacaactatgttctgaaggccaactataccttcatcatgttctctgtcttcccacattttccaagaaaatttaaaacatggtttagtgttccaacagaaatggatgagagcgaagaatccaaatattcaatcatctcacttgctgttttccagtcacgtatcctgttatgaggaagcagaacaaaatagaatattgagttattcaatgcatcaaaagcttgtaaacaacataacaccagatgtgtgcggtaaaaaggaatttgtttctgctcaacacttgaaaccaccaatatatcacaagtccaatacaagttacatgatgaaagcatggcagcatgccatgatagcctgattatctaaacctacaaacagtgataatgaaaggagcagaggctcactggcaagttgctgtagcccatcaaggaaaatgaaattatcaatgagctacaatccgaattgtgtaagcgaacaaatgtagattgccaatacagtaaccccaacattcaattgattcaagttgtcaattactggaatcgaattaacactacacagaacattccaccctgctatcttaataaacttgaaacttcatactgtttttacctattaaaaacttatcttttatatcgcatggttgcttaagaagaacaagcagatgtttgtaagtgactcaaatggtcacctgattaaaataatcctaaagcaaagctgcacatgacaggtaagatgactgagtcatgtacacctaaaagccataaacacgatgataccaaagcaagtgtgaatgcatatttatagtgttactagatcagcagatgttgcacactgctcagataataataatagacctaagttaccaatttagaattgcctgttcgacttaagacatcagtaaacgtacatggtgcatgaagctattatctcaaaataagatttttggttcaacgggatggattttttcttcatgaattccatcaattgaaggactctttcaggttcgccacccttattgaatgcttccatgagagatgagcatataatggcatctggtggaataccatttacttccatctctttgaacaggtcccaagctctcttccaaccaccttatggtccataagaactaaaagatcagtttaaattcttgagaagctaaatcaattaatcataataacaaaagaatattaccaccagcattataggcttggatcaatgtagtatatgtcaaaacatcaggaaaacagcctgattttttcatagaactgaaagtagattctgcttcagatagtttgccctgaatacaaatcattgttaggatagcaaactttttagagtaaacaacagagaaaataagagcaacacttgcctgtttgatatacgaataaatcaatgaagagtaaacctccttggttgaagaaaccttggagtccaccatgtcctcaaaaaatctcaaagattccgtatactttcctaatttactagatccactgatgagtatattgtaggttacagcatctggtttcacattgctctccctcattgatgtatacaactccaaagctttctcataatctccaaaacttaaataacttttaatgccggagttgtaagcaactgtatttagatcaatacctcgggacctagctgcttcaagaattgtctcaattcttgttatctgcctgcagcgaccgcaggcagccaacagagtacttatggaaacaacatctggctgaatgccatctttctccatttcatgcagcaagccaacagcttccttcaacattcccgcagacccataggcatcaataagtgcattgtaactgactttatttggtttgcatgagttcttcttcatcttgttaaagacctccctagccttctcaggctgtgcagatctaccatatgcattcagtaaggaggtatacgaaactatatcaggtcgtaacccatttttctttattaaattaaaaattgccaaggcctctctatgcatacctcgtgaggcatatgcacccaaaagcgaattatatgctacaatattaggcttcactccttcagcaaccatcaaatcaaagattgctttgcaattttcaacttgcccataaatacaataagaatgcatgatgctagtatatgtaacaacatctggaggacatttggttcttctctccctcattgagttaaacaattcaatagcttccccacactgtccaatctttacaaggcaatggatgataatatttaacgtgaaagtatcagaggtgacatttgctcctttcattatttcaaaataagatattgcttttgagtactgagctccattcttgagagcagacaagacaatgttgtgtgtaaccaaatctggtcccacaccattttctgtcattttcttacacagttctaaagcttttttccagttgccagcagccccacatgcatttatcacattattatacgtagtccgggtaggaggtatctgcagcaaaagtccggaacacaaccttctttaataaacaattatggcaactaaactaaaaaaatgaaatatataaactttgctggttttctaatagtctctttgcatttcaataacgtaaggactgatgaggcaatcaacagtgatgtgtccttgcacaaagtgagtgcatggagccaaaaactttatatggttccaagattctcttcaaattcaacccatattttagagagaaaaacttcaacccttaatcaagcaattttaccttactcaacaaactcccttaaaacaggattgcatttctcgctctgaacctctggtagttgcaaaacatgtttttcctgttattttttaactcttcattattttctttggtgcactaaatctaccatagccattactatgtatagtagaaaacagaaggaccctattgggtttatagatgaaaaattagctcaatatcaagaatggttatagcgaaatgaggaaagcaataaacgcattgtactcattgtaaagaagaagcatttccaaaattatttatctaaaatgaataaggttaaaagcacaaaagttaatgttttgtattacttcgaaaaataaaacacacaaacacatcaacttaggcatttgcaagatgagaaagcaagaatatagggtttatgtttcaaggaatgatactgacagcagcacgaagcatatcttccataatgttgatggcccaacgccattgaccagctcgagaatgagcatggatgagggaattgtatatatcagcatcaggtttacacctaaggttataaatgtcagtattttgtccaaaaaaaaaaagagaaggaaatgacagataatgaaaaatgatatatttcttatcacagtagtggaaaacaaaatatagaaatagcaaccacatggaaattgcacttagtattacacatattacagtttattatgataaagtataaatttcctacatgcgagatcagcaaccatcacttgcgctgttccctagatgatctgggaagattttggatttgcaaactcaaacaaattgaaccataacacaaacatgttatttgtatatagacaagttaccgacgagacaattactcaattatgaggtgataaatttttttagtaatatcaggcaaaactctttttgatggttgaaggaacgcagaagccaaattaaaaccttatgtcagaaatatatgttataacattcataccgccattcctgcatctcaaagaacaggccacgtgcctgatcaacctggttatgcctcgcatatagtcgtatcatcatgccataaatgtcgttacgagcacagtagttatcctgatttttcatccagcagaacacatggacagcatgctgtaaattcccagaaattgtgatctcctacaagtgatacaacatgtgtaagcgcgttattacctgaaaaggctagttttatgttagcaaatcgagagatttgagcctcgtctacaaaatttgcatgtgcagctggtactaccataacaacacagctagatcgattgaattgttcatgatttttgtaatttcaagcaatcgataacattttggccccaaaaccagtttgtcattagtgcctccacgcaaggcaaccatggcagccacattgatgtatatcatcagcaattttcaattcatgaaatgctacagagcgtggggatgatggccttacgcggatgaggagagggaagttgcggcgggcgaagcggccggcccagcagttgagcacggcgtcgacggcgcgggcctcggcgcgcgggagcgcgagcacgcgcgcggcggcctccgacaccttccagtcccgctgccaccggctcccctccacgcgcaggcggtggcgcgcggggagcgaagcggcgcccacgccctccacctcggcgcgggcctcgcgccggccccggtcgtagtccacggacacgggggggcggcgctccgcccaccccggcggcgcggcgcccgggtgcgccagccgcggccgcggcggccgtgggggcgcgcggaccacgcgcgtccgggccggtgacgctggcgccgccgcgtcgggcgtcgcagccggcgaccgcggcggcggcggagcggaagacatcgcggcgggtggtggagggggggagagaagctttaccgttggggcggtgtgagagcgggttttccggataaggggcgatcttttcctcaacagaaaaaccaggaaatgaactccatccgtcctaaaatatcctcgcgaaattagaatcagattcgtaaaacgagaaagcattctgttatatcctagatttttatattttaaaaataagatagtaatttacaagcaccccaatctaaaaatatcaccgtagaaatgcttttattttagaaactaggtgaaaccctacgtgttattgtaggagtttagtattataataatataagtaaaaaataatgcgtaacatagctagacaacataaactaaagtaagttgatgtgatttatgataatttaaatttaaatagtatataaaatgatgattcaagatatcattttttcaatacgattttgtatccgccaaaaagaaatacctggattcggctccgatacctatgtaaacatatgggtagattattttaccctgaaattattacagattaatatggacagacgggaaatacatgtcccgttttcaccccttgattcgatcttacccgtcctattttcaccccttgattcgatcttatccattcccgttctctctctgagtcgtcgtcttcctccttcgcctctcctatttcacccctccctcccccctcctctccaatacagcaaagaactcctttatgcaaacatagcggccgtgataatagggcttttatctaagggtaaatgggcaaacgggcacgattaccatgggcagcctccctccaaccgaagtaccgaacctgcgccgagggagacagtgcttctatgggccggattttgtcgccgtgggccaggtgagcccgctcgtttttgctaacctcgctggttgccgtccgatgcagatcgtgcgctccatctccccgctatttccctccctctgactccgaatccgaatccgtagtcgagtctctccccccttcggcgtaaaaaggagaagagaaatcccccgtctcctccgctccttgcgacaagaacagggggagggagaggcgccgatccccatctgctcgagcaaagcagcggaggggaggggatcctgcaggtgagcagcatccatccacatcctccttctgattcatggattcatctctctctctctcccacccctacttttgtctggaattcgctttgtgtgcgttcgttaaccctagctttctcttgtagatctggaagaagctcatctcttaatttcagagagagcctcaaccttttgatacaagagtaacagtattgggggttcatctgaacccccaaatgtcccaagttggatccgcccctgagacgatggatctggagacggagaatcgtcttgcttctttacttctcgaggaggcgaggaggttgcaggcggaggctgacagggaaggtgttcacgcatatctgcgaaagcccaatgtaaggcaccgtccgaattcgcgcttccttacggccacagttcgtggagttcagcaaggttagcatcgtagtttcgatttatcgttattccatacttgatacctcctcctgttgattgattagctatccaaggcaactataataatttcttagtttcttgactcattgttaatcgtttggtagactttatctggaattgaattattttttatagaacatattaattttattgtttgcccaaaaaaatgtctgttccatgtcttaaaggagaattataggtgtggttaaacacaaaatataaaccaatcgtgtaaaacttacttcctttgtctaggaatgattcgctggatagcaagtaatgacaatctcataagtatagctgatctcatgttgctaattttcttgtccaaagatatcagcggtgttctggttgtctacttactgaattggcatgatatgtgctgttcacctacagcgaaccgtgttgtggaggtcaatgaaatgtggcgtgccagaaaacaacttgannnnnctggagtcttaatgaaaaggagtagaggtcttggtgacgccagagagtgaaaaacgcaaaagtgacttgagaaaccagagttccagtccaagggttgaagaagaaggcatagcttataacagttcatattccgatcaggaggatggtctaggggacgatgacattgagaagtttcttcattcgaggtctgtattttctatcttttggttgttctactaccaacattttacacaagtagctatctgcaatgttgctgacagagatgtaactttggtctgctatagggtgaagcgaggtcgaggggccgttggttctaggatggatgagcctggtccataccttaatgttgcatctcgtagtcaagagaacgaacctaatgctgatactcaggtggaagaaaaatgggaacgaagagtacaaggcccggagaaaccagtgtctttgagatcaagatcacctgatgactattggcgtagggaagcactagatggagaaccttccagccctgaactccacaagaaaaaagagaagaagaaggaaaagagttcagagaaaaaggacaggaaagagagaaggaagaaaaaagacaagaagaaatctaagcatcgccaccaccaccatcacaaaagtcggcaaagggagtgattgttctgcttgctgagcataaaaaatgtacacaagaaacatgttagcttctaattgctactgttacttctcacttgaaacatgttgtaccaaaaacttgatatcgtgtggaatggagaactgttcttctcacacggagtgttgatacaaagccatatgttagattttagtgctctcgttggtcttgtgtatttattatcatgatgactaaatcacaccctcgttaattaggaataacgtggttttggtagctaaatgttacagcttccaatcttatctgcaactattgtatgttgtacaaatcgtacaaatcgatcaaatttgtatgctgtctgtctgtcaggcaaggattcctcaattggagcactttggagtccctgtttactggcattctagtttcactttcacatcagtagcccagatcagatattctgactcagaactttaaaacgctgctgatttgcactttgcagtatgacctcatgataatcctccaagcaacatgtaccttcgagagttcttccctagaactttcatttcgaaaaaaaaacaaattcacaaaaataaagagagatttttctctcctttaagaattagtttacatttcctgttcatagcctgataatgcagcataatctgtggaacttcatttgagtatcgatcaaaacagttcagtacccttgctgagagggtgaaaaagaacatagggatgacatgattgttcatatgtagttgcacaaatgtttacaggattacatgacataaaaaaaatgtaagaatgaaaagataatgacctagagtctaccacttctgtttacgcctgaaggcaatcagtggaacgctaatcgagatttatgggctctgtacagtataatgcaatgtgtattgaaggactggattcgacaaaatctatctgcaaaaaacaatgaaattgttactaatcagatcaaatgatcagaagcataataagggacgaagtgaagataagtagtagtaaataggcatgtggaatatggttaaactgatcatgtaaacatcattcacaaacaagcatgatgagcagtgatatttgatagcttaagaatagttgtgccaagcgaaagagacttaattctggaaggttagtaagaatcaaccacatgttcgataaataaaatggtttcaagtttcaacatacacaaagaagttaatgaccattgtactattctagctgctgtcattgagatggtttggagatttcaagtagtcaaggtaatttgtatattttgagaatttttgttgggacctgtaatgactacaaaaaattaacatactcaacaacatgtttaaatttaaaagtgtatagcgaaattgtatcagttactcccactcattcattgtgcaggtcagtcaaagctactctatgaagaaatggcactttagcttagtaagtggctattgccttagaaccatgaggcatatgtctgaacgatcatgattaacctgcctctttcttaataaaagagaatagccaaacctatatctcattgcaaactacaaatagctgaaattttagattgaacaatcgaaaatttgaaatgttgtcagcgaaatactccctccgtcccaataagtagcaacctaggataggattagacccatcctaagactagggtatgtccaaattcgtagtcctaggatgggattagacccatcttgctacatattgggacagagtgagtactcacattgcttagcagtgaaaagtacaaaacataaaaggtgagaaagatagcactgaatctattttctttaagggaaagcattgtgctgtgcaagttcctcaacatccatggctattgagcaacaagaaacaaccaagagaaggacctgaggcaatcacctgcatcaatgaatgaaggaagaatggcccaggaggattcagccaacaacaaaggggctgatctccccgttccgcatgccgcgggctatctcaccggcgatcaccaggcacgttgaaacccagccggcgagcaccatccacaccatgtccacaatgtgagccgcaagcccccacgacatcgtcatcctcgcactcttttccctcaatttcctctcctttccagcctttccctacagctgcttccagggaggcaattccacaaacacctagcctgcaagcccacaaggaacccccaacagtttgcccccccccccccccccccaatcatgagtgagccgacaagatgccatggaggtgaacaagggttagatctatctagttctccaataattgattccatcttctaatcgatgggattgacaaggcacagaacaattacctctgtataatcctgagatggcaaattcacctcaccatgcaacaacagaatcgactccagtttgcaagaacccttcacccatggcagtgattgaatcaggatcttgtgtttcaccaccccagcacgtacaattcttctcctgcttcaataagattggaaaccaaatagaccttggggaatcttcagactcttcagagtgggactgtttccccctttgcttccgccctcagattctaccaaaccatggacggatagatccttaaatttagacggaatcaagaagagataagacaggaaaaataattttttttagaaaatacaccatcaagtttcttgcttgctttccccaaactcttgcctttcacctgtcgctgtcaaactgacccaactgagcaaattcaagaaacacctaggaccaacctgcacaagaaccaactggagactgccacataggagtctctgaccaggaattttggaggagatcctcatccaaattggtttatccaatcgtctttatctgtttggttagaggattagataggggatttggacaagtatacaagtattcttcagttttgtctcatcgtcaattcgtcgaaaaacacctgccctccaggtcagcacagtacattgaacagaaaaggttctactgctgagtaaatgcagattaatcattttttttaaagaaatacagtacagacacacgctcataacatgcacactcacgttataaacgcacacacggacatctcattatcgattggtatgtcatctaccactaaaaaaataatcgatctttgactccatcaacagttgtcacaatataagccattggcttgttgagcttttcaaacccaatcttaaattgttgcaagcatttttttttcatcgttttttttttctagcccaagtcctactcgaaaaataatatcttgttgacttatttatttttgtacagcatgtgagtctttttttttcatttctcatacatattgtgtttgcttccctgagccagttccggcttataagatttgagttgattccatcatctcctctctatgctacagtagctattcttaattaattgaatattgataagtactaataagttctctagatcttttttagaaaaaaagaaaagttctctggattgttgggtcagagactcatccaaatttgggccaggctctgggtcggcctgctgtcactaggccaaaagtcatgatccagtggcccagatcttattaggtccctcactgtcattaggaaaataatttggggaccaggtgaccctgcttaaaaagttgggttatgttcaaagcagggtctcctaatctcctatgattattttccggatttcaagcattgcgatagataatatatagcgggttggtcgtgaattaatctcttgatagcagattgtgtatagagagtgctatagcggctagtatgttccaacatacttcctccgtttgtaaatatttgacgccattgattttttaaaacatgtttgaccattcatcttattaaaaaaattaattaattattaattcctttcctatcatttgatttattgttaaatatacttttatgtacatatagttttacatatttcaaaaaaattttaaataagacgaacggttaaacatgtgctaaaaagtcaacggtgtcaaacatttagaaacgaatggagtattatcttgggtccgctaactttgtagtgctagcagtagaggactaccaacattatagcggtcgccattacggccactgcaaacactatattaattaccttgcttccaagtaactgagctacatgtgtagaagtctaagaagtggatctgaagtgtttgggttaaagtcactatattatttatatttactagcgtataatatccatgcgttagatcagaattaaggaaacattgtcattaatacattctcggcacaacaggcgggtcctttggcccccacgcacaaactccattttttcccttcacaacagtgtgcagggagttgatggtgtgagtgatggatgcggattgaccattcatcacacctagttgtttcatttaaattagtatatgtatacctagaaggtaatatcatggtttaagcatgaccaatgagtttatttttcttctagaaaggtataattaacaagttattactttgttacaataccaaagcgaatcgattttcttttgattcatcactgtatgtacgtagtatgtgctgacttatcatcaaatttacacttgaaaagaaaattgtgctgatctttcaaaaataaagaaaagaaaattgtgcgcggttcgttgtttcaatttgttcaaacaaggtaaaaatatgaaatactactcatcacctgctctttattgcccatcacatgataattacacaccgttgcaagaacaagcatagcacgcgaccataatcattttattcgtttgataaataaataatctagaatataacaatggcgattattatttatcattaaacagcatcagatatcaattaatcaccaagtggcaacggcgcgatccgccgtcgtcggcgcgcgtgtcgaggtcgcactcgtcgcgcccggggagcccctcggcgatggcggccatggcccccttcttgcacgccagcggcgcctcctcctcctcgacgagcacctccaccatggcgcgcagcgcgtcgcagcggcagcgcgccgccacctccctcagctggtggcagcaccgcgcccgcacccccggcgggtcgccgccgccgcaccgccgcagcaggtacgcccggcaccccggcagcgggtccttgggcaccacgccctgccccggctcgcacccatccgccgcgcgcgcgacgccgccgtagtactcctcgccgcccgcagccgccgcgacgacggcgccgaccaccaccaccatcagcgccaccagcgccaccgccaccgacgacaccgagagcttgctgttcttcgacgccattgtcgccgtcaggaagagaaatcgatgagcagtgcaaggtttgggttgttgggggggggggggggtggtgagattttagatggttggaaaaagggagagaaatggaagcgtggggaggaagacgaacagttgctttttttgtttttttgaatttgccgggaagcgaagctacgtggagagggcgtcgtgcatggcgcgcgcgggaattgtcagtgggcgtaagggattagcgtccaaattaaacaaaacgaattcatcagtgcatttccagggccgggctgcctacttgcttaatgggccgtgaaagattgggcccaaaagggacctgcacgaatctcaactcgatcggacaaagggtctcatcttttcgcttatacttattcttatcagacaaaatttgaatttttaaacttaaatttggatttgattttaagattttttcatcgaagtttatttttcaatctttgcttttaaatcgctaagaacacgtatataaaagtttaattcacaaattacttttcgtttgcaaatatgtcgtttcgcttattcagcgaaacgatggctccggaagggtttacttactactgggcccgcatactacctctccctttgtgtttccactcaccccgcctataaaaataccgccatttcatcagtatactatttactatagcatttattcatttgtattaaaatatacttatcattgagaccatgtaaagcaatttatgtgacttctaatgtccaagttgtcaacctctattctctcgttttctgcacgcacacttaccgaaccactaaatgatgtgtttttttaataaaagtttctataaaaaggttattgtaaaaatagttaactttggcgtgaaggactaatacttcggtttcaatttgcctcacgaagaaaagggtggatggaggaagaagattgatctgaccggtgggttccatgagtagatgaggaagaagatggagaaggaaggagatggatggaaaatgtgatggcagtggtggtaccaattttgtaaattttcaatggcatggttacaaatagatgaattgtagtagcatttatctgaatcaacatatttataatggcatggatccaattaacctaaaaatcaatacgtactagccctcttggaatcgtctttttcgtactgtaactaccttttactctagttcgtccatttttattggtttgcattgtaaattaaccatccatccttgctgtaaaagtgcgaatctgttaatcctgatgggtgtttaccccaatttgtctaaatttaatatgctagccgattttgatctcaattatcatcttggtcaggagtttttctagatcacggttattagcgattatattcatatcctaaggctctcggtggtacatcgtggtgattggtccctgaaaaaagggtcaacaatggcaaatatgcaatttatttcaaggcccctgaaccatattatctgaaagtttacttggtacgtattatctaaaagtttcctctatatatggttggctgttttttcttttacctttttctgattgcatgttgtccctagggactagtaattatattatatatttcagtgtccctcttgcacaaaggaattaaagaacaattcgagcgggctagtgaatcaacataagaacatcgaagttcatcatttattcaccacatacatacgtttccatgcaaatggaaacagtaattacagtaactacaccacaccacacaaagtagctatagcctagtggccagtcgccgggttcctaagataacccagccattagcaaacaccaccgatgccgatatggatatccacaccgcataatgccaggaggctcgccaccaccatgcatttcatgttgtctctccggcagccagggaatacctcgtccatgggttgcccgtgagccgccgtgccgagctccttgtacatgcctaccaacttgtggctgagcaccggacacctacataagttgttgttgatggtggcgagctgcctacagcagtctcgccagacttgctcatccacgttaccggctgcgccaccgccaatgcactggcccttcaccattgttcggcagcgtgggagtgggtacacatcgagtagtctattcttggctggcaaagctggctgggggtatacaccacctagcagtggtggtctgccattgttgtcgttgccacaagcatggagacaactatcgagagcaacactaagaaccatagtataatttgaaatttcattctccactggcaagcataaatctccctgaattttttggtttttttggtcaaaatttatttaaattcagtcaaaatatgttaaaaattcaaataatttcggtcagaaaaacccggaaatcacaccatattcgttaacccctgaaattacactaccttgtttggtgccattttgtttttctttgtgttgcagaaaattttagttagtctcaaattgtatgagagggtgtacaggtaagcgctacatcaatggtggttttatatgtagctacaaatactaaagtgattccagaacggacacaatttttatcatgagtgagtagcttatggttttgcatgtaatatttattgtggttcaaagctaatctaggcatcatttcgaaaaaaaaaaacccttcgttttatatggaccacactcttttcattttcattcttccatgcaagaaaacaaatgcacaaactgccaacagatatatagttttggaaggtaacaaaatcttttgatctttatttgcatggctttttctatatatagttgatccaatttggtaaacaagaaaaaagataatacttcagaacaaatattgttaagaggaatgctctggaagctaaaaagcatgcagtaaagaaagctgcaacactagattcagaaaattaagaaacgtgtgtttagtgaagaaacgtgtgattatgtcggagtattctgaaacacaagacgcgcacgttcacttaatttccttttattgtgtactctaatcttgagaggactgggcagttggatctaagtaacagagttattttaacaagccacggaattatatagggaagcacgtacgcataatcactttgtcaaaaaaaaaacattacaaattaaaggctagagatattgtgtgttattaccttgtcgtattgcaatttgcatagaaatgttttaagtaaagagtaaggagagcacaagaaataggtctgaagtgtggtaggtttgtcaatttgcgaaggaataaaaagagcgttgttagcttggggagtgagtttaatatctatcggaaatgtattaatttatttttaaatcttggttttaccatatcaattatcttaatcattgtaaaataaactactccctccgttttaaattatttgttgttttagttttgttacaaatcatatgtcactacaataaaaacctcatatgggacttttctagaggagtttacaacaaaaaccttatataggacttttctagaggagtttgtaaattacctctaaaatcatgagttctataacgtagaggcactttgtactttaaaaactgcccagaaaaccttttactctagagacactttttatatattttcaacatattttgttaattcttatctcgtagaggcattttttcggcactttaaaatatgcctgatatgtataagaaattttcttcaggcattttaaactctgtataaacactgtttagggccactaaagggtaagaccctgagcaaacaagccaggcctaaggtcaaacctgtaacttgcctagcatatgtttggttgctacccttaggattctagcatgatgaatcttgcctgagcaagccatgctatctcgctccacctgcctgagtaaaatcaccgcattagtgaaaatgagaccacttcttcctcctcctcctcactgctagcctagggtttttgcagaggccatttcccatcgattcttccatcgctcccgcagcggtgaccaaggaacttgcagatccggtggccagttgtttctttttccagtaaaaatcctgcatttggtgatctgttagagcgtacgctactggagaagtgatctttgctgagtcatacaaaaatcacatagtcccggttcgagtaggaaccgagactaaagatattctttagtcccggttcaaaaacctaggggtactttttgatctttactcctagttgaatagctgttagaccctcaacaaactttagtcccggttggtgataccaaccgaggctaattgtctctctcctacagcatctgttctctctctcttccttatctcctcctcctcctcctgcaaaataagctgccatcaaaccgtcttgggacttattttgtatcggttttaatagttgagggatatgttgtatttggttttccggttgaaagacgaaaatcggattcgttgacaagttaagggacctcagatgaacttattccaaattaactgtaatatatatttggttggttgcttattttttagcctagtaattataaatttcagtattccctcttgcaccatggagttaaagaaaaatccgagccggctagcgaatcatcataagactatcagagttcatcatttattcaccacatatatatgtttccaagcaaaaggaaacactaattatataggtaccacacaagacacacaaggtagctatttcttagtggccagtcgcggggttcataggataactcagccagtagcaaacaccaccaatgccaatgggaatgtctacattgcaaaacgccgggaggctcgccgccacgcgtttcatgtcgcctctccggcagccagggaacacctcgtccatgggttgccctttagcgggtgcaccgagctccttgtacattccaaccaacatgtggctcagcgcggggcacctacagaagctgtcgtcgatggcggcgagctgccggcagcagtcttgccggacttgctcgtccacggcaccgccggcgcactggcgcttcgccagcgcccggcagcggggcagcgggtacatcgggtagccccgtccggcagcgcatagctgcccgggggtataaaccacctggccacggtgatccgccattgtcgtcgttgccacgagcatggagacaactaccgggagcaacaccgagaacactaccttgatgaaagccattttctttctattgttgttgcagaaaattttaattattctcaatcctcaatgagtggttttatatatgtagctactaagactaaagtgatagtgattcaagaatggacacaaaacttttagcatgagtgattagcttgtggttttgaatgaaatatttattgtgattcacagctaatctaggcatcatctggggaaaaaaaagttggctaaagtggattcatatggaccacactctttaattgtttaaacccattttcattcttccgtgcaagaaaataaatgcataaactactaacagacacatagttatggaaggcaacaaaaatattttgatctttatttccatggctttttgtatagtggtccaatttgataaacaaaaaaatgatacttcagaacaaatattgttaaaaagaatgctctgcaagctacaaagtatgcagtaaagaaagcggcaacactagattcagaaaattaaataacgtgtgcgttctctgtatatacgtgcctgatcaagcatatattggagttttctgaaaaacaaaattcatatataagatagctttgatgtgcacgttcagtctttcacctactttttttttttgttgtactgcaatcttgagaggcctaggcagttggataacagagatatattaacaaggcacggaattatatttatatggacataagaagcacgtacgcataatcactttgttgaaaaatgttgcaaattaaaggctagaaatattgtctgctataacttttcccgttgcaatttgcactactaggaaaagcattatcgcaagcggccgaaaagggtcttcgcaggcggggcggccgtccgcctgtaagccaacgactatgaagatcgccgatcttcgcaggcggggaggccgtccgcctgcgaagataattttcgcagacggacgttggctagtccggtccgcctgcgaaaataggaatcgtccgcttgcaaaaaagaaaacttccgcctgcgaagataggtagaaaatattgaaatttaaatataatttggccgtaaattacttttaaattatttattagaaattcttgcaggtacatatattggaatattatcaagcatttggtactgagaaatctacttatattgcataaatcaaaagtgttgccaaaatatatatattacaatattgttttacattgtcacttcaaataacgtcatctagttacattatggcatagcagtgttccactcccgaagatccttgaattcgtcacttgccgctagggcaccctctgggtcgaagaaatctcctttgacatgacagcactcatggtggatgaagtggcacagatcacgctgcacatttgtgatacctgtatcgtcaaagcttgttcgacattctaatcttggcaactgcatgcattgaaattaatcaatatattagtatcataaatatcaagagctgtctagtaaatagtatagagacttacatcctccgcgttagtcctgtaccgtccattaaccctaaggaattcgcacgcataatacccgcaaaggaccgttcctcgcggttgcttgtgacactgaaggacatatcatagaaaaaagtagttataatttgcaattagtgaaactattggaatacataaagtgagtggagtattaccggccaataggtacgtactagcagcttctcccgtgttcgtgtctgttctccacccttgaacttgtagtattggtatgcactgtatgaatgtcataccatttcagagtaaggaggatatttatttgtaatacatccatatacaaatgcaagagtcataataacttactactgtaagattgttagaaattctttgtattgcttgtgtttgtaatcgagaggatccaagactaccacggttccgtctttagggtggatgagtaaacagatataatgatcgctacatattaataacattataattagttagtaacagctaaaataagacatatgtgtacaagataaatgtaccgaacttacttaaaattataagcggccatgacgactctcttattttgaaagtgcaagaaggctcgtccaatgtactgtgcgacagtaatcaatttctccttgtgcaagcccttcttgtattctgctatctctttcggattcttgcccttcagctggtctgaccctggatctagcgtaacggtatgctgtgtttggcagatctgagttggatccaagaagccgatgggttcttttttcttcttagcatccatgtattgcatcctacataagaagtttgttagtagcaatcacatggagttgtattgtacatattttttatctaattaattaaaattcgtactcacatgcaccaaacaccgacatagttgacgtccatcttatccgacgatatatggcgtggagatctgagaaatctagccatacgtaaccttcttcgccgaaacaatctgccggtgatcgagctattatattgcccaagcctttcttgctggcctccatgtagaagttatgtaaccttctcatctcccatggtgcttctttcagtgcccattccggcaagagtgctttcccatgttcgtacttttccgggcaatcatcggttgcgaagtatgttggcccggctagcacagaagccttctgggggtcgtcatctctgagcttggcacgttccttaccccctctgaagacggttagcatgaacttctccttgttcgcatctttggacttggattcgtggctcctaatcactcgtggcacctcgggttctttcgcaggagaagggtcttcaaatatctctggctctgtaccatcccattccaatcctggtacttcatctttgactgacccgactgatgccacaaattccacctctggttctgccactgtaatctctatgggcacatccggcacttgaatctccatggctgtctccggcggtgcaatctccatggctgtctccggcggtgcagtctccatggctgtctccggcaatgcaatctccggtggcacttccggcactggattttccttaccaagttcaggatcatccgccttatcagtcaccttcctcttaggaggcctcggaggttttcccaaacccggtttaggcaacacaggtttttccccggcgtcggtgcccaatccaaagaatatgtcattcttatgccagagaattacaagatcgaccgcatccccaagtacggatataccatctgcagtcgggtagtcaatgtcgtaggactcaaacccttcgtggaccacttgtggctgcaccttggcatacgcatcgggtaagaactgttcattgtatgttctaccagggatagcaatggctgtagcggcctcaagagttttaccggagcgtccaatgggaacgtccaatctgcagggtgtattctccttgaggtcatcgaaggggtaatctggctcagtttctttggtttcggggcgaagcaaaatcatgtgcttcgaccgtagaaatcatggacgaacggtcgacgacgagcttcggtcgtggacaacgaaggaagggccggcgacgaggttcggccatggacgacgaacggcctacgacgaggttcggccgtggacgacgaccggccgaagacgtcgttcgcggccgaggacgtattcgctcgtggacgacgatcggccgatgaagccgttcagccgcgagcggaggggtgggcaacggtggtggaggggccaacggcggcggtggccgtgcgcgcggtggaggggccggcggcggtggaggagccgatggcggaggagagcgagctcgacggtggcggtggatgagccggcagcggtggatgagctcgacggtggcggtggcggtggatgagccggcgacggggctgcctcggtggagcgtggtggacgacgacggtcggctgcggcggaggacgacggtcggagagcgaaggtcgcaggcggggcggcggcggaggacggcggaggcgtgcggcggtgaaaaatttcggcagcctgacggcgccaaattttttagggttcccgcctggacttagaaattttggcgccgcgggcttgcccttatatagggcaaagatcttcgcaagcgggcggtccgcctgcgaagatcttttcaacaaactagtaattgcacataaaaatatttacacttttcaaatattactaactttaaatttttttaactaaattttcacaattcaaatggtaattgcacataaaaattagtacttagaaattaatatgcaaaatgttgagtacaattgttcgtcaatttgcgatacgatcacacatacgaccattacataactactaacttcttagatgtttatatgccactcaacaatcattaccctttaacatttttgcccacaccgtccgtgcgcatgtaaggcttcacggtcttctgagtagatgtctcgacattcttaatcttctgtacaaactgactataaagtggcatactatcatattggttgtaatcttcgacatcttcaaccccatccactcccaatatcttttgtttccctggtagcactatatctttcttcaaatttgaagggtctttcacataaaacacttgtgccacgcgattggcgagtacccaaggatcatccttgtgacccactctcgcaaggtcaacaacagtaagaccgaacttatcaacatttaccctgttcgggtattttacccactggcacttaaatatggggaattgcattgtgtgcccatagtcaatttcccatatttcttcaataaacccgaagtatgattgtttttcaccggcttcatcaattgcctccacacggacaccgctgttttgtgtacaggtcttattatctcgggctcttgtgctaaacgaatatccattaatgtcatatccctgccaagaatttactgtagttgatggaccacaagccaaccgcttcatagttatttcatcggtagtttctccctcaggtaagtctaggtctcgcaaccaatctatgaagagacgcttgtgttctttcattatccactcggtggagcgacccttattgttagctcgtattagttcgatatgttgatcgatgtacggctcgacgatagcaaactgatgaagcacgctgaagtgagcttcttggaatgatttgtgatcatgggtgacgaatctcttctttcctatcgttcccctgccactcaatctgccctcgtgttggggcacaggtactccaattgcatatccatccttgagataatcgatacagcactcgacaacctcttcagtactataatcctcaaccattgatccctctagatgtgcacgatttcggacgtaacccttcagaaccgccatgtaacgctcgtatgaccacatttgatggaggtacaatgggccaagcgcaaccatctgcggcacaatgtgaacaatgaggtgctccatcatatcaaaaaatgacggagggaaacacatctcaagttggcactgggtctcatgtgcgaatgtacggagatttcctaactcttcgagactaatgaccttctgtgacactgcgttgaaaaagtagcacaaccttgtgatagcaacctttaaatgctccggttttatggctcttattgcaattgcaagaaacacggtgagcaagacatggcagtcgtgtgaattataaccagataccgacaaatctttcattgaaactagtcgactgatgtttgatgagaaacctatgggcagtctgacattacggagtgagttgcaaaatgacttcttctccttaggtgtcagtgtgaaacaggctggtggaagatatactttgccattcttttctccttcttgagggtgtaactcttccctgattcccatctcgactaggtccatcgttgattgcagaccatctttagtcttcttcggcatgtccaacaatgttccaactatgttgtcaaacacattcttctctagatgcatgacgtctatggcatgctgaacctccagatctttccagtacgggaggtacttaaaaaatatggaatgcttcttgaatgggggagggagtttatcatctggcttcgaactgtcatcttgcttcttactatcccctcccttcgtattcttctcgggtttcttgcgctttgtcccctttgatggtttcttagtcatttttccaaactcgcaaacaattttctctatcattgcacacacattttctcccgatgtaggttttggtgcaggatcagtctcttcagtaccatcgaactccgccttcatcttacggtacttgtgatttgtgcgtaggaaccgccggtgccgcatgtacacaagcttgttggaacccgggagatacctataggacgttccattcaagcagatcacacatcctgttttacctttaatttgacctgaaactaaaaacattgctggataatcgttaatggtcacgaagatgattgccttcactgtgaagtattcccttaagtactcgtcccacactttcaatccctctttccataaatcggccatatcttccaacaatggtccaagaaatacgtctatatcaataccaggctaacggggtccctgtatgaggatacagagtagtacgtattttcgcttttgacaaagccaggtaggaagattatacatggtgagaagcactggccaagtactatgtgaactgctcatgtctccaaaaggattaactccatcagtactcagggcaaatctaatgttccgtgggtctttagcaaactctctatactgcgcatcaaaggttctccattgacgagcatctgccgggtgtcgaatcatcccatccttcttgcgcccttcttcatgccagtgcattagttccgcatctcgcgggtttgagtatattcgtgtaatgcggtctttcacaggaaggtaccacatcacaagctgcgggatttttctctgtcgtccctcagttgcttcagagggttctaggctagtattgctattcgacttgtaccagcttgcaccgcatgttggacattcatccaaagaagcgtactctttcctatacagtatgcagtgatttacgcacgcatgaatcttttccacaccaagtgaaagggggcatatgagtttctttgcttgatatgtgctggatggtagtgagttaggcctcggtagcattttctgcaggagttctaaaagactgtcgaaactggtatcagaccatccatgtctcgcctttaacctcataagttcaagaactgaccggagtgttgtgaaatcactgtcacagcccttcgactcatcgtacaaaacttcctttgctgccttctgtaaagcttcaaagttatttagccctctggccgaccccatcagcacctcgggttctgcattacgtaacattttctctaggtcgattttgtcctcaacagaaccatcgtcatgcaccatgtcttcaacttgtgtcggaactacattttcaggctcgtccacttgttcttcgccatgacgtgtccatatttcgtacttgtccataaatccgtgagttaccaagtgctccttcactttaaaagcatcgtcaaagtcccaggctatttcattcttacagtcagcacacggacaaattatcttcctcatattgttcttctcagcgtgaaccttggcaataccaataaatttagccacttcgtttctatatggagacaaaaacctcggccaatgatacatccattcccgactttctatatctctaaaaaatacacgtaaaatatttgcacaattaataccaaatttgtagggtttattgaaaaaacttatagctattcaaaactaattaactaaaggttaagttgtaaagtaataaaaaatcatagtttatttcaattttttttacacagacatgccaaattagcacattaggaaaatctaacaaaatcaattcatcggcatattacaaaatactataactattttttgattgcactgaataaatagacatttaaaatttttttctctctctatacatgacaagagctagatctagatctagaactaggtggtggatatgatagcaaaaaattaaaaaacaagaatttatgttaccacattaaaccactacaacaagaggcatcaagtattacacatacatctaacataaacaaatgacaagaaataaaattaaaaaacatggagctcttccttcaaaattttggatgcataaatccatcacaaattaaggtctaaaagcttaaaaaaaatgcatacctagtgtggaaatgagtagatctaagtaccgtagaaaaatcccccgaagatttgaagttcaaaacctcccccctatatttaagtcactttaggagagagaaacgtcggggagaatgaacagggctcggggaggaagaagactatataggggcatctttgcaggcgggccatataagcgtcgcctgcgaagattgatgccggcggggttctggctccgaattacgtgcacgcctgcgaaaatttatcccttacgacgccgaaaatgagattgctagtagtgttgcaccagcccttcccttattttataagtaaagagtaaaggagattaaaaaagtgtcttaagcggggtaggtttgttcattcctgaaggaaaaacgaggccggatttgttagcttggagagcgagttaatttaatgtctttcagaaatgcatttactttgaaatgttggttttaccatatatatccatttacgatcttaactattgcaaaataaactataaactatttgtgatttttttaacttgtcagacaaagtctccaatccatataggtttgttgccattcatgtttataataatatattcataaaaaatatttaaataaaacaacacaagtatatttattgtaaatctatgaatgcaattattcgcatagattatattatatcgcatagattgtatagacctgtgactaccatatgttttttgacacgtcatgaaaccaatcctactgtttgtcagttgcttatcgggtgacacatttgatgaaaacaagcgtaggaataataacaaaactaaaagaagagaggaacatcgtttctactcctttcaattcagattataagtcgttttgacttgggtcaaagttaaattgcttcaagtttgacaagtttatagaaaaaaagtagttacactttcatcacaagacaaatatattatggaaatatatttaatatatatatatatatatatatatatatatatatatatatatatatatattaattgaaactaaattactgttgtaaatattactatatttgtatacaaacttagtcaaatttaaactagtttgattttgaccaaaactaaaacgacttataatcagaaacaaagggagtactcttatttcttactagtaaaatggccgtgctttgctatggataaaagaaaatatattataatatgtaatagatattaaaaattatcgaatatattaatgccacttgcttacttgtttgaatatacagtatttacttgtttgaaccatatatttggactattccataatataaaaaaacaggagcctatttggaaaacagtgggggtggcagattcactaccaccacatctagggacttttatgtacaaccttcgttttgaatataaggatgtgtctatgttgtttatcaggtgtttgtcgaatacttatatcaaaagattcatttttagtcacttcagttgtcaatttttgaattttgaattatttagatatcatttacaagaatctgattacctatgcaatcactgaaatgatgggaatcaaagtaatcagtgcatgaatacttatagtgtggtaccaaagaatggagggagtgaataagaaatgcaacattcaaatattatagatgttactattaattgtcagatcacaaaaaaatacggcagcttattatagagggcacctttaggctgcgattcggccgacatgggcgctctcctcaacaagaaattccctttttccatcatgaaattaaagaacaacgaaggctagctagcaaaccagcaagatatattcagaagaacattgaagttcatcatttattcaccacatatatataaatagatgcttcctgacaaaagaaagcactaattatttagcaaccccacatagtcacacacacacagctaactatagtagcctagtgaccggttcttggggtcctaggatacccaagccagtagcagacaccaccaggcccattggggatgtccacgttgcagaacgccgggaggctcgccgccgcgcgctccaagtcccctctccggcagccggggaacacctcggccatggggtgcccggcctcggtggcgccgagctccctgtagatgcctgacagcatgtgatcgagcgccccgcacctgcaccagccgtcgtcgacggcggcgagctgccggcagcagtcttgccagacttgctcgtccgcggcgctggccgcgccacggccaacgcattggcgcctcaccaatgttcgacattgcgggagtgagtatgtcggatagcttattcctggccgacattgctcaccggggctgtagacttggtggtggtccgccatggtcgccatcgccgccgcgagcacggagagaacgacgaggagcaataccgagaacactaccttgttggaagccatattttgcttagtttgtgaaaaatcttaattaactgtgatagctaggctcttcgtctctgggtggttttatatatagctataaagaccaaagtgattcaagaacagatagaaattttttggctgttcatgagctatttatggatttgcttgtggttctgtatgaaacatctattgtgattcacacgcctaatctggggcatcatatggacaacagatggttaaagtggattgatatgtactacactctttaattatttgaatttgtttgatccttacgtggaagaaaataaatgctatatgtggctatagaaagactaattaaagtgattcaactttgaagaacggccacaaaattgttttagctgttcatgcgtggttagtatgctcttggggttttgcatgactggcatgagcaatttgcttgtggttttgcatgaaatattttttgttattcacggctaatctgagcattatatattttgacaaaaagttggtttaaagtggattgatatggaccacactctttaattatttgaactcattttcattcttccgtgtaagaaaagaaatgcacacaccgtcaacagacatatagtactatgggtaacaaaatcttttgatatttatatttatccaatttgtttaatgacgaaaaggatagttcaaagcaaattatgtttatagctacccgtggcatgattttgttgttatgtcatatcggaagtggtcttgaagtaataacaccttgatgtaatttgtaagatcaacaaagtttcctttgtcttcaaagaatgtttgctaatttgcaaaaggaaaaaagagtattgttagcttggggattgagcttaatgtttttccataaatgtatttattcttaatgtcggtttatcatatcgatgatgttagttatttcaaagtaaacaatactcattgggaaagactctgagggaaaaaattatgcgggatctttgatgaggacatcccagctacacttgacgtgaacaaggctgatggttacgttatacatcacatggagaaatttgaagatgacgtaaaccaagttgatggcttacgtcttagtaagaacgatcaaacatatcatggtccaattatgcacagccatgctaagaaaatacaactagaggtgaactcactctttgctcaacttaacccaaattttaatgagaattttatactacctaaatattctacctttgtcttgctaaggtttacatcggaagacatcattactacgccaagaaggatgggttatgttgaggatgacaagagttacaccgagcaggaattagcccatgcactaccagcagctgtctacgccaacaaaaagttggtttacgctacaaaggctcaacatccaaggcttgtacgacccagccagtcaagttacgggttgcatggcatacatggttggaaagaggggcatgtctagcttccaatgcttcaaaccccatctcaatatcactttccaataaaaagttagagcatttttactgaggactgcgcaggagctgaagggctgtgcgtgaacccgagaaaactttttgcattctcatttatgttagccttgatcaccagaacgtggcttcttatgttcacacctacgctaggaggaatgttcctagtataaatacacttctaattcatccattagacaacttttgttcaattgaaaacctcatgtatgagagattattgaagtctgcataagtcttaccctttttgttctcgtgagttcttttgggcttgtgagaaggatcctcttgtgtcccctagttcgtgattttggccctcgggcctcttgtgtggattagttctggattgtggttctgtaattgctcgttttgacgggtcagagtccaggaaacttcggatcattctcacactcaccacttggtcgcatccaaccttggcaggtataaagctagttatcctctagctacgagtagctagttaccctcttgtgtacaatttatgccggtgctcttttgcttcaaacctactaccgtgaagatcgggtcacctctcgcgattgcgttcgcaacaaccttggttattcgctcttctagaaatacttctatttactgtcggcacgaatcttcacgaaagcaatagcttacatagacatctttaatactatagaggcattgcaaaaatatcgcacaagtgccttttgaataatctctataaatggggaaacattttatagaatgtctccattcacaatgtgatttttctagaagcatttttatgtgtataagagagtggtaaattttaaagtgccaaaaagattgattctcaaacaaagtaaatttgtctctaaaataaaaaaagttccaagcaattattaaagtgcttctaaaatgtgtctctaggctatagaactcctaagtttagagatgatttcaaaatcagctatagaaaagtgcccacgtacttaaagtttttcatgtgcttggagcagtcatcacctcctacctcagctcatgtccccaaattctcaccttctctcttgtctcaactccccacctcccttccttctccttggccggaggcccaatctccgtccagagtgcaatccatgtgcaggggcagcgagctaccccaacttttcctactctctcccactacctaactctccttccatctaagctgaagtcccaatgtttggccagatgcgtagtgacggtgccaacgtcaactcatccaaccatggggacggccgtcaaatttgttaaggtttattttggttacaatctgaaaaaccgtgaagtattttgggattggtgaaaaaccgaggtcatgcataatttcttccacatactttaggaaaatatatcgtaataagaatttctaaaagcattacataaaaaaaaacttccaagaacaaaactaaagaagagaggaacatccattccacttttttatttcttattagtactatcacatacataagaggagaaaattatagatgctacaattaattgttggcgatctcaccaccaaattaaaatagtgcagattattaaagagggcacttttaggctgcgttcgagcgcaggagaaagagagaaatattgtttcgtttttcgcgcgcacgcttcccgaactactaaacggtatgtttttttcaaaaaatttctataggaaagttgctttaaaaaattatattaatccatttttgaagtttaaaatagttaatactttattaattatgtgctaatggctcacctcgttttgcgtatcttcccaatctcctcaatcccctccttctcaaacacacccttagtttgcaaaatccgcactccgtcagcatggatgccatgcctgccatcctctggccgacgcagcccagcagcggtgctattcggtcgacatgagcaccatgaaattcttttttttcacaaaatgaaattaaataacaacgaaatattgctacccaattggcaagatgtattcagaagaacattgaagttcatcatttattcaccatatgtatatatgcttcctgacaaatgaaagcactagttatttagcaaccccacagagtcatacacacagctagctttagtagcctagtgaccagttctcggggtcctaggataacctagccagtagcagacaccacctgtcccattggggatgtccacgttgcagaacgccgggaggctcgccgccgcgcgctccaagtcccctctccggcagccggggaacacctcggccatggggtgcccaacatcggtggcgccgagctccctgtagatgcctccaaccatgtggttgagcgccgagcacctgcaccagctgtcgtcgaccgcggcgagctgccggcagcagtcctgccggagttgctcgtccacggcgccgccgggtgcgccgtggcccacgcactggcgcttcaccaccgcccggcagcgtggcagcgagtacatcgggtagcccattcctggctgacaacgctcgccgaggctgtacaccacctggtctttgtggtggtccgccatggtcgccgtcgcggcgagcacggagacgatgatgaggagcaacgccgagaacactaccttgttggaagccatggctttttgtttgcagaaaatctttagtctgaatttgtatgagagggataggtttaaggtcttcatctattggtggttttatatatagctataaagactaaagtgatttaagaagggacataaaagttttagctgttcatgagctaatagattaacttgtggttttgtatacatataaaatattaattgtgatccacgcctaatgtgggcatcatatggactaaagttggtaaaagtggattgatatgcaccacactctttattaatttgaaccttccgtggaagaaaattaaagaaatgcacataatgtcaacagacatatatagttttgcatgcaaggtaacaaaatcagttcatctttatttccatggcttgtatagtgatccaaattgtggaacaataaaaagaatagttctgaacaaatactttaaaaagaatgctctggaagctgcagtaacgaaagctgcatcactagatttcagaaaattaagaaattaacgtgcctgatgaagcatataagtattggagttttctgaaacacaaatatcatatatatagatagctttacgcgcacgttggataacagggttatattaacaaggcacggcattatatatggccaggagaagtacgcacgcataatcactttgtttaaaaattaatgatacaaattaaatgttaggaatattttgtgctataactttgtcgacttgtaataaagtaaaaaatacgtgaggttaaaatataggtattatgtgaggtggaaggaagaggttttttatttcgtgacaaaggaaaaagaaacaagctagagggttgttagcatggggtgtgagtttaatgtccttcaaaatctatatttatttggaattgttggtttgaccatatgaatgaccttagtttttgcaaaatatactatactccttgtgttcctttttatttgtacaatcacgacatagtctctctcgccaattcattaatttttatcattcctattgataatcatatattcataataaacagttcaatataactacagttatagtcttttttttatgataaatcaatgagtgccatctttgaatattaaatcatattatatttttgcatctataagtgattaaaaaaataatcaagatttcattgcctcctatacatccaaaacagcatctatttgtgaacggaagcaacactttaatggcttaacaagtgatcttatttgtgcagtcagcgatatactctatctgtactctatctcaacaaaggagtatatgagaacccttttgttgtgtatgacatgtaggggtgaaaacagtacggaatttttccggattccggtcatgttttcggaaacggaatcggccggtcggaattttttcggaatttctcggaatcggaatcgaaaacggaaatattttctcggaaacggaatcgaatatgataatagcagtttccgtcggaacccggaaacgatcggaaacattccggaaaaattgtcggaatttccgaagttaaaaataccatagattcaatagtccataattcatccctagcttcccagcccaacccaaatcgcggcggcatctaccctaaccggctaaccctataggagagagaccgtcagactcagaactcagacgcgactcgcgagttggaggcggagcggcggctgcggcatccagatcgcggcatcgcggcgccggcgtgccctcacgcccaccgcccgtggcgccggcgccccaccgcccactgctggtcgcctggccggctggcccccgccgtcctcgctcccaccatctcgcgccgcccttgctcttcgtcgtttcgccgccggccgccgccaccatctcgcacctccgccggcctgctcggtccccgccatctcaaggcgccgtcccaccgcgtctcgccgtttcaccgtcgccaccaccgccgccgacgacggaacaaccaccacaccgacgaggcgacgacgacaccaccactgcagtctcttcctcaccgccaccaacgccgacggctcctcgcctcgcagcagccagcagcccagcggcagcatctgagcaaccagcagcagcaggtgtatatagtgattgactttgcacttttactaatgctctatcattttttttgaaggctaatggaacggaacaagagacagagacagtagaagcggaatgttctaatgaggatggcattgcgccaatggatgtttgaagaaaatgttggtcaatttaattttcaagttacatctaatttcaagtttccatttcaaattagtgtactcctgctgcacaagtggatgagatatgtttgaaccatgtactgatgtgttttgtgattgaactatgttttgtgatgaactatgtatttatagggtgatgtgttttgtgattgaactaagtactgaaacactgatggactgatgtgcgttgctgttctgtgatgattgatgaactattgctgttctgtgatgattgatgttgtgaccttaggtcacgaacaagatcggggataggccggaaagaagtgttttcccgcctatccttagaaacgagctcgaacagcaaacacaacttttgaggattacttttgtattcaagatgttttgtcctgctacaggtttttgactggcttttataaccagtggtcgtacacgtgagattacatttttacccctgtgggtctttgtaagtttactctaatgcccctgccacatcagcgtctgtgggggcattctagtacatctccaggggtcttttagtcttttaggtgctagctggcgagagtggttgaaggtggtccccacggaatcttcccttggcatcttctcttgttcgagtagtgctcttcctcgaactcttgggaaaaatgccttttccgtcctggaccgtcttcttcctcccgggaattcgaattcccctttgccttctctttcatccttggaaaacacctgtgaaattgtaacttgtccaaaatatgtgtagttgtattagcgattatggaatgtccctaaaaaggtgttcttcacccgaagaggtattttctattcgaatgagtgttcttcctctgggaaggtattttccctttgggaaggtgttcttcctcttggaaaggtagtttccactcaaaatgagtgttttcccttctggatacttaggtcttgcaaaacctcgtagtgttttgaccgaattggaggaaaaggtgtttgcaccctgctacaacaagcccctcacgggtaagggcgatgtgtgttttcggccgaaaccgtgcctgagtttatggaaaaagggggaaaaccgccgtcctcctattcggtcgaaacacactattcaaatatgcatatacgccacgtttactattcatttatttttattcttattatttttcatttttatttatttatttattgtgtttttttttgaatgccacgtgccggtatttcattggtgcgctcaaggggtcgcgtcgcttcgggtttcgtgtccgctcgtaaacccgcgacccttaccaccctgcgctatataaggccaggaggggtcgctatcacgtgacccacgccaccactcgtttgctctgccatcaactcgaaatcacaaaatactcgaactaaatctctttcttccttcttccattcgagttttggtgctttgcttgatttcttcctttctcactacacaacatggggaaaaacaagaaaactgcggaaaagtcgaagtccaagaaatcaaaaagccacgaagatacttcttgtggtattggtgcctcttcgattaaggaaaaaaacttaaacgatcttgttgatgttggttggatatctggtcgaaacgttgtaattcgaccagtgggagaatcaaggccttctcccaagctgggatacactcttgtgtttgaggatttcttctacgccgggtttaaattcccatgcagcacttttttggttgaggtcctgaaattgttcagacttgagtttcctcaattgactccaaatgctttagttcgaattgggcttttcgaatggatgattcgaagctgcggtgggacccctcgagctgaagactttgcatacttccattgtactcggcactacaccaaacagaactcgaagtttgggtgtgtaaactttgctcctcatcccaagcgcggaagtccatggccagctgtgtctgctattcgagcaaaatgggggaacaagtggcaatcgaagtggttttatcatcaaatccctctcagcctgctgaatgataaggattgtcctttttcgttctctgggaagaaaccgaaaactgtctccgagccatcagtctctttgtcgccggagttcactgccatacaacctcgaatcgaagaacttgtttcgaaatttagctgccgagacctggtggaagagtttgttcttctcaaaattagacctctttcgagcggctgggatatcactctcggagaaatccccgaaaattgcccttccagtcttcctccatttgtggtttcgtctgatcgtaagtttccttttcgaactgcaaaccttgtttgtcttgaaaaagtgatttagttaagaagatttattttctccctttgttatcttcttccttgtagttgtgattccagaggatatggtccgcccagttcgaaaatttcttggcccttataccaaggatgagcatttgaaatttttgacacttcaaaatgagaaaaggcaaaatcgggtcttcgcctctctaggctccgatatccctgtccgcgttcatcctgaaattgtccccaaactaaagaaaaagaaatctgtgaagccctcttcctctgatgatgatgatgatgttgaagtggaagatattgacgaagaaattggggaagaaaatgctgaagaagaagaaggcgaggaaggagctgatgaagaagagaacgactcgggtgatgatagcgactcgagtagcagttcgagcgacaactcgagcgacttgtctgaatctggtgatagcaaaacagttcctcctcctactgttttagctgatttgaaaaggaagaaaactgccagcagtcctcctcctgaaccgagttctaaacgagtgcaacttgttattgacagtgatgaagagttggatgaagatgatatccgtattgatctttctgctatccatgtcaccccaattcgagctgatgctagttttgccctttcggcaaaagaagtagcttcactgtatgttgttgccccaaccaccacggttgtcgagaaagattgctcgacccaagtgggtgatactgttgagacaacaaaccctcttcgagctgatcgagacttggttgcaaaaaaggcaaaaacgcccgtcagtgcagccgaaaagtccgaagcagggaagagtgctgctgatggaggtgttcgaactacaggtagttcgaacccaactccacctccgtcaccgccgttcatcgcaaccccttccccagagctgatacaaaacgttcttggtggttttagcgaacgatgcgcaaaagatggacattggcttatgggtcttcctaatttcaacgaactcggggaaagtagccatcatggcccaaacctgtgtttgaatgacctaaagtatcgccaccccctgagttcgattggtgatgaactcgagaaagttctgattactcctgatcttgaaaaggagtttttggaagaaaatgatcttatgtcctcttggacagcacttgatgtatctgctgcacaggtatttttatttatctatttatttatttatttatttatttattattattttctttttaacttaaaacctattttctgatgcgcagactgcgagccttgctcgtcttcaacgtggtgttgctcggaaagctcttcgagctctttgcacgcaacggaagaaatcacttgatcgcatcgctaaactcgaaaaggatcgggattatcttcgctgcaaacttgatcgaatggccgacgagaagaaaatcaccaccgatctcgtgcgcaagttaagcggcgaaaagaaagagctttccgaagaaaagaagttgcttactgaggaaaagaagaaattactcgctcatgtaaaagcattcgagcgaaaaatcatcgagtatcaagacgtcgcacgacaacgcgctgaatcagaagacaagatgaaggagcaagttgaggtcttggagaagaagaataaagaactcgaactcgcctgcaaaaatcaaagcgagaagatatctgctttagagctcgagagcgaaagttgccgccaacttcttctgaaaagttgcgagaccgttcgaatcacgttgcgaagtctaggggctgacatcagcttgctatcggaagaaaataccttagcagctgtgggaaaatggttcgaggaattttccattgggctaaaagatagcgttactccctttgcatctcgctgctcgaagactgctgtggagagcctttcggcctgtctgctttcaaatgggtgtgaacactttaccacccttaaaactgatatacaaggtatacttaatgatgaggccaaatttgcacagcttcgagatgcagctcaacccgtcgtaaaggctttccaagtgctttactggaagaagaaaggatatgaagataccctgaggtctctccgagcatctcttgcctcgagatcaaagtcacaaccggccagttcgagccaacaagataaagacagtagtactccgagctcgagcgcacaggtgtgacgttcgtgaaaagaatagttaaggatgcttcgtatgttcgaaaacaatgctattttgctgcttcaaaaccgttatggttgagagcctttattgtaaaaattcatctcttattgcatgcttttcacggaaattccctttctttgggggggctgcatgttaactcgaatcgaaaacttgtgattcgacgcaacaacactttgcctactcgaaatgtgaagcacttagcatttcgagaccctgcaaagctttcttctaccaggaccgccgtctccgatgacgaactcgaagcctgttatgataatacttgtatatttgcttttaagtttttccgatggcaacgaagccatcgacatgacagtttacgtgactttgtacttgagtttagggaacggcgttcgaacaatactcttgctagtaaagccttttggcaaaacttccaaccatccgaacgccaacgtagaatatggaaaaggcgttattcaatagttccatatacagtaatgccttctcctctcaacattgtttatcccgactcttttctttcttctttgtagagtttgtatgtaacttgttataccttcttaacatcaaataaacccttcctttcttcttttctttataaatgctctttatttcaattgttcaagcacccttaggtaaactacgtcctccttatctttggaagaagttacgaaatcgaaacgtactttatctcgtcacgtgcattttccgccttttgagctcgagcgaggggaaaatagagttcgagcattctttagttggttttttggactaaggcaaaatagttcgaaaaccgccgtcctcctcacctttcgaaggagtgacgaggtcgaaacgtattttatctcgtcacgcggattttccgctttttgagctcgaacgagaatagagttcgagcattcctgagctggtttttaggactaaggcaaaatagttcgaaaaccgccgtcctcctcacctttcgaaggagtgacgaggtcgaaacgtattttacctcgtcacgcggattttctgctttttgagctcgaacgagaatagagttcgagcattcctgagctggtttttaggactaaggcaaaatagttcgaaaaccgccgtcctcctcacctttcgaaggagtgacgaggtcgaaacgtattttatctcgtcacgcggattttccgctttttgagctcgaacgagaatagagttcgagcattcctgagctggtttttaggactaaggcaaaatagttcgaaaaccgccgtcctcctcacctttcgaaggagtgacgaggtcgaaatttgctagtcgaaagtattcgactcctagcgtgaggagttatattttgtcgactttgctagtcgagagtatttgactccgagcgtgcggagttctattttgtcgactttgttagtcgaatgtatttgactccgagcgtgcggagttctattagactttgttagtcgagagtatttgactccgagcgtgcggagttctattttgtcgactttgttagtcgagagtatttgactccgagcgtgcggagttctattttgtcgactttgttagtcgagagtatttgactccgagcgtgaggagttctattttgtcgactttgttagtcgaatgtatttgactccgagcgtgcggagttctattttgtcgactttgttagtcgagagtatttgactccgagcgtgcggagttctattttgtcgactttgttagtcgagagtatttgactccgagcgtgcggagttctattttgtcgactttgttagtcgaatgtatttgactccgagcgtgcggagttctattttgtcgactttggtagtcgaatgtatttgactccgagcgtgcggagttctattttgtcgactttgttagtcgagagtatttgactccgagcgtgcggagttctattgcaatcatacacagaggcatgttttttatacaggttcgggcctccattatggataaaaaccctacgtcctgtttatatacattaacttggatatcattcgtatttacatctgagtgagtatactacaaactcgagctcccgtgttctcctttttctctttctctctctctctcctttttttttaggcataaaatttctttaaagaaatagcattccaagtatgctttaactcatcaccatcaagatatgctaacttgaatgctcccgtttctgtcttctttttgactatgaatggtccttcccactttgactcgagttttccaacagctacctcattgagcactttcttcaagactaaatctccttcttcaatcggccttgtctttactttttggttgtaatagctctttgttccttctgtgtatgatgccatcttctccaaagcttcaacccttatttcatctagcatttcaagagttatgtctcttccttcttcatctttttggtcaaatatcattcttggagaatgtgcccctacttcgcttggagtcattgcttcatcgccataaaccaatctgaaaggggtcatgccagtcgaccttactaccgtagttcttagtgcccaaagcactgatagcaaatcctccggccattttccttttgctgatccttctaacctcttcttgatagcttccatgattttaccatttgccctttccacagctccatttgtctgaggatggcctacagaggcaaagttgatttgcaaattaaggcctttacacatgtcttgaaattttccagattcgaattgctttccattgtcacatactatttcccttgggattccaaatcgacatattatgttcttccaaacaaacttttgtagtgctgcagaagttattcttgccactgcttctgcctcaatccatcttgaaaagtattcaattgcaacaatgataaagcgcaaatctcccttcgctcttggaagaggacctactatatctattccccatctgtaaaaaggccagactggcggaattggttgcagttctttgggtggtgcttttgtcattgggccgaacttctgacatgctttgcacgtcttgatgtatttctctgtatctttcataattgttggccaatagattccttgtcttatgacttttgaagccactgaccgtggtgcttgatgagctccacacaagccttcatgtatttctaccaccatcttcatgccttcttcccttgttacacactttaacaaaggagcagtaactccacttttatacaactgtccctctaccaccttgtattttttggatgttagttgtattctctttgcttcttcttccttttctggaagttgtgcactggcaaggtatttcaagatcggttctctccaatctccttctctctgtatgcatgctacttctttcttttcgtaacttggctgggtgattatatcgaaaaatgaattttccaatggttgacctgttgcggctgccttagctagctcatcagcttctccattttcttcccttgttatggcttttaccgttattcccaagaaatgtttctcattcagccttgcttcttccagatatttagccatagtttcctcctttgcttcaaaggatttggaaaagtgacctgctaccaactttgagtcagttttgactattaaccgccgagcccctagcgctcttgcctttctcatagccaataaaacgccttcatactctgctgtgttgtttgttgaaggaaaagctaattgaacagaatacttcaacgtttgcttcattggtgttttcacaactgcagcggctcctgctccggcggcattgcatgctccatcagagaatactatccatggtttttcgacttcttcctgttgttctacctcattgggagtccattctgccacaaaatctgctagtacttgtgactttatggctgttcttgatatgtatttcaggtcaaaaggtaagagttccattgcccattttgctattctccccgcgacttccttgtttgttaacacttctcctatcgggtatgccgatggtattgttatgtcatgcgacagaaaataatgcctcaactttcttgaagccatcacaattgcataaatcaacttttctacttctgagtatcgtgttgttggtccttgtaatgcttctgagacaaagtataccggcacttgcctattttcttcttcttgtaccaaaactgcgctaactgtcgctggagttgctgccacatacattaacagaggttgaccttttggcggacttgctaatgttggcatttcatgcaagtatttcttcaagtcctcgaaagcttgttggcattcagcagtccactcgaaggtgtttgcccccctcaaagtcttgaagaagggtaatcccttttctgctgatttagataaaaatctactcaaagatgccattcggcctgtcaatctctgcacttctcttgtgttttttggcggctcatttgatggattgctgcgattttgtcaggatttgcctctattcctcttttggacaccaagaaaccaagtaactttcctgctctaacgccaaaaacacacttttctggattaagcttaactgagcattttctcaggttttcaaatgtttcttgcaaatctttgccatgggtaaatgcttgtttactctataccacaatgtcatctacgtatgcctcgacattccgtcctaactgcttagccaagacttttcctatcagcctggcaaaagtcgctcctgcattcttcaaaccaaatggcattctgataaaacaataagttccaaatggtgttataaatgatgtcttttcctcatcctccttcaccataaaaacttggtgatagccagagtatgcgtctaagaaactcattagttcgcatccagctgtggcatctaccaactgatctatccgtggcaaaggaaaatcatcttttgggcatgccttgttgaggtctgtaaagtcaatgcacattctccacttgccatttgccttctttactaacactggatttgccagccattctgggtgcatcacttctcttatgactttcgccttcaacaacttttcaagttcaatttttgcagcttgttgtctgtctatagacattcttctcaatttttgttttttgggcttgtatcctgacttaatcgctaggttgtgctcaattagacttctatcaactccctgcaactcatctggtgaccatgcaaatacagccatgttttcttttactacctttaagatttcttcctcaacatgtttttccaagttttctcctatcagaatgaactttccagggtcatgttcatccaactgtactttctttgttttcccttcaggaattggcttttgtatttttatgtattctccctgtttttggtcaaccacatgtactcctttcacacttggtgttccttaaagctcatactttcttcctgcaagctgttctcctcggaccgttattactccccttggtcctgggagcttcatacatatgtagttgtggtgtattatggcctcaaaaatattgattgttgaccttccaagaattgcattgtactgatatggcatatcgaccacatcaaatactatctcttcttttctcacattagtgccttttccaaagaccacttgtaaagatatttttccaattgcatgtacttgttgtccaccaaaaccttgtaaaggtactcatgcatttgttaacctatcttctggtatttgcattttcttgaaagcatcataaaacaacacatccgctgaacttcctccatcgattaacactctttgcacttcgcattgtgctatttccactg

SEQ ID NO: 6307 - DNA, 44935 bp, Oryza sativa
tactgaaacactgatggactgatgtgcgttgctgttctgtgatgattgatgaactattgctgttctgtgatgattgatgttgtgaccttaggtcacgaacaagatcggggataggccggaaagaagtgttttcccgcctatccttagaaacgagctcgaacagcaaacacaacttttgaggattacttttgtattcaagatgtcttgtcctgctacaggtttttgactggcttttataaccagtggtcgtacacgtgagattacatttttacccctgtgggtctttgtaagtttactctaatgcccctgccacatcagcgtctgtgggggcattctagtacatctccaggggtcttttagtcttttaggtgctagctggcgagagtggttgaaggtggtccccacggaatcttcccttggcatcttctcttgttcgagtagtgctcttcctcgaactcttgggaaaaatgccttttccgtcctggaccgtcttcttcctcctgggaatttgaattcccctttgccttctctttcatccttggaaaacacctgtgaaattgtaacttgtccaaaatatgtgtagttgtattagcgattatggaatgtccctaaaaaggtgttcttcacccgaagaggtattttctattcgaatgagtgttcttcctctgggaaggtattttccctttgggaaggtgttcttcctcttggaaaggtagtttccactcaaaatgagtgttttcccttctggatacttaggtcttgcaaaacctcgtagtgttttgaccgaattggaggaaaaggtgtttgcaccctgctacaacaattgatgaactaagtgttgatggactgatgttctgttgttgttctcaaacccatttcctggagtgataggctgatagcagtatagcacctgaattgtgtataccttataggcttataccattctgttttgctgtattcttttagaatatttgttatgcaaattatatgaagttatagaagaatatattttgctgtgagactcagtttgaggggtttatgtattccgataaattttcgttaccgtatccgcgccggttcgttttcgctccgttttcggttttgataatattcgtttccgttttcgttttcggggtttccgatttcgattccgattccgaaaaaaaatatgaaaacgaaaacgataaaggttgtttccgtccgtttccgtaccgttttcacccctaatgacatgcacgcattatcatacatccatgtctactaaatttttttttcaagtttagtttgcacctataaaaattaaaatctggaaattcatttgcacgggcgagtacttaagagaacgcaatgttgaaattgatctccacggctgtcggtatatatttacaaatctcgcgaatttcaacgttacaggccatatagtcagcctcgaaaatgcccatgtaaacgaactagctatcggcggtctacacaaacatttttttatagtgtcatggtgacactcattttttctcaccttgaaaattataaaacaatgaagcgtagcaaggaaatcttcatagagatataaacagaagaacatctgagttcatcatttattcatcatacatgcttccagataaaaggaaacacaaattatttagtaaccaaatcacacacatgaacagccaataactagctacatacagaaggctagtagccagttcccggtagccagtagcagacaccgcctacgccattggggatgtccacgttgcagaacgccgggaggctcgccgccgcgcgctcgatgtcccctctccggcagccgcggaacacctcggccatggggtgcccagcgtcggcggcgccgctctccctgtagatgatcctcagcatgtggttgagcgcatcgcacctgcaccagctgctgtcgatggcggcgagctgccggcagcagcctcgccggacctgctcgtccaccgtgccgggggcgacgcactggcgcttcacgaacgcccggcatcgcggcagcgggtacgtcgggtagccgattcctggctgacatagctggccgggagtgtagaccacctgttcttggtggtggtccgccattgtcgtcgttgctgcgagcacggagacgacgacgacgagcaacgccgagatcactaccttgttggaagccatttttttttgtttgcagaaattcttgattgttaatttgtatgagagggatagaagctctcccatctatgggtggttttatatatagctataaagactaaagtggttcaggaaatggagacaattttttttggctgttcatgagggattagcttgtggttttgaatgaaaattttgttgttattcgtacgcctaatctggcatcacacggataaaagttggttaaaggggattgatatgcaccacactctttaattatttcaacttattttgattcttccgtgcaagaaattgaattaatgcacacattgtcaacagacgcgacgcatagttatgcatggtaacaaaatctgttgatctttagttccatggcttatatggtgatccaaattgttgaacaagaaaaacaatagttccaaacaaatattttaaaagtaatgcctctggaagctgcaacagtagacgtgcctgatcaagcatatatatattggagttatctgaaacacaaatttcatatatagatagctttaatgcgcacattggataacaggttatattaacaaggcacggcattatatatggctagaagaagcacgtacgcaaaatcactttgtgaaaaaatgatacaaattaaaggctacaaataatttgtgctataatcctgtcgagttgcagtttgtgccagccctttttttaaagaaagtataagggatatcaaaatataggtcttaagtgaggggcaagaaagagtttgttattttgtgagaaaggaaacaaaataaaacaagagggttgttagcttgggtgtgagtttaatgtccttcaaagtgtatttgttttatctgatcgatgatcttaattattgcaaaataaacaactcattgtattccttttttactcgtcatacgtaccatctcgacacattaattctcaccagttcataggtttttgtcattcgtattgataattatattaataaaagacagttaaatataacaataataaatattcatattttatttttgtgtatattagtgagttaaaaagaaatcaagattttgttgcctcctatccaaaacagcatttttccatgaacgggaagtaacatatatatcaatagctttacttatattttgttcacgctttcacaattgacatatttgtgtagtcatcgcagccattttttctatatgtatacttcgttgtaatttatttttttgctggcatgcagtatatgacaaagttattgtgtatggcttttacagacgtcatgaaaaagaacagaatgtccaagaagcagttggaccagagaaaggccaaggcgaacttgataagatctgaaatggactgtgctgctacaagggtggcaaaggggatgctttttgacaggtcatgaaactagtccccgctttcacaattaacaagccacgtaatagaaattactaagaacattacaaaaaaaggggaatttcaagaacaaaataatagaagagaggaacatcgtccattccactttttattacttattattgtcatcagatatatggagacgcagcaatcgtggatgtgaaaattaattagtcggctggctagtgctagctagtaacaagctactcccttcgttacaaaataagattatagaggggaccttcaggttttgcaatacactaatacacaaacgatttttctatactagacttcatgaatttttgcaaacagaccataagtgatggcgtatgcaaaaatcgaccttcatttttgcatacgggcgtcttaagaagccgtatgtgaaaataaaatttgaaaatttaaaaatttgaaactagtttatctcactcgtatgaactctaaattggatgattctttttcctaaatgtttctaaaatcatactctatcatgttattgtgttcttttgctattattttggccatttttccttgtgacttcgttttataaattaaaaatttgaatttcaaaacttcaaataatattttgaagcagtaaataactttagtcgaaaagtcatcaacaacaaagttgtataactcatcaagatctataacttttattttggtcatttcttcatttgatgaagtgatagtaatattttcacaaaatttacatatctctcttatagtttataaaaccatatgagagatatgtaaattttatgaacaatgttactgttaatttgtcggacgaagaaatgaccaaaataaaagttatagatcttgacgagttatacaactttgttgttgatgatttttttcaactgaaatcatttagttttacaaaatgttgtttgaagttgtcataatttgaatttcaaattcaaattgttgaatcaaagtcatatagaaaaatgaccaaaacaaaagttgtatattttaataagttatacaaccttgttagtgatgtatttttcatttgaaatcatttactacctgaaaaattatttaaatttattatattttaaagttcaaattttagatagttcaatcaaactcggatagagaaatgaccaaaagaaaaatggtagatctcaatgatttctacaactttgtttttgacaactttttcacatgagttgatttagaaccataaaattcgattcgaatttctcatatttttacatgcagccccttaagaggttcgcatgcaaaaatctacttagattttttcatgcttaccttttaagtggtccgcatgcaaaaatgccaccccaatttttttcatctccctccactctcttttcccttccaccacttcaattttttttcaacacatctcctctctctctccccctctattatttaaggcaaattttgctacaggacacttgttatgtgtggttttagccccaggacactgcccaaactcacttttgggtgaaaacactccgtaaacgtggtaatttaccagtggacaccacgccgattaaaataatgctttctctcagagcgcgcttgcacggggtggcgtcggtcacggcaaagatggcgaggatggcggctggcggagtggagcggggtggcagcggcggtggacgagcgcgtggccggtggagcggcagtgtcggccaagcggagtggcagcggcagcgaccaagtgcgcgataggagtcgcggcggcgggcggctggcgagagtggcgcacaccccatggcgacggcgatggcgacgcaagctcccacgtcggctgatctctttggcggcggcggtggtattattttaatcgatttttgacatttcacgcgatttctctctcctctccaaccggaaagtattattttaatcggcgcggtgtccactggcaaattaccacgtttatggagtgttttcccccaaaagtgagtttgggcagtgtcctagaactaaaaccacatataacaagtgtcatgtagcaaaatttgccattatttatttttactctccccctctctctctctatctccacggatctgtcctctccctctctccccctccctctctgagagcgggtgccggtgaccgtgagcagggacggagatggcatcggtgggcggcggatccagcggcgccgccctagggagcggctacggctacgacgacggcgggcgcacagcgggggcggcggatagatccggcgagtgggcggcgacgcgggcggcggcgccgtcccgcgcagatccggcgccaagggctcttctcacccgcgcgaacagtggggccggcggtcggcgtcgacggcgggtggtggggtagtcgatccggtgatggcgtgcagcggggatacggcgctccggcggcgggctagggttcgggtttgttggtttttttttccgtgattttattttcgcatgcggctggtataagcgaccacatgcgaaaatcccatttcgcatgcggttgcgccggccacatgcgaagagcgtcattttggcagatcttcttgcccatgcggttggcaaccgctccttctcgcccgtatgcaaaaaggggttttcgtagtaacgatagccatactccgtcaacatatacaccgtgctggcgatcctctggccatcgcagccctgcaggtagtgccaccatgcggccgacacatggacaccctccttagcatgacattccatatttctcgtcatatcaaagtttaaagaagtaaagaacgacggcagatagctagcgaatcatcaagacatatacagaagaacatgggagttgttcatcatttattcaccacacatgcttcctaacaaaaggaaacactaattattttaggagtaaattgcattcacggtatatcaacttggcaagtggatacaatttagtgtaagataatatctacgggagcaatatattctaagataatataagacttgtgcaagaggttcttattgccatctatggatgagggttatgcatattcttgccaactatggccttgtttagttggggaaaatttttgagattggttgttatatcgaatatacagacacaccactggtggagaaaccatctttcgtcggtcggccgaattccacaatagtcccggttgcaataaaaaccaggactgttgacgaaaaaatcgaacacaccagcctgggagatcttcttagctcctgtgcaggtccaaaaattgatgagatgcgggcgtgccagtcagtttgatcctgcaactgacaagatatgcaaatagtagatcaaaacagccgaacggctgacaagccgatggagtagttccagccgatgccgataatagccgatgccgataccagccgatagcgataggatttaagcaatcggctatataaaggcaatcggctactgataataaaatataacaataatatagtccagtataaaccaatcggctagcattgatatgatagaataagcattgatatgaaggttagagcatacatcagctggaggtccgatgtcatgacatccacaagattagattaaacagtgaagcctttgttgtcatcggctaaatccaacttatatgtatatgcaattcttatgagccgatgcaacatccagataactcaccggctgaaaccccgatgaaacccttattggcaatcaagaagcaggctagatattatggttctaagcacgacatagtagatcaaacttaactgatacagcactaagtatgaaaagaaacataatatctagacaatcaagccgttgactgagttttcagggtggtagatgtctaagctaatctaatctagcaacgggatttagccgataccggcagaaaccctaaaacgagaagtagtcgatagagctaaattgatatgctaagactagattaacagagacatatgataaataggtaggcaagtatatcatccaaaccagagcaatccaagaggtcgaatgtactgatgcagccttgaacgacgccgatgtagacgatacaattgcctgggctggcggaacattggacttaccccttagccggagatcgaacaccgatgcagccccgcgtcaggtgccaagtcccgccggacaataaaataaagtagaaaaggtaaaaggtggcgatgcgccgaattgtattgatcgtggagatagattacatagaccctgggtgtacatatttatacccatgggttgatacaagtccttgtcggacaagaaagaagctttcctaaagataaaaggaaaagataaagtccttataggacactaaacacactttcctaaagataaaaggaaactaacaaactatttctaattaatagataacttgccatgccgcattctctttgaactcggtcttttctggataagcttcctttagtagatcaatttccttaaccgaatatagcaagaatccgacaactaacgacttgacaactctcatcggctaatcgcaggacttcgaagccgatgctgactctaagccgatgactactccgggtttaccaaatttcactgttaacaggcgttaaagatgatctttagtcccggttaaaaagggtaacgggcatatttgatctttagtcccggttgagtcagggcctgtcaggcccccccccccccccccgggatctttagtcccggttggtaacaagtatctttagtcccggttggtgttaccaaccgggactaaagatcacggggatctttagccccagttcataacactaaccgggactaaagtctcacccttagatattcgtcttcttcctcctctagctgcccgagcaagcttcaaaatttcttcaaaaaagaggggaggtcatgccaaaatttctagtgaatttattttggtgattatatacaaatcggaggtgcctaaaaggttagcaacttcattctccaatgttttctttgtcatattatatttggagctatgttttgcacacttttttgtctccaaaatttagttgtaagttgatgagagagaaaatttgtgtggggaagaaagaatatatagaaatttagtttatttgctaaagaaggttttataaaatagttgagaaggaaaatatagtgaaagttaatcttaaataatagaaaacaaactaaaatgaaaattaaaagaagtacaacacattaatattagtttaaaactttagaaatagtaaataagaattatttggtgtaatattttataatttttgtatgaataatgatatgtcattattgtatgactgttgaaagagtttgtaattattttataattattgtatgactgtcattattgtaagaataattatttgtgtacaatttttgttcatctcatgtagatggatcggcaatggatgtacgctgaccggtggtccaaagaggttattgacggcgtgcgttattttttgagaatggccgaagctaacaggcataagggttttatttgttgtccatgcaataagtgtaagaatcagaaggagtattctgcatccaggactattcatttccacttgtttgagtcggggttcatgccaagctataactgctggacatcccacggagagcaaggggttgaaatggaagaagatgaagtggaagacgacaatattccggactttggtcaatacgctggatttgaaggaaatcaaacggacgaggaggaaagggatgttgatggtaacgacattgcggatgatcttggttagatgttgcaagacgccaaggaggactgcaaaagtgaaaagggggcccataaattggacaagatgttagaggaccacagaacgttgttgtacccaggttgcgagcaggggcacaaaaagttaggataccactctgaagttcttgcaatggaaggccaaaaatggttttagtgacaaggcatttggcgatttattgaaactcatcaaggacattattccggagggaaacaaattgcccgagacaacgtacgaggctaagaagatagtctgccctctatgactggaagttcagaagattcacgcatgtccgaatgattgtatcctatatcgcggtgaggagtacgagaacttagaagcatgccctgtttacaaagcactacgatacaagattagacgagacgatccaggagaagttgacgggcagctaacaaagaagagaattcctgctaaggtaatgtggtatttccctataatataacggctaaggcgtttgttcaggaacaaggggaatactagaatgatgcgatggcacgctgaagagcgtcaacaggacgggatgctgagacaccccgccgatgtttcgcaatggcggaacatcgaaataaattttaaagactttggaaaggacgcacgaaacatacggtttggtttaagtacggatggcatgaattcttttggagagatgagcagcggccatagcacttggcccgttacgatgtgtatctacaacctcccccctggctatgcatgaagaggaagtacataatgatgctgattattattcaaggccccaagcaacctggtaacgacattgatgtatacctaagaccaatggtcgaagatcttaaactgttgtggaaaaaggaaggtgtcccgtgtgggacgaggacaaacaggaggagtttaacctacgagcgctgctgttcgtaaccatcaacgattggtctgcacttagcaacctttccggtcagtccaacaaggggtacaaggcttgcactcactgtatggatgaaacagaaagtacgtatcttaagcactgtaggaaggttgtgtacatgggtaatcgtcgattccttgctgcaaaccacccggtacggaagaaaggcaatcactttgaacataaggcggaccaccgtgcgaagcctaaacatcgcagcagtaaaacaatgtttgctatggttaaagaacttaaagtagtgttcggaaaggggcatagaagccagcctatagagagcgaagatggtcacgcggcgatgtgaaaaaagaactctatattttgggagttaccctattgggaattcttggacgtccgccacgcaatcgacgtgatgcacctcactaagaacctttgcgtaaaccttcttggcttcctaggtgtatatggaaagtcgaaagatacactagaagcacgtaatgatctaaaccatatggaacaacgcggcgaccttcacccagaaccaaaggagaaaggaagccattacttgagtccagccagctacactattagcaaggcagagaaggaaagtatgtttgaatgcttggagcacataaaggtaccgtctggatactccacgaatatcaagcgaataataagcacgaaggagaagaagttcacaaacctaaagtctcatgactgtcacctgttgatgacacaactgctaccagttgtaataaggggtatccttccagactatgtgcattcatgaacacaatttcgcagaaggtcatcaatccggatagattagaagcccttcagaatgatgtggtgcattgtcttgtcagttttgagtcgatatttccaccttcatttttcaatataatgacgcatctgctttgtcaccttgtcaaagagatcagtattctcgggcctgtgtacctacacaacatgtttcctttcgagaggtacatgggcattctaaagaagtatgttcgtaaccgtgctcgtccagatgaaagcatcgccaaggggtatggaacagaggaggtcatcgaattttgcataaaatttattgaagacctttgcccaatcgaggtacctgaatcacgacatgaagggagactatggggagagggatctctcagaaggaaagcaataatggcggtagacaacaatttattccgtaaagcccatttcacggttctgcaacaatcttcattggtagctccttacatcgaggagcacttggctctagttcgcgtcataaacatcggtaagtccgatgcatggattacacggcatcacattgatactttccccgcgtggctacgacaacatctcatgggtaacgagacgatcaaccaacaacttgtgacatcccggcctagggcttaataggattaatagaatactcatatcaacaagttgcaacttcttttccggaagccggtctcgaaagaactcttaggttaagcgtgcttggcctggagcaatttcgggacaaagtgtgcagaaaacactcactagtagtgtgcacgagtgaggacaaagtgtgcagaaaacactagcgttggtctgtgagggtagtctatgtcctagggaagctgctagatgtagagagggcccggtctcggagagtgtggggcgtcacacaactggccttcctggcggggcccggtctcggagagtgtggggcgtcacacaactggccttcctggcggggggaccatctgggtcgatcacgacattccaaggatggattaggttgactggtggaggtgtaatgattgatgacagtgggatgacaacggttgaccttaacaaggttggatactcggacaaacattttgtccttgccaatgatgtaacgcaagtcttttacgtgaaggacatgtctagcaaaggaaagaagggcagaggacctgacgagccgaagcgtcacgtggttctcccaggcaaaagaaaaattgtcggagttgaggacaaaactgacgaggattacgatcagttggatgggcaaccccctttcacggtgacgattgaccctagcatccttctatcaaatgaagacaccccttactcacgtagcgatcacaaggagggaacaataatgaggagaaagtacgtgcggtcaaccgtcaccttcgatgtattgccgtaattattgtgtacacgatgtaatctattttggatgtattgattatccatataaatcaattgttgtatggcatatgttaattacgtacgatgattagaggtttgaacaatattaaatcatgtaattgctagttatatgcgataattagaatttttaaaagttttaaatcatgcatgtggcatttacatatgttactgagagtttttaacaattttaaatcatgcatatgctagttatatgcgataattggaatttttaaaagttttaaatcatgcatgtgacatttacatatgatacttagagtttttaacaattttaaatcatgcatatgctagttatatgcgataattagaacttttaaaagttttaagtcatgcatgtggcatttacatatgttacttagagtttttaacaattttaaatcatgcatatgctagttatatgcgataattaggatttttaaaagttttaaatcatgcatgtggcatttacatatgttaattagagtttttaacaattaatttaatatcattcatatgctaattatatatgattatttgaatttttattaattttaaatcatgcatgtcgtatgtatttacatatattaattacagtttttaacaattaatttaatatcattcatatgctcattttatatgattattagaatttttattaattttaaatcatgcatgtcgtacgtatatacatatgttaattagagtttttaacaattaatttaatatcattcatatgctaagtatatatgattattagaatttttattaattttaaatcatataggagtatttgcttactacgttttatccacttaatgtactacagacaacaataatttttcgaagtaattgtcattaatttgaacacattattttctattttagaaacacatatgtaatggaaattaatattcagtgcgcttatcagtagtcccggttcttaactctaactgggtttaaaaagaaattggaaatagcgggaaaatatctttactcccggttattctcatcaaccaggactaaagatctagaggtatatatattcccgatgcgcgccttcgtcttctccaccaacacttagaagttttttccccaatcaatttctctctcggcttctccttcgccgccactacctagagcatccccgcgccgacgccgccgtcgtatctcgcggtcgtctcgcgcgcgttgtcgttgccgcctccgccgccgtcgcatctctggggtgagagccgccgccacctccctctctctctccgacctcgatctctctctctccccaaacagccgccggccgcctcgttgccgacgccgccgccgacgtcgtcgcggccgaacacgactccgccgcgccgatgatgactaacttgtcacgcccggaaattcactagtaatttccgaacttatttgtgcataaaatcctcgtccaggaatcagccgaggtacacaaactgacaatttaatatacagattcatcaaattagctaaaacgataaatacttacttaagaggcacttagtcctcaccatgaagaaaactgcagcggaaaataaaatctagcgaagctccggctccactcccacaggcagctcaactggggtataagccaaacgtcttctccttctggatcattttcttcaactgaggttgattgattattgaaagaattagcatatgacatactcaacaagccacacagcaaatatgcaagtgcacaaggataccaaaggatggcataatataggctcatttgcaaaaacagcatttagcaaaacatttaagagaagtaaaacagtggagtaattaatcagaaattttaatcaacactgaacaacatacccatgctgcacaggcccaaccatcctgaacaaccatacccggctgtacagatctaactccaaaccaggagctaagcaaattattaccaggtataacatccataattattgtgagaggtgtgagactaatcacgaaaaacattgctcaacccgcccataaccgcgggcacggctattcgaatagttttactctggccagaggtgtaccactgtacccacaagacacagccccacgacatgtcacaatgtgcctcagtaccaccacggtacctcggaaaggagctgtgacattaccccttgcataacacaacccaccacagtgcaccgttcctggatcataatcaccccctcaaaaaccagaggcatggactccccagcgacccccgtgggcttatctccgccacttctcagtctggtgctctgcaatgaaccatgctatacgaaaggtaaagccgttgcccacgctggcttgtggttggcacggttaatgtttcacaacagtagctcgcgaaccggtccttaattgccatgagcacgactctcaaaaccatgtgctcacaacccaccattatcaagatttagttggcaagtaattaattaaccaatcacgattgaccatcgtgaactatcattaagccatcattaaataatagtgagtcataagttatcccaatagtgtgctaatgtttctaagcatggctaagcaatcataactaatatctagctgaaccaatatataaagcccaactagtcaagttataataacccaaggtatcaaggaataaagtaatcaatgcaaacaggccataacaaaggaataggttcacaccacccagtgacattcgaaaataaatgcacagttgaaataaatagagaatttaaatataggatcaacatgctcaaaggattgtgtttaggatctgtgtgacttgccttgcaataatcggtcttcaattaatcttcttgaatacttccggcgcactcacgaacctccgcaacgacggaaacgacaagctaacacgcaaaacgaagaaaaaggctaataaaaaccaaataaacagtacatataaagtaaacaaacatgtagatcatgattttagatgaatttagcaacttgaaccactcaaaaccgagttacgatgatttagttatgaatttccgaagatttaatctattagaaaaacaggaaaaagaaaaacgatgatgacgtcatgatgacctcatcaatagccggaccaagatggcgacctcgccggagattggatggtcggctgcgactttggaggacatgtacacgtagaggacgacgagacgaacccaacggtactcaccctcgaaccaaacgacgaacgacgacggccgacgacgaggtctagcggcggcgcggcttcggtcgacggcggcgacggggctccggtgatcggcaacagcggggagagagcggccgggcttctccacacctcggcgtaccttacggcggtgacggcggccggcggcgacgacggaggcggcggcacgacgcggatggagctcggccggcgacgacggcggggtggagcacgtggcggcggcgctacgaggcacgggagaccacgggagagggggcacacgaaagaggaggactagggggtcctatttatagccttggattgaagagatcggactcctcccgcaagaaatcgatccgggaaatcaaaaactcggttttggagataaactcgaaaacgagttcgattcggataagatactcaacgattagctccgatttttgggggtaaagatagaggaggataagaggaatatttcccctcaactaattttagaaaaaggagcaacgagaggcgagattttggaaggggatcggcggcaacaggcacggcacggctctgctctggctctgtccagagctggaagatgaacagtagcgcagggaggaaaagtagacttcttgccgggcttttcttttctcagcctgtttagaagagggagcaataccagactttggctaagagaagaaaagagaggatgcaggctcgggttgggccggtggaagagagaggaaggaaaggaaggaatgggccgaaaatggcccaagctgaggaggaggattttattacttttccaattaaaataatcacttaaatgatctttgaattgttaaaaatacttccaatgctcaaataatttcaagaaaaatcctgaaaatacttggacactcaaagtacataaaaaattacaattagaccatttaatgattaatttaatatgtgggtaattacttaaatgctctttgtatgattaaaaattacgaattgagctccgaaaaatccgagaatattccagagagtataattaaccatggagaatttaataaaaattaaatccatccatgctttatatttaggaaattttatttcccacatttaacttcacttgtaaattaatgaacatttaatataaattctaataataatttattaaataatttataaatcctgaaacaaaaatcaggatgtgacaccaaccctgacctcgatgctgccaccaccggcgacgacgtcgcgccggcagtgccgacgaagctgcgcgcaccacaacgccgggctgcgccacgcctccgcggcggcacgacgccgagacaccacgacgccgccgcggcacgccctcgccgcgccgccacgccgccaccgcgcaacgccgccgctgcgccacgtcgatgccgcgccgccacgctgccgccgcgccaagccgcagccgcgccgccacgccgccgctccgctgccgccacgtgaacgaacgaacgatcgtgaacgagaacgaatgaacgaacatgaacgagaacgtgaacgaacgaacgaacgtgaacgaacatgaagattttggaatacaagaatttattaatgacaccgggctaactacggatcaattgctacgaggtgcaccaatcaaaaaggcggaagtgaaatacatgtacgaactcggtaaaccgcttgtcaagcctgagcagctgcagtccctacccacacaaatgtacaagttccatcaactgtacatggagatgagcgccaccggtacagaaatgatcggagcgaggatcagggacacggacttcttgcaaggagatgacattctctggatcaatttcaagggtatctacgaactataccagctggatgccctcgacgtctctattatgagttgctggattttgtaagtatcgttcagttagatttcttattatgtttcctttaattagttaggtccttgtatataagtagactacatataatatatacttccttttattgttgtagaatggagattcaaagggcccggcggcggggggttttcgatactggattcatcgaccctcggaaagtaaacgtcgcaatgctcgaccagtatccgcaagccacagaggacaatctcgtccatctcttgaaggcgcagcattacaagacgttcatactattaccgtacaacacagagttagtttaattttactgtcttcctataccaaatttcattccgtacgaacatgctaagtgtttcatatgtaatgcatcccacgcacattgcagattccactgggtctttttactcttcaacctggaggcctgcaccgtcaacgtatatgactcaatggataaaaaagagtctatgtttgacaaggttttcgaacttatagacaggtactgtcataagttcctatgttaattaagaatcttgttataattaattgctactacgaatcatagctttaaactccatgtagggcttggtatcgattccgtcatttggtccgcagtaaatggagagaaagacttaggcggaagttcaattttcctgtgagtacacatgctttacatttatattgaatctccaattcaaatacatacaagtgtatattaattagatctctcaccgtttatcatttatttatagtgcacaaagcaaaagcagggaactaacttgtgcagctgctacgtgtgcgagtattgccactgccttgtagaccaaatcatcaccgcaagagagctcgatgtacgtacaaataaattctaaatttcattgcgtacgtatcgatttgttgtttaattactaattaatttcatacattaatatagtttattcgcatgagggataacctgatcacacacaaggaatttatcgcggtggttcaagaacaactcatgggatttatcaatgaacaaatccttgatcccaagggtgaattctactacgacagaaatacaattcataggtccttagcttctgagataacgactactactacgtcgaaatcgtagctagctaggacatcataatagattgtaattaatacatgtctatttttctatatgcatgtacacattttctttaatgtaaatatatattttagtcatatatatatgcacataaaatgttaagtgctttcatatatatatatatatatatatatatatatatatatatatatatatatatatatatatacctatgcatttgcataacatatatatgtataaatacatatatattatgcatgtatatgtactgaaacatatataaatataatatatatatatatattatatgcatatatatatgtattaaaacatatatatgcatggtttttatatatatatatatatatatatatatatatatatatatatatataaaccatgcagcaacagggccatgaaaaaaaaaaggtcagctcgactttagtcccggattggtagtcccggtttgaaaaccgggactaaaggggggttacgaaccgggactacaaacgctttctccaccagtgcacatttgaagtattaaacgtaatctaataacaaaataaattacagattccgtcagaaaactacgagataaatttattaagcctaattaatccgtcattagtaaatgtttattgtagcaccacattgtcaaatcatggcgcaattatgcttaaaagattcgcctcgtaatttacacgcaatctgtgtaattgggatttttgcctatatttaatactccatgcatatgtccaaacaatcgatatgacactgtaaaaatttttgttttgggaactaaaccagctctatggatgagggttcttattgttgtctttaggctggttgagtactggtagtgtaagtggtagttttgttgtttctattcgagttgtgattttataattttgtaaccatattcgacctataatcgctgtgtaataattgattgtagtttcttttgaaaccaagaccaaaaatagacgaccgttaattagtatttgtgaagaagaaaatacgtacaccattaatggtttggtatgaactccacggcatggaagaacgaacacaagacaaataaggctgagacatttttttggctgcgatcttgcttgctgcgccgttttctggtgtttatcattctccacttattaatgggcaaacaaggggccaattacatgcatatatatgacataacgtgtactttaaagccgcccgagagttcacaagaaatcgtgccatcccaggatcgatcacgcgtacggccgctaggtcacaacagttacaaacactgaaacacacactgatgtagaaattgaagcctgatcgacgtgaacaggaacgatgacacgaaacaattaaaataattaaacaaagtagtgtagtaaagtttacgccagaagttgtaccattaagtagtattactgcataataagaggggcggcggcggtgatggggacgctgtggagaacgatagtctcgacggtgaggccaggaccgaagccgaagaggacgccccagtccatgccctcgccggtggtggcgtggccgtcgtcggcagagagcttgcgcatctcgtcgaggacgaagaggacggtggcgctggccatgttgccgtactcggagaggacgttgcgggaggcgcgcatgcgggccttgtggagggcgaccttctcctcaacctggtcgaggatggccggaccgcccgggtgcaccacccagaagatggagttccagtcgtggacgccgagcggcatgaaggcgtcggtgagcgcgccctcgacactgtcggatatgaactccgggacgtccttgggcaggtggaaggtgagacccacctcgcggaggtgccccacgatggcgtcctccgtgcccggcaggatggtctggctcgccgacacaatctggaacagcggccgctcatcggctgcctcgtcggggtcagagccgacgatcaccgccgctgcgccgtcgccgaagagcgcgtgcccgacgagggagtcgaggtgcgactcggacggcccccggaaggccatcgccatgatctccgagcacaccaccagcacccgcgcgccgcggttgttctcggccaggtccttggccacgcgcagcaccgtgccaccggcgaagcacccctgctggtacatcatcagccgcttcaccgacgtgggtaggcccagcatcttggccacctggtagtcggctccgggcatgtccactccgttggtcgtgcagaacacgaggtgggtgatccgcgacatcggctgcccccactctttgatcgcctcctcggctgccgccttccccagcttgggcacctccgccaccaccatgtcctgcctcgcgtccagcgacggcgccgtgaacacgcacatgctagggttctcctgtaggatctcctcagtaagatgcgtgtacctcttccgtatctgcgagctttcacctgcatatatcatggatgcgcgatattaatttgcacctgcgctattttaatcttaattattattaattattattgttatacggtttagatagggtgaaatttactctggaaattcgcttaaatttttttagaaaatcacgagctgcaattaggagtccgactatcgtctcaagttaatgtgcgagtttttttaagaaatatttcttatacgactccttttgtatttcaaaaaatgaacaaacaataaaattgactcaaacacgaatctatatttccaaaagcgaacgaaattacaaaccgactcaaataaaaatgacataccaaaataccgacaaaaacatgatcagtttttataatagaagtgatggcgcagtactttaatttctataaagggattcacctttcacttatttagactagatacagtatgtgtactagtataatatagatgcaaattaactgattactcattagtgcttacacatcctctggaacctctccttcaggttggttaggtgctcgctgttggtgaccctgaagtagtagtccgggtagtcggtctggtacacgcagttagccggcgttgccgtcccgatcgctagcaccgccgccatcccctccgctctttgcatcctcctaacctcctccaacttcactgttgatgtcaccatctccccactcaccggcggctaatcgtacctagctaggaatgtagtgtatatcttggtataactgagggtactagcagctagcttgttcgccacaacgaaaatgcatgtgcgctagctagctgctgcctctcagcccggctgattcgaacaaatggtcgcagctaagttatttataggggtgagctgcacgtttgtctgccagaacgttgtacccttttccaattttcctaacaataatatatctccgttgaatttgtgtgacgatactatttttttttctgaaaacgtgtttaattaagattcattgaagtttgaacaaaagtttcaattcgatctcataagatatattcttttcagctgcaaaaaccagtactttaatatatatacgaatatattggtgtaattcttgaactaaatatatttgtaatctaactaaacaggaaggaagcatgcgcacacaaacgtggacatcttatttaaagtttcttaaaattttgctagcctaacatatgcatttttgtgcgtggatgaccttttttggaaaaaaaacatattatttcattctatatattatgaacctgctatcttattaacgagttatgatttttttaagaaaaacagtacaaatgcacacgctcataatatgcgcacaatgacccctacgagcacacacgcacactaccctacctctacgagcacctttgaaagactgagacgacatatgttgggatttacaaattgaccacaagtgcctcgatgtagacaggtacgttggctactactacaacaatagttagccgtaatcacaaacacccgcgtatcaaagtctaggacataaaaccgggtgggttggttctaccaaaaaaacctaacaagttgagctatactcacttcgcgattttcttctaattatcctcacagaacatatataaaatctaaagcataattatattgaaccatggaatcttaaattgatgagaaaattattgtgtcggagttgatcctatgaaattatcatttctatgataagtgtttcttttttaattgaatatatttagcacactctttttatagtatatatactttgagcaactccggtttacatacacacacataggacatatatgggcacccgggcaccataatatgaaatacacaaattcgtctaaatttttcaaaattttctatatatctagttataagtattcgattcatacctatacctagcaacaaaacaactcaaatttaactttatatatatatatatatatatatatatatattaaaattaactggggcttcatggggcccggccaacatgattaaaaattgagtatgtacctaatgctaatgagtctgatttttttaaaaaaatgtttagttatgaacattaacttatttactagctagttcaaacaagtttgaactaaatttgaatatctttttgttaaattttgattgtaggtatataggatctaaacttatatataattacttaggtatgtaataatggattgtaaaataaagtttaatttaagttgatttattgctttggtatgaatcaaattcttatgactaaatatacactcacaatttaaaaaattatatttttcagtgtttgtgcgcgcgcgctagtaataactaaccattcaaattaagaacctaaccacctaaccatcgtacgtgagattcaaacttaggtgatatgtgtgcataagatatatagcaaaacaatgtaaccaccacacaacttgtcaacttgtggatgtacatgacgtacccactcttctttttggagtatacgaggtcagcgccaagcgttatggtggtcaatccattgcatcttctcgcgcatcaccgtgaggccttattcggttaatccttatgagagaggaattggaggggatttatttcacacctattatagtctggaattattcccccttaatcctctccaatcgccctctaagctgaataacgcctgacggggttagcggcatcgatcagggacgatgctgagctattggacctcaatgccatacggcccctgagctcatgttatttttgctgaagatttttacacggtttatttcaaaataatttttctaaaagattaataattagtcaaaatttcgatggacttataggcggaaaaatatgtgtacatgcggatgagccacctgcgcctctaccaaattgccataaccacatgtaaaaatcaatttttgcaggtggttaggttaagccgagcaacttgggaggtgattttcggtgaaaacaaataatatagctcaaaaatatccagatgcagtgccatttcctgctcgtcccatttctacggatccacaccactgcaaatcaatatcagacacaccgcaaatccaaagtcgagagtaaacttccacatcaccataacaatgctcaacacatatataacgcaattccataacaaattcacatttatctcatagcgaaataaaagcgaagtgaacataggtcaaggctgcagcaaagcttgccgttatcgagctcagcattggcccctttctcccactgccttgatcatcagcctccatctcagcgctcctgccatgtaccttgatctggatctagctagaggtggtagtggtgtggtggatgcgaaggaagaaaggggataaggcagggtgaggcaacctccggtggaccggttgcttatgagcctttaggagaccacaattgtcgtcatcgtttaacaaaccctatcggcagcagatctgccactcccaagtccactggaggttgaagttgtcagcgggtgcctagagcccaccaacaggcggtgaatccaccgctcctgagtacgcaggaggccgtagcaatcggcagcgcctgccgagccttgtcagcatcggtgatcatgtcgttggctatgattgacgatggccttgcgaagcctgccagctgagaggcgcatcggtgatgggagagggcgtagaggaattagagggagcagatctcgactcaatcgtcctatcacacaaataaatatacatggtagtcgtgttactgcacattgaccgtaacgttactacgccgttccagcgtgatgagaactaaaaaaaagtaaatctcaatctttagagagcaatatctctcacattatatagtatttttctaattcgtctgcaccatgatttctgtaaaaaagtgcttaacaaaactatttttcgatgttgttgctgcgagaaagttgtcctgttactacacgataaccgttatgttactgcgggattcctgcgagacgtgaacagcaaagtggtgggtgggagagggagtcaatgggcgggtttaactcgggtttgaccggcgggaggaggctttgactagcctttgactgaggtgggaggggagatttgggccatatgaatggtgggggagatgggattggcccatgggaggggggtgtagaatagttattctaggggaggggtgtagaatagatttgctatatataataatctaggatgggatgaaacccatccacattttggaacggagttagtagaagttataaaagttgcacctcaactttccggagggagtgtaagccaactatagcttatgccaagacgagataaaaaaaatgagaagtgctagctcttatgcaaaatctagctctacgcatgctccaaagcaaatgcattagttacataggcgagggaaaaagaggaaaacaaaaatagggcaacattacaactaaaatatatatatggtaggtttaatatggacttattgtttgaattaatagatcggtcttagcccattcgaagtttaattctttggaaaatcataaaagcccacctcatgggatatcatgcatggggagtttagtaccgccttgcctattcaatgagaggaagacctccttttaagagaggatgctcttctagccacttgaggcatgtgaggcggagagaacagggggaacacgtgctcctgacatgtcagtttaactcgggtttaatatggacttattgtttgaattaatagatcggtcttagcccattctaggagaggatgctctcctagccacttgaggcatgtgcgggaaattcatatttgttttttttggaaacactcggaataatctgatgagtgaaacggtgtggagtccgttttgctgcggaaaattcagattttttttttttggaaacactccgaataatccgatgtgtgaaacggtgtggagttcggataagttacgcgtgacttatctggttcggttcggttatgcagagtggagatcgtgtaggcgccctgatcaagtgtcctgatatctctatataatttgagccgccacctcctcgcaacatacgtggaatcaatcttgggttggcctcctcctccgtactacgttgttgtttgtagtctactccatcccactcgccggtgctcaatggcaatcgggagagcagctctccgaaacctgcgccttctacgttttgcactagaagaaggtagcaataagatttttgggtttttgggaagcgctccacgcgactgctccctattcgttcatacggctcgtcttcctcttcgctcgcgtgctgtgcgctaccgttaagggacggtaccgtgaattcttcctgccgagcaaccggatttccaaaaccatcggtatcaacatgtttcgcatcttcgatctgttcatcctttactgtcttgtttacatgtatagatcctatgatgtgattatactagtttacatcgacaatgtcatgatttatttatgtatttatggaacaaattaaatcattacgtgcttatatattcaacacttatatctactagtattaaacttgctcaaatactctgaagtacagtaaatgagagtggttgaagaaatgccaaaaaattatagccaatgcatatgtacttcctctgtctcattttaagtgcaaccatcatttttcgtgcccaactttaatatagtttgtcttagttgattttttaaaaaacttttaaaaaaactcatgcataaagtactattcatggtttatcatctcataacaataaaaatactaattataaaaaaaataaagaggacgaatgatcaaagttggacacgaaaactgatggctgcacttaaaatgggacggaggaagtaggtaaccggaagctatatgatataattgagtggaggtagctcaattaattgtcaattgacttgacatggaatacctgcagatagctatgtttgtgaaacaaatggaatcttgatcgacctagacatctacccaaaactgacaagttgttcctattttacaaagttcgagctgccatactatcattgatattctcaaattggctaataaactaccttgaatatgagcagttcaagaaatgcataaaaaatatatataggcagtgcacatctgggtaacgggaagctatttgatccaatcgggcggagttagctcaactatttgtaaatcgtcctagcaaagaattcgtgcatacaaccctgtttgttaaacaatggaatcttgagctacgtcccactactacataaatcatttttacatgcagccagcacaatcgcatgcgccaaaagatctacaaaaaatcggattttcgcatgcgaccagcgcaaccgcgtgcgaaaatggtattttcgtatgtggtcacctatatcggctgcatgcgaaaataatatcagcgaaaaaaataaaaaaaccgaatcggccgaaccctagctcgccgctgtcatcagtcggacccacgcagggcggcgccactgctgctgccagagcccaccgtcctccgcgccggatccaccgtgcgcctctcgtcgtcgccgtcagatccgccgcccccgccgcccatcgtcgtcaccggcactggatccgcgtggggatgggtcgccaccgccagatccacgctaggcggcattactcctggccacctccttgtcatcaacggcggcgccgcctgctcccaaccccaccgcctgctcccgcacactcggtgaggagaggaagacaagagagtatcagaggagaggagaggaacagacataaggagaggaagagtgagaggagaggagacgaaaagttttaagtggtgagagcgaaaagagagagcacgggaaaaaaaatctgtgaagaagagggtattttcgcgtgcggacaacttaagagacacgcatacgaaaatttatttggtatgtggccccttaagatgaccgtattggtaaatagacttatttttacatgcgatcccttgcaaattgctaccactatagaacatgacgtcgtgaacgggacatccatgataggggcttgcatcccatcatatagacctcccatttgacgggacataataaacctcgacacaaaagcaccattacaggcactcaccacaggcctctagtctggacctgttactaatgacactcatcctcgacacagatgagttttgacatcactgaccaataatctgtaactgggctccttgccgacatagaagggacccacccaacatggatgacctattccataggtgtgctgtggagtcttgaactacacatcgtctatcaaaaacattgacaaggtcttcctattttacaagctacaaggtaccattctatcattgatattgttgtcaaaacgacaactgcatacgtcgaaagacgtggttactcaacagtggatgggaaaatgaagtgtactaaattttgaattttccttggggatcccccattacatggccctaggggactatttatagccccattacaggttcttactactagggtttaggttgtacagggaaatttacatgattacccttaccaaaggggcatttacaggggtacataatgttataggggctcatgggcctctgatgggccgtctggcgatcgccggcctgttgggccggaaaggcttcctcggccctcacgggggcgaacttgtcaaggcgaagtcatcctccttcggcagatagtcttcgccctgcacccttcgcctgagacgcctctggcctggcgcttgtacgactcttcgccttgcgccgttcttgttccatagccttcgccatgggtttcggcaggtttggttgaaggacctcatgccatccgccaacaagcccctcacgggcaagggtgagattggagcttcggccgagaccgtgcaaaccatgtggtatggtatgcggcgccccctttcgaccgatgctcctgccgaaacctacattattcctgcgaatgaagtttgttatttgtgcggctggtattattttgccgcgcttcgcctcctgcgattgatttttatatatattcttttttcctgggccgaacggaagccttcctatcgtgggcttttcactgtgccgctcggtcgatgggaatttaccatttcacctacccttgcgacacgtggcgctttattactagtggttaggcgaacggtcgcctgggtgggctatatattcccgcttctctttccttttcaccgccccactttccattttaccgcgagcgctctcttcctccgtctcttcctttcacagcatctttcgacccctcaggcgtttcgccgaatctcgtttttcgccaccgcaaacgcaccgttcgccatggccccacgtaagccaaaccctacttcggcgaaagggccagatcccggcctagtcgatgacaacagcaccgcctttctgggggtctctcttgtagacgacgtcgagctggcgaagatggtcagctccggagcgttggttgaggggcaggctttcgccccagggaaaaccgtggtgccgaaacctgtcgacaatcggacagtggtgttcgccgtattttttgaggcaaggctacggtttccttgcaacgtgttgttgccggaaatccttcgcctcttccaggtggaacttccgcagctgagcccgtcggcgcttgttcagatcgctatctttgactgggcgtgctggacttccgggtttgagcctaacaccgagctctttggcgccatatttttcgccaccgtgaactcgaagacggtgattaccccggctggaatgaaaaaaacagtgttcgggagcgtgaacttcaacgttagccccgagcggtccgatctctagccggtgaacgctgccatgtcgaagtgggaccgccattggatggcgaggtggttctaccacaccatccccttcgaggctatttctgaatcagcgaaagccttccggtgccggcgcaaggcgattgcgccgaaccggaggcccaagattgctgtgaacggcaccatggaggcatggttcgttctactacggaaggtttgctcccgccttagctgccgtgacttggtggaggaattttgtatgcttcgaatttttcccctctcccagtcatggcaagtcgcggttgaacaaggcgaagaggtcgacggtttgccgaacctgatacttcctgagggggcgaacagtaagactgttgttttgctatttactgctgtgctttgttatttcgccttatttgacttttgacatagcttcacactctacttttacagtgttgaccctcgaccaggccgaagccaaagcctgcaggatgatcggcgatgtttcggccgtcgagtatagtcagctgttaacgcatcaagcggctgggcgggcgaaccgggtttacaatggcgaactgcctccccgggcgaatccccaaaaggtcgacgacgaggcagggccttcgcgaaagcggacgcgcggacaagtgaagcttgcccccaggaagcgaagggttcctacttcgtctgactccgacgctgacgacgaggatgatgccgaagaacgtgacggcgaggaggaaggagatgaagaggaggaggtggaggctgtggctgataaggccgcgagcgaggcggtcgaagactgcgtcgacacccccggctacactcctaccccaagtcccggtcacaacgagaccggggtggagtcgaacagctccccccttcatcggaaggatttggaaggggcgaaggccctagttgcgttctcttcaggtgcagcggcgaagggaggtcctggcaaaaaggtggctaagaagaaaggactcgtcgatgtcgctcgcgtttttagcgacgacgagtccttcgacgggactctgacttcgcccgctggtcgcagcctggatctttcggccgcccccattcctccattcgacgccgcgggagtggacggtagtaccgccgctggggcttcagcttctgcggaaaggattgtgacggccgcggcgaaagtattcggcaatcctccgcctcagccggttgcatcgccgctgattgaggtgaagggaaagagagctgtcgctgagacgtccgcttcggaatattcgatctcggtaccccgcttcgcccctggcgatttcgagacgcgagcggacctccttccttttttggagggggtaagcaatcttgtactgcccgccagtgccccgagcttgttcacggaactgaatgagttcgacgaagggtgttctgctataaaaagcctggctgttcgggtacgttccccccccctttttttatctttacccttcctttatcttgtttttacaattgacacttgttctcttcgccgctcgtattctgcgcccagatcctcgcggctcactgctcaacggagcgaaccgtgcgagcccgacttgatgagttcaaaagccgtcttcgggccaaggatgacaaactaggccgtaaaaatttggagatggaggcccttgccaacactcttaaggaggcgaaggctgaaaacaagcggctccaatcggaactggagaaagggaaagaagtcagggccgaagtcgatcgcttaaaggccgaactggagaaagagaaggcccattcggcggtgctcatcgactactacaaccttactgagccgaagatagtctcttcgccagaaggctagcagggctgaagcgagcgccgcggaggagtcgcagcggttttcgcgggagatggcgaagaccgccgaatctgcgagaacggcttgccaaaccctccgcctcgcccttaccgacatgggcgcgaaggggcggggggtccctaccgaggatgcctcagccttcgacttctccgagtggacccagcaggccggcggatcggtttcggactgcgccaccgcgtacggcaactgctgtgcgcgcgtgtcagcggcctttaccatgggcctcctgcagcagttcggctgcgagcacatcgccgagttccccaagtacgcgaagggggattgggaaatcagtgcacaagacatttcacctgcacttcgtgcgtggcgaaaacaattttggcagaaggacggccgctccgccgctaaggcgcgccttttggagcagctggcgaaagcagaggcggcggacctttgtgaagaggaaggcgcggcggccggagggggtggaggcgatgcccaggaccacccagaggtgtgaggccctccacccttctcttagattttcatagttttcttttggtgttcgctagatgtggcgaaccgttgtatattcggcaaactgccgctaaaccttaaaaaaggctttttggtatatttggaatgtatgacataatcttaattaccttttgatgatcgaagtctttggcatatttttatttcactcgtttcgcattatgccataccttccccttctttcgcctactcttaccattcaagatgtgttttgccttttctgcactgtctaccagggggtccgccgaaaatcgtgcattcggcccccttctgggagctggcgaagtcaaaacgagaaatttgtggcattgaaggggctgccgaagacgcaatgtccatttcggcatgtttatcgcgaaatggagataaacggtcgtagctataagattatcaaggttgccaactggctacgtgtgcaccccgggcgaaccttagaagattacgatcttgttcattcaagacgtttggaagatatggctcgcttttggcgaaaccattagaagactaaacgtcaggaatcgatctttcagcgtcgttacagtttagtctgtgtttcgccccctactcctcttaaggttgtgtatgatattagtagtgatgacgaacctagttcgtccgaccattccttagggagggataatgatcactggggcgaagatgtaatttacttgtaaaatgaattgtatcgggttgtaaaccttgtattctttgattatttttttttcgaagctaataaagaacgtgctttatttccttttcgctatttttcgcatcgtcacattttgtgcttttgttaggtcggaacatgccggcccctttgcatatattagcgaaataggtgtattgacttttcagcttttcgtcgttcgtttttaatctgtagcgttctgtgtcgagagaaacgcttttgcttttatactgatcggtcgtaacgtcgttcggctatttattttccgagacaagctgttgcggtttcaatgttcggcgagcaatgcttcggccgattcgtttcgcccccttggcctttttcgctgatcaggcgtttgccttggggtttttccacaaattatcaatcacacgaaaagtaagaagaaggcggaggacacagagattttatactggttcgggcctccatggtggataatagccctacatccagttttttttctttttctctctttcttctttttctttttttttctttgccgaaaggcttacatagtgccgaagggcttacatgatagtatgtacatttttacaagttggcgatttgggtgccacccattctagacatagaagcgcttgagggaggcggcgttccaggaatggtcgaactcctcgccttcgagtgtcgctaggcgaaaagatcccgtcctggacttgcgcttgatgaggtatggtccttcccactttgattcaagcttgccaactgctactgggttcgccttcttccttaggacgagatgaccaggcatgagctccgtgggtcgaacttttttgttgtaagttgccgaagtgcttgcggcgtacttgtgcatgtgctcgagcgcttcgactcttactgcttccaagagttcgagcgatacttcgcgtccttcgcccccgaaaaacatcacccttggtgagttagcccctagctctgctggggttattgcctcatcgccataaagaagcataaacgggctaaacttggttggtcttgtgggggtcgtctgaagggcccagagaaccgatagcaattcctctggccatttgcctttcgccgccccctcaagtcttttcttcagtgcttctaggatcttgccatttgtgcgttcggccgccccatttgactgcgggtgtgcgaccgacgcgagcttgatttccaggtcaaactgcttgccgttgtcagtaatgaactcttttggcactccgaaacggcaaacaatgtttttccatacaaacttctgtactgctgccaaagtgattgccccaagcggttcggcttcaatccatcgagagaaatattccacagctacaattgcgaatttatacccgtttcgtgccactgggaacggcccaatgatgtctagtccccatctggcgaagggccatactggcgcaatgggctgcagatcatactggggcgcggcttggcttcggccatgacgctggcaactttcgcacttcttgatttgctcaacacagactttcaacacagtgggccaataaactccttgtctaaatactttggaggccactgttcttgcagcctagtgcgcgccgcatagcccctggtgtatctcctttgccatttcttcgccttcggcaaatgagatgcaacgaagtaagggttgaagtacccctgtgcggtaaagctgacccgaaaccatcttatacttcgtggctctgagctgcaaatgcttcgcttctgcttcgtctaccagaagccagccagttttaaggtgtttcacaaatggggttcgccagtcatgtgggtcttcaccccatttctccttgtcgattgccatgacttcggagcagtccatgggcacacttggagcatgcaggacttcgaaaaagatgcccagcgaatatgggccgccttaagcagcggatttcgccaaggcatctgcctccctgttctggtctctaggcaagtgttcgaccattatgccggtgaagcatttttccatggaccgaacagcctccagatacctcttcattccctcttcttttgcctcgaaggatttgtcaacatggcctgctaccaacttggagtcagttcgaattagcaggcaccggactcccaatgctttcgcctttctcaggcccaggagaacggcttcgtattctgctgtattgttggttgtgtcgaactgcaatcttgctgcgtaccgaatcggcacaccattcggcgaaaagaggactgccgcaacgcctgcccccttgtgcgaccacgaaccgtcagagcacatcacccagaactgctcggtgggctcagggtcgggggcaaatactggtgtccattcagctacgaagtcagctagcacttgagacttgatagcagagcgtgcaacaaaatgcaagtcgaacggggatagctctaccgcccacttgctgagccggccagtgacttccttgcctcggagtatttcgcccaaggggtactgtgatggcactatgactttgtgggcctggaagtagtgcttaagcttgcgcgaagccatcactagagcgtaagcgagcttttccatttcaatgtaccttgtctttgctccttgcagtgcttcgaagacgaagtagaccggtttctgtccggactctgtttcttggaacagtatttgctcttcgcgcctgttttctcccgagccgaaggctatcagcaaaagtgcttggccaagaacttgcactgcctctccgccgaacccccggagcgacgttggtgccggtgtaagagcttgggttggcaagcccatcttagcatatgcttcggcgaagatcacgtcggcctaactccctccatcgaccaggattcgtcggacttcaaaaccggctatctcagctgagattaccagtggatcttgatgcgggaacaggactccttcagcgtcttctggctcgaaagagatcagctggttcacgtactgtggcgccccctcacccgccgaagtgatgctgtggaccatgcggatctacatcttcttctgccatttcgacaactggcttggcgggtcagctcttgtaatcacttcgattacccttcgctgtgcatcttggcgttgttcggctgggggtgtttgctcctgaactgcttcacgaggtgcttcgacagttgttccctgctgtggccttaggtcttgcgcgttgccatgttgcctaatgtttcagcattgctccgtggtgtgcgaagagcatccgtgaaaggcgcagtagaggtcttttcggaccttcttgcgggctggctgctgatggttgcttgcttgctgggcgtcgaactctttgcggagggcttgcacttcttcgacagccatcacagccttgcccgcccgatctgttctgaactttctccaagtcatgggggcttggccttgccttggcggctgtccctggatcgccggctgagactggcgaacagagaggggaggtggttcggcaacttgaacttgtgcttgagcttgagcagcggcgacgtatagcttgtcgtcgtttagaatcctcctcactccttgtgaacccgtcaatgatgcgaagtaggtgctcgagcatctgcggctccttgttggcgatttttcttgttagttcgccctcaagcagactggcccaactggtggtacttgctgagccgccacggatgggtcaaaaattggctgcaaccacatcatggcagcatggattggtgcttggtttgttccgaagcctagagttggaacttgctgccgaacagttggcacctgagcagtgttgacgaagtcgaactgcggtccttgattccacggcgaagcttccaagcctggctgaattggtggcaatcaattgggcgcaccatgacttgtattccccaccgggtgagccgatggggttgtgcttgaaatgtagtggggttggttgagttgctgaaggaaagcttggagttgcgcctgcagagccgaagccccttccgccactgattgtggcgcttggccaggtggttgatgctgcccggcgaagttcaccggcgcctgtgtggctagtggcggagagggctgggtcaccacttgcggccggacttgaggtggggcatagcctgccgaatactgaaggattagagccgacgtggccttggtccgccttgccgcctcgtatgcttgttgttgttcttgcatttggcgaagcatgtcttggagccgtgtcatgttctgccgcatggcttccatgtcggcttcagcttgcgcttcggggtccaggctgatttgggcctgtataacggtgagcgcagttggggccgccgccggctgcgatggggcggcttggggcaccaccagttggtttgtcgaaaggatctccgccctagtctggagtgcccttccgccgtagccgccttcgccacgtcggccgtgttcggcacttgcactgacgttgcgggggccgaagacggttctgatggcgcgggggccgaaggcggttgtgatggcgcttgtgcttctccatcttcggccacggacgccgaaggctctgctccttcttcggcagccatgtccggtccggcgtcgctctccttccgcctgataaccttctccttcacgaccctcttcggtggcattcgctctcagtggtttcgctcggagtccccacggtcggcaccagctgttgtcaaaacgacaactgcatacgtcgaaagacgtggttactcaacaatggttggaaaaatgaagtgtactaaattttgaatttcccttggggatcccccattacatggccctaggggactatttatagccccattacaggttcttattactagggtttaggttgtacaggggaatttacatgattacccttaccaaagaggcatttacaggggtacataatgttataggggctcatgggcccctgatgggccgtctggcgatcgccggcctgatgggccaaaaaggcttcctcggccctcgcaggggcgaacttgtcaagacgaagtcatcctccttcggcagatagtcttcgccttgcacccttcgtctgagacgcctctggcctggcgcttgtacgactcttcgccttgcgccgttcttgctctatagccttcgccatgggtttcggcaggtttggttgaagagcctcatgccatccgccaacagatattacatcaaattgcctcataaactcccttaaataagagtggttgaagaaacacgtaaaaagatatagccaacgcacatgttgataaccggaagctatatgatccaatcgagtgggagtaacaagattagttgtaagttgtcctaggaaagtattcctccagataactatatttgttaaacaaatggtatcttgagctacacatctacccagaacattaacaagatcttcacattttgcatcgtttgatattccaagttgcctaagagcaattttaatagttggcaactccctccggttaattatgacgttttgaataatgatatggtcttcaaaatatatcattgactatacatagtcaaacatatattttaaagagcatgtcattgtttaaatacaataggataatgtgtgtgtgtctatatatatatatatatatatataatagaaaaaaagtaccgtactaaaagtaaaaaaatatttatttattttatatattataatagaaaaaaacaatgtacttctcccccgtctagtaacttagaatgagataagacctatccacattttgagacggaggtagtaaaagttataaaagttgcacgtcaactttccagtgagagtataagccaactatagcttaggtagaaaggagatatatataaaaaaaaagagagaagtgcaagttttcatgcaaaatatagctctacacatggtccaaagcccatgcattagttacactagccgctaacccgtacgatgcacgggtattatagagtatagagatatattttaaattttaatcatagcttaaatatgtaggttttatattttttttattatactgactctagctaaaagaagcgcacacgttagttacaacttcacatttgtggtttcaaaatttcaaattaaattagttatttcaaattaaaaatggaaagtccgtaatttcagaattgtgtattatcaatttcgtaaaaactaataaagaatccgattcgtatttgtgaaacaaattgaatcttgttcgacctagacatctacccaaaactctgacaagttgttcccattttacaaagttcgagctgccatactatcactgatattatctcaaattggctaataaactaccttgaatatgagcagttgaagaaatgcgtaataaatatatataggcattgcgcatctgggtaacgtgcaaaggattcttgcatatataaccctgttttttaagcaatggaatcttgagagctacgtacgttcacatctatccagaactttgagattcctagaattccgtaataaacaacgacgaagagaggtttgaaaacatgcgttaaaatcatgtggcggtagctcatcaattaattgtcatttgtccttgcaagtagtgatacccggagacaatggcatcttcagcgagtacacacctacccagaactttgacaagttcttcacatcttacaaagttcgacgtaccatactataattgatattccaccaaattagctaataaactggcttgaataagagcagttggggaaatgcgggaaaaatataggcaaaatgcacatgtagataacggggacctatttgattcatctggtggaggtagctcacattgtaaattttccttgcaaattaaggccttgtttagttccaaattttttcttcaaattttcaatttttttcatcacatcaaaacttttctacacatataaacctccaacttttccgtcacttcgttccaatttcaaccaaacttttaatttttgacctgaaaacacactctaagaattcttgccgacaactatgtttgtcattgaatcgtgagctacacatgtatccagaactttgatattccataatccctaatagactacaataaataagagtggttaaagaaagcgtaaaacttataaccaatccacacactagagaaatgatctttaataccgattctaaactctttttaatctcggttatagtaaccgagacttaagatctaaagatgcatactaaataaaaaatatataggatgtgggattcgaacttaagatctcgcatctcaaccattatctgtgttaccatcttacctactccacacgtttaacttggataaaggtattttcattttgaactaactctagaggcatttttagtactggttggtaacaaccaacttgtattaaaaatatctttagtcccgattgatattatcaaccagtgctaaaaatatctttagtatcggataacagtaaccaagactaaagatccacaaaaattagtaccggttggtgctgcaaaccggttctaaagatgtatttttaatatcagttggtaacaccaactggggctaaagatatatatttctaggtacctaggcttttagaaccgattataaatagctttagtaccggttcttaatgcatcggccggtatatttgtgatttggggtattggataaaagttgatgatggtgaaagtctgacgagagtggtgatgctatcgccaaaggggccacaacaacagtttcatgtagatgcagtgccaagtaagcatgagcagcgataccacgcactataagaggtgtgtggatttttaacattttattatgtcataatatatgaaatcagttgacgtaattccaaacgtcaaaaagccacgtcataaatttagtatgtgacgtttgtacatttattgtcacaagcatttgacaatgctttattgtcataaaatcctggggcttgccacgtggcagctgacataacagttgacatggttaaaaaaaaagtcacaaaataagattcggcctgctaaagcccatgtagctcatgggccacaaatatattttttctggggttgttgctagctggcccagtatattttttgcttgtttgtttatgaatgcagcctgtacaaattttcaacccacaccaattcggcccatatgatttttccaacccgcacaattcagcccatatgatttttccacccccacaatttagcccatatatttttccagcccaaataattttttcagcccacaaagctcaactgatattttttcagcccatacaattcagcccagatactatatttcagcacatacaaaatcagattcaaatgaattaacattccacaaatgattgcaatgtcacatgcatttcacattccagaagtcttgaaatgcaatatcattacatccatccaccaattcagtacatatccaaactctcaaatttcatattcctgctactgcgagagcaacagcagcacatctgcaatagcatcacagcagcagtagcgcaatggccaaaagcacagcagcaacagcacaacggccagaagcacagcagcacctaaataacatcccacaagcacaatggtcgcaagttcagtgtcaccaaaatatcatctggaacctaattgagtaggagtgcttactattcagcatctgatgatgcaaaattgctgccaaacaattgagtagtttcttattgtacttgaattacatgtaccccagtggcataatgtatctatgaatcctataatacatgagtaagcaaaatttagtagactcaagtaaacccccgcggggcattgcatttacgttagaaaacattggccgcagtttcattgatagaaacagacagagttgtccgaagtccagtgcaaaaaagaacaagtaccttacggcatctgacttgaatcccatcaggttttatagtgctaaactgatcctcaaattgggtcattgtgcatttaatggtagaatcctcacatgtattgtatgagcagcaactataaaataaagataataaatttcaggacaacaacaaaattatcatgtctggactaaagcctacgattatagcaaataccttatgttcatacgtattgctgctccagcccgtttatctgccgcatgacaacgcacaggtggacaacgtgcatgacggcagcatccgtaaggattcatccttaatcaaaagtattatttagccttagccttagtccacatattgcacacaaaaatgaagagttattccatacaaaatcgaatccagattcatccttaatcatacaaaagcatctcttgctctaagattaaaaggaatgtgacatcaagctatgaacgagcagaaccgttcagctttctttaatacaagaaataaacaagctcaccttgtgcccattgtggccttggtgttgcttgtccgttcagagatcttgggcttcatgccaagattcggcacagaagtctcggccatatcaaccaccggcgcttgatgcatcacagccacaccagtggcggaggacggaaaaaattttaggtgtggcctacgaattaccacagaagttagcacataacgaaaaatctcaatgcatgttattatacgatgcaatattatcacaacaagtctacattaagcacggtaaacaagaactaattataagttgatgattcatcatctatttgtaaactagatagaagagtaggtactcaaaaaatacctcaacttcctaagattcatgctttcaacaatacatcacaaataggaagtacagtactgagtatagatagatatagtaccaaagattgattaatgttcacatatgtaggcacctgttgatggagtgatggatgcttggcttgttggcttgtcgcttgcttgctgtcgtcgctgggtgctgcacgcctgcactgctgttgtgccattcatcccaccctgcctctgtctctgctcttcctgcgctgcgcgcctgcccatttgggccatggcggctggtcgtgctgccgccttgccggagcagatgccacagccgcagctctggaagcctggtggccgcgccctcctcacctcaccctgccctcccgcgcggcgcgcaccacagcagcccccgtccgccgatggggattggggatggggattggcggaggttggaggagatggtcagatgactcagatggggaaatttgggtctcatttacactaaacaagcctaatgggcctactagctatcagcgtgaggaccagcactggcatttgcggacgcgtccacgccgtgtcggcactctctctgacccggctgctgctatgcgcggaggagcacgaggaagggggggtggtcagcgggcggcgcgaggatgctgtggccaacgtggtttggaatcggctagcggttgggcccgtcgatgcagccgcacgccgtcctcgagccgcccggggattgccgccgctcgatctagccgccctaggcccgggatctagcagatccaccgctcccgagcgtggtggcggcggagatagaggcggcgtggtaagcggcgaaggaggacgccgccgcacgctgtcatcgccgatacccaccgccggagaggagaggagaggaaaggagaggagaatggatgggagtgtggcggctgagggtggagagagagagagagaggaggggtggagaggagggttttatatagggctagggttagggacggcgatcagaaccattagatcgaagatggacggtcagaaatagttgggccatttgggccgaaacaggaatgatcatatgttttttttttaatttcaatttatgaaaacattaaatgtaattttaggtcgattttttttgtttcaaatgaaaaaatcataaataataaaattatagaactaatcgagatctacaactattgtattagtcctttttacaaataagttcatttgaacaatacaaattttgaattttcaaaaattgataatttcgaataaaaattggggttaataaatgatttcaaatggaaaagtcaccaaaactaaagttgtataaatcatcgagacggaaattttttatttttgtcatttctccatctgactctatttgaacaatttgaatttgaaattcaaagtttgagaacttcaaatagaatttttttattagtgaacgacttcaactgaaaaattcatcaacaacaaagttgtataatccatctgaatctacaatttttattttggtcatttgttcattcgacgaagcgatagtaagattgttcacaaaattttaatatggttttataaactataagagagatttgtaaattttgtgaacaatgttaatatcactttgccagatgaagatatgaccaaaataaaagttatagatatttatgagttatacaactttgttattgatgactttttcagttgaaatcatttagtatttgaaaatattgtttgaagtagtcataatttgaaattcaaattcaaattattgaaacaaagtcatatagcaaaatgaccaaaacaaaagttgtagatcttgataagttatacaaattttttgttgacaattttttcatttgaaatcatttactacacaaaaaaatatatatttgaatttcttatattttaaaattcaaattttatatagatcaatcaaactcagatggagaaataactaaaataaaattggtagatttcgataagtcatataactttgtttttgacaattttttcacgcaactcccaacaatttttagcttgcgggttcgactcctaactcctaacattttttagccattttgctgagttaggcgcggctgctcggcctagcgcacgggttggcccatttcgggtaagcggctgttgggctagcaccaggttggcccatctgaaaatgagaaaagaaaatctgatgtggcaataaggcttgcctacatggacaaaaatatttaaaataatacaataaataatttgtgacacataaataggtcttatgacatagtaaatattgtcactggatgacactagactagctatatgacacttattgtgacacacaactttttattgtcattaagttaaaatgcttcaaataaaatgtcataaattagatgatatagtgacattataacctgtgtcatataagccacacataacttgtagtggcggtccgaaggggacgacgcatgcagctagcggcaacccg

SEQ ID NO: 6308 - DNA, 19388 bp, Oryza sativa
ggtgagtgtgtgcacgtaaggatagtatggggtgagtagtatgggttagatgagcttatggtgagtgtgtgcacgttgtgagcaaaaaaaagggatagtatgggggtgagtagtatgggttagatgagcttatggtgagtgtgtgcacgtaaggatagtatgggggtgagtagtatgggttagatgagcttatagtgagtgtgtgcacgttgtaagcgtctacgtttgtactgtgtttctcaaaaaaaatgagaaaaaaagatagtatgggttggatgagcttatgaggtgcatgaaaaacgaagcaacttttataggaataaattgaatattatatagtctttttataggaataaattgaatattatatagtcttttataggaataaattgaatattatatagtctctccatccaaaatgtagctattcctggctacaaagtattggccttataaagctaacaaatagtttaaaaataaaatctagatatgttgatgaagaaaaattttagaagaaagtattgctttagaaacgtaataggtgtcatctggatgatactttttgccctttacgtttctcatgcacaatatacgatacatgtctgcacagactaactccctaattctattaaaaatagcctgaaaaatacttggggataactactgaactaaacagtacaacgatcgaccatgcatgccgttatcagaggctaacaaagaacagtatcaccatgcataatgcgccgctagcctcatggtcctcctcccatttgtgcttggtcagcagcgccgccgatcggaacgtgaacaccaggaaggacacccctttccctagctcggcgacgtcgcgcaccacgttattgttcgccatgaggcgctggtagtcgccgccggcgccgacgagctggtactggccggtgaacccgtcgtcgttgtatccgcacctgaagtcgtagcgccgcccctcctcgtcgaacaccggcacctccagcccgtcgtcgccgtcgtagccgtcgtcgagcaccccgtccagctcgtcgtcggtgaagctctccgcgatgtggcgggcggcggcgccgccggagagggagaggcggccgagcgagaggtcggcctgggcattcgtgacgtcgccgtagtagacgcacgccggctccgacgcgccgagctcccgcaggcgcgacagcacggcggcgctctcgtcgcagacgtccccgatcttgatgtagctgtagtcggccggcggcaagccagctcggccgggcgcccgcagcttctccctccacctcgccagggccttcgcgaggttctcctccggcgtctggccggccgggtagctgacgcccagtgcctccacctgcgccgcgttcgccggcgtctggccggccgggtagctgatgccggcaagtgtctccacctgcgccgagttcgccggcgtctggccggcgcagtagctgtagctgatgcccagtctgtccccctgcgccgagttcgcttgacccatttctgaaagacagagggtggcgacgagcttcttcttctggattatcgtcgatctaatctcttttcttgatctgcgcttttctgtttttttttgtgcaagtatgcttcctatttatagcttagcaagcggctaagacgtactcggattcggataacccgcgagtcagtttcggaatataataagctagcgattcgtgcgttgcatggagtagtagttggtttcggaaacgggttatatatctgacactttctagtccggtaccgatactatttttaaggccttaacttgtccggcatgccaaaaatagcatgcgtctcttttcctatgcgctttttttaaaaaaaaacaaaaaaaaatctcaacgcagcgaatgtagtcctataaacctacctatgcaagtgatctccatttaatatagttattaccaattttctgttctatcgttgatccacatcattcagttcgattagatctcaacgatttgtcgattttccatgtcgcctgcatcaagttgatcggtagccgtttgatcagctctcaaaacgatcctgcgcgccacctcaatgtgtccacacccacgtcgaccggtggaaaagcccaataacagcccagcatttcccgaatctataaggaaaaagtacaccgaaggtccctcaacttgtcatcggataaaaaaaacgtcctcgaactgcaaaaccagatatgcggggtcccttaactgtacaaaaccggtcatctgagatccttcggcggttttgaccccggttttggtctacgtggcggctaagtcagcatgggacccacgtgggccccacatgtcaggatgccacctcatcaccactctcttatttccctctcttctccctttctctctttcacttttctcaggccggcgacgggcggcgctgtggggaggaggccgccggagggaggggagaggaggaggtccggcagccggtgtcgcgccggcggaggaaatgccgttgtccgcatccaacgagcacaccggccgctgccacaccttcctcctcccccacacgccggccgccgccacaccttcctcctcccctcagcctcgccgccgcccggaacaacgtcagctggggcacccggcgcccatggtggacgcgttcggatccggcaagggcacgccgacgggagtagtgccaacccccgcaaggagtcgaaggtcgtcgagatggccatgggcgaacggtgggcaacgtcaagcaggtcgcgggtgacggtggccggcggcggtggtggaggatgcggatccgtgctcggatctgaccgtcccgtggccggatccgaagctcccgcgttgaatcttgctgatggcgacgtggtaataatagtgtcggcggctggacggcggggaggcaactggcggcggggctgagtggtggtggcggcggagcccgagccctggtggtggtggtgatggtagcggccgccgccgacatcgccgatggcggagaggctacggcgaatccgaggcggcggcgccatgctcgtgctcatcctcctcgccgtcgtggcgtcggcgcagcaggagtacgaggtcacctcctcctcgtcctcctcgccgtcgcggcgcggcgcgggcgagggccatcggccgccgccttgggcgcagcaggagtacgacgtcacctccgccgccaccacgggtcctgttggaattaatgaatgggccttagcccactcgaagattaattctttggaaaatcacaaaagcccacctcatgggatggcatgcatgtggagtttagtaccaccttgcttattctaggagagggggacctccttaaaagggaggatgccctcccagtcgcttgaagcatgtgtggtggagagaagaggggaaacacacgcgcgcgctcgctcgcctcgcctggcctggcctagcagggcaggcggcgcgcgtgcacgacgtacgcgtcgaatggtccgaaaaattggctcctcacccttgcgcagatgcagcctccttttgcagttttgttttgctgcaaattcggattcgtttttgttttggaaacgttccgaaaaatccggtgcgtgcaaacagcgtggagtccggataagttacgcgcgacttatccggttcggttacgcgcagtagagatcgtgcgggcgccctgatcaagcgacccttctctatataaaccgatccgccgtcttcacgcaatatatacgcaaaatcaatctagggtttgcctcatactctgtactgcgccgtcgctcgtagactactccatcccgctcgccggcgtgcaccagcgatcgggagagcaggtctccggaacctctgcctttgacgtcctgcaccgggagaaggcggcaataaggtttttgggaagcgcttcgcgcgactgctccctgttcgttcgcgatggctcgccttcctcttcgctcgcgtgtttcgtgccttcgtagacacctgcgaaaagtttcgaccaagcagccggtcttttcgtcacctcggtacgtgttcaatatgttgcgcatatttgatctgttcatgttatactgtgtagtttacatgtgtagatctaatgatgcgttcatgctagttttcatctgtaatgtcatgatttatttatggaatagattaaatcgttatatgtctataatctcaacaatccaaaaaccttattataggcactgtgattttactatggctggttttgccgatgcactgaggccggataaattcaccggtgtgcattttaagagatggcagatcagggtcactctgtggctgacaactatgaaatgcttctgggtgagtactggcaaatctgaaggagttcttactgctgaacagcagaagcaattcgaggaagccactactctctttgtgggatgcattcttagcgttcttggcgatcgtctggtcgaggtgtatatgcatatgaccgacgctaaggagttgtgggatgcactgaatactaaattcggtgctactgatgctagcaatgatctgtatatcatgaagcagtttcatgactacaaaatggcagacaaccgttctgtagtcgaacaggctcatgagatacaaaccatggctaaggaactcgaactccttaagtgtgtcttacccgacaaatttgtggccgggtgcattattgtaaaactacctccatcttggaggagtttcggtactgcactcaaacacaagagacaggaatactccgttgaggggttgattgcgtctcttgatgttgaggagaaagctcgggaaaaagatgccgcgtctaagggcgatggtgggcagtccagtgccaatgttgtgcacaaggcccagaacaagagcaaggggaaatacaaagctcagcagaccaccaacttcaagaagcagaagaagaacaacaacaatcctaatcaggatgagaggacttgctttgtgtgtggccaagttggtcatctggctaggaagtgtccacagcgcaaggggatgaaggcacctgcagggcagacttctaagtctgctaatgtgaccattggcaacactggagatggaagcgggtatggtaatttaccaactgttttttcagttaatcaatctactaattggtgggttgatactggggccaatgtacatgtttgtgctgacatctcattgttttcttcttatcaggtcgcacggggttccaccgtcctaatggggaatgggtcacatgcttctgttcatggtgttggcacggtagatctgaagtttacttcgggaaagatcgtgcagctgaagaacgtgcagcatgtcccttctatcgacaggaatcttgttagtggctcccgtctgactagagacggatttaagttggtttttgagtctaataaagtagtcgtgtctaaacatggatattttattggtaaaggttttgagtgcggaggcctgttccgcttttccctttctgatttctgcaataagtctgtgaaccatatttgtggcagtgtggatgatgaggttaatgtttggcattcacgtttatgtcatattaattttggcttgatgtctcggctttccagcatgtgtttaattcctaagttttccattgtcaaaggttctaagtgccatagttgtgtgcaatcgaagcaacctcgcaagcctcacaaggctgccgaggagagaaacttggcaccactagaactcctacattcagatctttgtgaaatgaatggggtgttgacgaagggtggaaaacgatatttcatgacattgattgatgatgctactagattttgctatgtgtacttgttgaaaacgaaagacgaggctctagactattttaaaatttataaggcagaagttgaaaatcaacttgacagaaagataaaaaggcttaggtctgatcgtggtggagagtttttctcgaacgagtttgacttattctgtgaggaacatggcatcatacatgagaggacgcctccctattctcccgagtctaatgggattgctgaaaggaagaaccgcacactgactgacttggtgaatgccatgttggacaccgcgggactgcctaaggcatggtggggggaggcattgttgacctcaaatcatgtgttaaacagagttcctaatagaaataaggacaaaacaccatatgagatatggattggtagaaaaccatcactttcttatttgcgcacatgggggtgcttggcgaaagtcaatgtaccaataacgaagaagcgcaaacttggacctaagactgtggactgtgtttttctgggatatgctcatcatagcattgcctatagatttttaatagttaaatccgaggtaccggacatgcatgttggtacaattatggagtctcgtgatgctaccttctttgagagctttttcccaatgaaggatacacatagtggttcgaaccaaccctctgaaataattcccagttcaatcacaccaccagaacaaactgaacatacacatgaacttgtctctgaggaggatgtcagtgaagctcctcgaaggagtaagagacaaaggacggctaagtcttttggtgatgatttcactgtgtacctcgtggatgacactcctaagtcaatttcagaagcatatgcatctcctgatgcagactactggaaggaggctgtccgtagtgaaatggattccattatcgctaacgggacttgggaggtgacagagcgaccctatgggtgtaaacctgtggggtgcaagtgggtgttcaagaagaagcttaggcctgacggtactattgaaaagtacaaggctcggcttgttgctaagggctatactcagaaagaaggcgaagatttctttgacacttactcacctgttgctagattgaccacaattcgtgtgctactttccctagcagcctcacatggtcttctcgttcatcaaatggacgttaagacagcttttcttaatggagagctggatgaggagatctatatggatcaacctgatgggtttgtagttgaaggtcaagaaggcaaagtgtgcaaattgttgaagtctttgtatggtctgaaacaagctcctaataaactataggagagtaccaatatatataccctctccaagtgaagatgcatatactctcgtgagctgcaaggcaggttggctatgccttaatgagttctgttggctttaattagcaaagatgttgtcctgcagagcattcttgaaagaactcacctttgtgagcttgactgttggtcgcagtctatgaagattttgggtgaatcttctaggaagcttactaaagacctaggagtatgacttatacgctccacccgaggggtagtctacagacggtctagtacctgataagactttgagtgaaacttccttgcacaagacttgcaattcaaggcgtagtccattgttcaagttgtgagtaagtgtagcttggagttctaggtggatgttcaaccttaattggtctccatcgaaccgctggtatataaacagtacattggaaaaggcaaatctcagtgggattttgagatttggtgggggattgttggaattaatgaatgggccttagcccactcgaagattaattctttggaaaatcacaaaagcccacctcatgggatggcatgcatgtggagtttagtaccaccttgcttattctaggagagggggacctccttaaaagggaggatgccctcccagtcgcttgaagcatgtgtggtggagagaagaggggaaacacacgcgcgcgctctctcgcctcgcctggcctggcctggcctggcagggcagggcagggcaggcggcgcgcgtacacgacgtacgcgtcgaatggtccgaaaaattggctcctcacccttgcgcagatgcagcctccttttgcagttttgttttgctgcaaattcggattcgtttttgttttggaaacgttccgaaaaatccggtgcgtgcaaacagcgtggagtccggataagttacgcgcgacttatccggttcggttacgcgcagtagagatcgtgcgggcgccctgatcaagcgacccttctctatataaaccgatccgccgtcttcacgcaatatatacgcaaaatcaatctagggtttgcctcatactctgtactgcgccgtcgctcgtagactactccatcccgctcgccggcgtgcaccagcgatcgggagagcaggtctccggaacctctgcctttgacgtcctgcaccgggagaaggcggcaataaggtttttgggaagcgcttcgcgcgactgctccctgttcgttcgcgacggctcgccttcctcttcgctcgcgtgtttcgtgccttcgtagacacctgcgaaaagtttcgaccaagcagccggtcttttcgtcacctcggtacgtgttcaatatgttgcgcatatttgatctgttcatgttatactgtgtagtttacatgtgtagatctaatgatgcgttcatgctagttttcatctgtaatgtcatgatttatttatggaatagattaaatcgttatatgtctataatctcaacaggtccctgcgacgcctactgtcacgcccagaaattcccgaatagaattccaagcagaatgtgcattaaaatccccgtccaggaccagccggggtacacaaacgacaatgttgacattcagatccacgtcttacaaacatcataaagtcttacataaatgcagcggaagaaaagaaaaacaacaggagctaagccttgactaaactgcagcgggaacaccactccacaggcatcctcgacggcacggacgaagcctactcctcagagaaaccttcatctgacccgaactcgaactctggggttgggaaaagtagagcaagactgagtactacccactgtactcagcaagtcataccggaataggggtatgatgcagggaatcatcaaagaagagctaaagtggttcatttgcataaagcgagcatttataaacagagattgaaagatttaaacagttgtaataattaattaatattaatcatccgctgtccaacgctaacccacgttgcgacaggcccaaccatccacctaaactatccaaattcaaaagattacactagggtgagactaatcacggtgaatctggttgaccgcccataaccgcgggcacggctattcgaatagttttactctgatcagaggtgtacaactgtacccacaagacacagccccacgacacgtttccgtgcgccgacatgtcaccacgacatatcggaaagaggccgtgacaggaccattcgcataaccccctctaaccaagcacaccacacctcaggtttcacccccactcctcgcaaggcagcgggcagtcccctctcgtgcctaggtgaatccggaagccgcataggccgtcgcagggcccatccaaactccatcacgcccacccttgcctggatgcgtcagctagaggaaagctacactacaagcccagccgttgcccacgctggcttgtggtaagtacgataagttcttccagggcatcccgcgaaccggtccttaactgccatgggtgcgaccagcaaaaccatgcacccacagcccaccatgtgattcattttaattaaccaacaccagagcggtggtactaatccaacattatcattagaaccaacagtctaaacattaatatgattttccccattgtgaactagttgaactaagcatggctaagcaattcctagtccaaactctaatcatgttataaccccaagctaacaaaggagcatgatatccaaaaacatggctgtaacaataggtaaccatcccatagtaatattataaaacaatgcaatatttgaaagaaaacaatagagcatttgcaatataggatcaacatgttcaagtgacaagcatgacttgccttgctctgctgctggaggaacctcggcgactatctcaaagtacaccgagcgtcggaggaatcggaatctagcgacatacaaagcaaacattgcaaacaggctataagactactgaaacagggaacaaaaccatttttaatggattctacacatttttcttgatttactgagacttgaatgggcttaaacggagctcggatgaattagttatgaattttagaagattcactgtgtttattactataaaagaaaaaccttaaatcatttattgcgcaatatattccagggctgacgtcagcacggaggggggggtgcggcgccgacaagcggggcccgcatgtcagcgacgcacgggtggccggtctaccgtggaccgggaccacgcgggtgatccaccgccggtccacgggatcgacggcccggatcggcccggggccgatcggacggtgcggcggcgaccaggctaggctcggctcggcacaaagccggccgaccggtcacggcgacggcgcgcgcacgcgcacgcgcgttgccgacgacggcaaccgccggcggagacggcggcgcaaggcggcgccgaagggcggtgatgctaaagcgacgactaacgggcggcggcgctaaagcggcggctaggggggagagggaggggaaaagaaaagggaggggtgcctcaccgagggtggccggcgcggaagaagatgatggcgaacggcgacggcaagccacgggaggacgacgtcggcgggcggacgagcttcggggtgccctaaggaaggagaagagagggattagagagagggagatggaccacggcgaccggaaaccatggccgaaggcggcggtggaggtggtgctcacccgagtgcgagggaacgaaggctccggcgacgaacttcgacggaggaggggtggacggggtggatctcggccacgcgaacccgacggcggcgacggcgcggcctggcggcgaccctaacagcggctagcggcggccggagcagcggaaaaggcggcggcaaggggttgcacggcgcgggagcgatgggaggctcgagagagtgcggcgaaatggggaaaaagtgagaggggacgacggcgatgcttaaatagggggagagggaaccggacgtggccgggagaggcgggaatcgccggccgacgtggggagtgtgggaggagagagaggcgggattcgaaaatcgaatcccggccatctcgggcgcgggcgcgagcgggagagagagaggagtgggcgcgggagacgcggcgcacgcgcgggcgtggtcgacgtggctcggaggaggcggagacgagggcgcggcggcggttgcgggcgcggcggcgcgagcgagatcggcgggaggtgggggaaggacccgacaggtgggccccacctatcggtgaccccgagagaggaggcggcggggcggcctgactgggcctcggcctgcggccggcccagcaaggaagagggggaaggaaggagggaatgggccggcggcccatccgaaaaaaaagaggaaaaagagaggaaaaagaaaaagaaaaaggaaaaaggattttccctggaattgaaatattgcttgctcaattttaattggttaaaattatttctagagctctgaaaattccactaaaaatcctgttaatgaatttcgacatgtagaactcaagaaaaattccacatgtcaaatccgattattatttgcattactttcttagggttttctcctgatttcacctgcattttcttggggtcgttttacaaattaaattttaggcttgggaggagaacttcggggtgtgacacctacctcgtgttccgctcctccccaccgctctatgcctccgccgtctccatctccaacctcctcaacgtcaccgccaccgccgtcaccgaatccaacgccgtcgacctgatcacccctgtcgctgccgaccccctcgtcctcgcgcccattgtcggcgacctcatccccacctaccggctagcctacccgagaggagagaaataagtgagggagagagagaggaggaagggaaaggaggggaaagagatagagggtgatgacgtggcatcctgacatgtggtgcccacgtgggtcccacgctgactcagccaccacgtgggataaaaccggggtcatatctgtttttgcggttagaggacgattttgtaactcgatgacaagttgagggaccttcggtgtactttttccaatctataatagatactattatgggacctaaaaattgacgattttgtattaggggtgaaaaattctggtattggaaattagggatgtcatacaaactccacgtaaagttgggggatggttggtgaacttattccaccatattatatacctcggtatctagcctggtccaactcaaacatgtattatattatgtgaggccaatgtcatgaggcaacacgcgtggaagaggggtaaaccacgttctcacacatagcacgctacgaagcggaaaagctaatacgtgcgccgccggcgcatgtctcgggcccagaaggcccagcgctgctgcgccagcgcgagcgtctcctctactttttttttctttttttttctgttttttttccctttttccactttttttttatctttagcatgttttgagtttgaaagtttttaatttttgagttaaaaattttcaaatctgaacttgaaagttttcgaatctcgagttgaaagttttcaaatctcaaattgaaagttttcaaaattttcaaatctaaatttgaaagttttcgaatctcgattctcgagttgaaagttttcaaatctcaagctgaaagttttcaaatctgagttaaaagtttttaaaatttgactttaaaatttaaaacttaaatcgaaagtttacaaatctaacttaaaaaattttcaatctgttagtaaaaaaatctccagaatttttcctaattactattattagtgtgaagtatattaaataatatagttagttaggactaaagggggagggggagttctcgctgctggcgcgcatgcgccagctagtagtcccccgctacgaaggtggatatacgagtacctatgcatcatttttatgattatatcacatagatttttaatctttaggttaaaattcaatagatacaataaaaggcaaaaatcaactaagaaacaccacaatggatactaaattactatatctttaagaaaaagaccaaatccaatataaatttcaaaacttacaagtgaagattcaaaaattacactgtaacttataaaagttacaatgtatgtttcataaattacaagaaaatacactgtaaatttaaatgagaaaattaagtgagagataagaaaaaaaaactttcgagtgagatatagcaaaattgatcgaagaaagggcacatatatgagaagcaaaaggctagcgtggatctatgcatgaggagcacccggagagtggattgacaatcgcgctctatgggtggattatccagtgacccgactacccgagtccaaaatctataccggtaaatcgatggtataacatcatgtgactatctacataggttctgagtacgtactataagcaagcaaaagaaaaggtaataaataaaatttcaaaatacttcgcacctacattataaatatggcctccaacatttgaacaatattgatggtgtacattaatttcacaagcatgcctactagttcctgctaaaggacaaccatgtgtctataaatatggcttccaacatttgaacaatattgatggagtcatgcgccatatatgagtcctatggttgtagtgtcatactaagacctttttaatgtatatatttttttaaccattcttgtagctgaatgatttggcattgttttcattacgaatattttggtgccgtctctgacaaaggtggtgtttgaatctcctgaagatttttatgaagataaagattaagtatttcacgcaaaacgaggtgataataacgtgtgattaattgagttttgattattaccaacttgagaaatggattaatctggtattttacagcaactttcatatagaaagttttcggacgaaatacaccgtttaatagtttgaaaaccggccacgagtatccagaatttcatccaactcttatcagataaacgaacgcagccaaagcataaagaaaatatcattcgaattgtacaactcaaacaacaagcattggacatatttgctcaaaataaacaattaagctttgaaaaattcgtgttcttctgttctcttcattctatagaaccaaccaagtagctgaaataagaaccgcgatatgtacagacagctctataactaaatatcattaacggggcactaggccactaggcactgtatatattacataactatggttgtacttctcttaccttctattcatggcttatgaactatggatacaaagggtatttgttcacgggtcacctcaaaagctaggaagaaggaaacccatagacgtgcaggatgttatcacccacctgaaatatgcaaaaggtttcagttaagcagaaaagaggaatgcaaacatgtcctataactaccgtgctgtttttcataaaattaacaattagttcgttcaaaaggaataaaactaacaattttacaaaaggatgtgccagtaaaatcactgtgactgcgagtgcaaagcatatgcaaagtggatcttcctgggtagctatagtaaattaagaatttgacacccacatgtcagtgttactgatattttaacggagggaaagctgaaagcactgtccacgcgtgggcacacgcacataaacaatgttgatttatcatgtctcaaatactcgatgcaccacttacacaacataatcccatattttcatcattataaaaatatttatgcacacataaatatctcacaacagtatttttgtttggtttaattgattagatttaaactgtctcagttcattttcattgtgttctttcaacggagtgtcatattgtcaggtatattcttttcttttcaagactggcacctgtcaatcaagggaaaataaatccttagatatttgtaagttagacataaacatatttccattgcttgcatgttcttatttgaatgcaaatctggacatctcgtgatgcattgagttcttcaagcagataatttaggcgatacacagaaagaaaatatatgaaaaaatgtaaaatttactatgcctacagtctctacttaccaagccaaaaagcaaatcctgcatgcactttggtaagctcgtacggtcactcttgaccatggaatggatcacttgaactcacctcattctttgcaaactgtcacaaatcagcatcaaattaagcacaagaagaaaaattgaaaatatgttacagatttaattcaaattgtcaagtagagccaaagaggaacaaaccgttgttgttgctattgttgccatcgtgacaggttgacttgctggcaggatgaagttggtccagaaaagagggtccgcagaaggatcagcagggttccaggtatttttcatttgtgcagtaacagagggcaatgtgtatggagctctttgcacaagcaacccattcacgttcatgttaactgcagttgtgtcatgtccagttgcaggtactggggtaactgtctttccttcatccatttctttgctaaaagtacattcttcagatagttttgtagatttttctgagaagcttttgaaggcatcagactgagataagatatcacatgctgataggaccacggaagagggctttgagttagaatggaggccaagggaaggaaacttataaggctcagtccgttgcattgaactttcaatagcacggatttcatcagtaacctcttccattttagatgtatctgactgccgtgtcttttttgggagccaccaccttatgtaatttgtcagatcaattttcctctctaagccaaaggttcctgcaaatttcccatccagcgtgatgtccttccctgtaatttaaatagaaagactggttacaaaaccacatagaatttgtctttctcctctgtagtttgttaaccagaaacagcagtgtagaagtttttatggagacaccacaacctaggctcatgtagtcattgccaagcaagtgtcccaaagaagcatcccatctggaattatggagctgcctgcatgataatgtcacaacagttgcagttataaaatttatatcaatgtgactgtacgtgtccagcagtgtagtgcactgtaatgattagtcgaagactgacatctggtgaataattaagtaaaacagaattacgtacaccctccgtactcgtaaaggaagtcgtttaggacagcgagatggtcttcaaaacacaactttgacttcttgtttctataaaaatatttattgaaaagtgatatatgtatacttttatgaaagtatttttcaaggcaaatatattcatataatttttgcattgtcaaactcaacaacttaagagttattaatgatttatattcccaaggtttgacttaaacattgtcctaaacgacttcctttatgagtatggagggagtatagttttactttatatgtccaaataataaactttcctaaactaatttctagtggtcctcaggacactattaagtcgggatcctatcctagaaggaaatttcaagtatgtcgatctcttcaaaatctcagctacaagtaatcactctcctctgaaaggatattctgttgagaatattatgttttggttggttgagatcccacagaaagcaggatagctgtaaccatacaaagaacgaaggcactgaatgccgaatttccattgacaacagtaatcagtgaggaaacacagaatttcgatgacgcacattcagcatcacaagtacagttgagggactgtggctgtgcaatcgagtgattattggaaagaattaatgttcagcaaaacttgaaggtttgcatctttgctaaatgacactttattttaaaattctctaaatgaagaccaatgacacacgaataagagctagtagtttagtatctaagctatctacctccaaaaatctgctgagcttactaatttaattcatagcagaaatacatgaagttgctgaaaataatttctaatgtaatataccacagggcatcatctttacatactactacttggtttgccataaatatttgtagcaagatggaaaatgttaccgaaataaacaaaacatggacaatgatagtttgtgcacaatagaaaagaaaattggacatgagacttgttactgaattagcatcacaaacatgcatgcaaatataataactgaacatagagttaacttccaaatatatttctcattgctaataagtacctaggaaggccgcgatattttggtaaacccctggaaaaggcactgctctttctgcagtgcatgtgtcttacagttagtacttaagaaccaaagtaatatgcacgtattataaattcacaaatatcctccgaagagacacaagataatcctccttggagatcatctgcatttcctcaagatctcttgcataatcagagacctaaataagcaaatacataatgaacataagcctgaaaaagattaccacaaatcaaattaactagtgcaaaatatagaatggaaaaaacatagtacaataattcataagcaacatcgcaattattttccatcgagatgtataggcatatagataccaaactgaagagatggcatgtatgcatatgtttgttttgccaatattcttctgagacaatgatttttcaatgtcgcttatatgctcagagatgaattttctgaaaacaagagattttttttgtcaaggacacaaacatccatctccgaatcgtcaagtgtaaactgaataaatccctaacctttgcatacaaaagaacataatataatagtcaagagtattcagatttttcaaacatcacacaatagttgcataggatatgtttggactagtatgatccaaagtttggtacaacactctctaagatatcttttggttttcaatttgcatcttaagagaatcagtcttcgaaattgagctcaggtgatgcaaaatataaatgattaaatttaaccaaatgaaggtcttgaagaaaaggcagtgtgtggttaataattgtagaagaactaaatggaagctaagaaaccaattataattagcaagtatagatgactcacaggaaagtttatttgtgtcccagctccccagtatttcaatgcagcaaggtcataagctcttgctgcagcctcttcatcatcatatgcacctgtgtatttgcgcattgaattgatgtggataaagaagtttatacaattgcacattttacagttaacaccaaagatttcttacctaaatatactgcacttgcagggccattttgggtgataatttcccatgcaaaagagacaattccattaaatcagattaattatagctagatttttaaggaaatgacgtgcatggattatctatgaaatacaattaaaattcacctagcttccaacgtcccttggtcaacttttcaaaacatgtaaaatatagctgctaatttgcattgggtatacagaccttgtttcccttttttgttctgattctgattccatgtgcttttatcccagaggtgagcttcatatcggcctgtccacctatgcctatagatgatacaaaacaagtgtcaaatcaaattcatacataataacagctgaaagttaaaatcttgcttacaaattacaacaaaattaagaaagaagtagcatatggtggtacaagaacagttgaataacaatatagaacaaatactacttttggatcagattaaacaccaaataaaagatttaagtatgtaaatacacatatagtttgaaaattcatcttttagttgagccccacacttgtctggaccgaaaagggtccaaaacttgcttcttacccagattagagctaaaccctgtcaacccagtttgacacaacttaaatcaagcatgatgttggatgtactggtcaagtgaaaatcattcattagcttttatatttatttagatcaagcgaagctcctaattatttcagatcgtccccttggagacacaacaggtaatccgatgaatacagctaatccgtatataaccaagtaaacaaaaagaaaaatctagatcccgaatcgacggtaccattttgagcatacaaggagacctgacgaacggatttagcgccacagatcaatccaagcagagaacgattgcatatcccctaataagcatccaagtaaaacttctccgcgactcgagacacggaggagggagagggcaaaggggggaggagccgtaccgggtgacgccgcggtagatggagctgcgcttcccggcggcgcagggcggcatgcggctgatacgctccttggccgtgcacaccctctccttccgcgccgccacgggcctcctcggcggcggcgccacctgctccgcccccgcccccac

SEQ ID NO: 6309 - DNA, 12069 bp, Oryza sativa
caaaataatgatatctctccattagaatcagattttctttatgtttctgccacacctgaaaagaaaaaaaccatttaggccggatacacgatgtgcatcaatgtaaatgatgaattaattcagcccttcaacatttaaacaatacaggatgaatgtttctactgctgtgtagaagcaaacatagaacagtcagagaccaaaacaaactttcagtggccaaagtaaacattaactagttctaacaaactacagacggtaattactggcagtattatcatataaaatgtttatcaaccatgttcactggattatttgcacttacatactcagtgtcatcaagaatcactgcaacactttcatctccaagaaccacatcaagacctttctggtgtcgctgagtgcaatcagagttcgaaatcacctttgagccaaaatatacattatcagggtcaagaagttttgctatttcaattgcataagccttgtcacccatagtgtatatatacatctcaaacatatcacttgcttcttttaaaaatctacggacaaatggtctcaactttgtaagcatctgcattgtctccaatgtgaacaagcttctgtccggaacaactgcatttaagcatgtttctggttaagtaaaattgtagatgactaattcatggttaggcaacagatttaggaaggatcaaaccacaataaggtaatatggaagaatgcaacctcaccattaattagaatttagtgctaagtaataatgccataacttctatcataatagaagcaactagaattgatgttagttttacttttcagtgtctgcaagaagcaaccttcaccacaaattctaaatgtcataaaaatcacatttacagtgaaagaatatgacaaatagctatgacatttccgcagaattttcatatttcaatgtacattacaggccaacttttcccttttttttaaaatggactccaaacatacaaaaggaacatctagttttggactgaaggtagtatctctgtgctcatgtttacaaaatatcaaagtttgtaaatcaatagctaaaaacttacaaattctccaatttaaatacaaagacgtacacattaccttctttagcagcagattgaattcccaattcgttttcagcagcagaaagatcaaagagtttggttgagttgatcagtgtatgatccaagtccaaaatgagtactagttttctttctcgcaataaattctttaaatcagctccacgcagtctgtcaatttctgttgtacctagcctcaaaccctgcgttgaaataattctgttaaattcagataggacaattggaaataaaaatgtaactgggaaagataagaatatatcaagagatgcaatgcttgcataatactacgtactggaaagagtgtgattttgggaaaggtaaatgcaataaataagcattacaacacttgtattatagtaaggactgatttaagtcaaaggagccttaaaaattcaaagatattttccgcttcctgtttgaccgtaccttatggatgtaaccaaaagcaactcctggaacatcttcctcatcttgtcttttcccacatctatagcaaagtccaccaaaaaacccaggatgtggtgggcattcatcaattttaacatctttagaagaacctgcaacagtgtaccatctgctcatggaaataaaggaagtcttgacagaaggcaactgggactccatctaaaagtagaactgtagaagaaactgaagccaaatgtgaaaaactgatgttcctctctaaagtccagacacagcatggaacctcaacaattaaatgattaaaagcaataacatacacccccccccccaaaaaaaaaaaaaaaaaaaaactcctacgacacacacacaagaatggggacagtaaatctgtaaccacatcaactaaatagtatataaaaagtaaataaatttttgaacgcatttagtagataatcaactaatcaagtgccccccctccccctcctctatgaagccaaatgttagtgggttggaagtgaaacaaattagcataccaacggtatcctcatctgacttcattactactgcttgatgacggtgttggtcctccactctacgccgtttggtactgcatattgcatgccgttgacagcagtcagatccaaaatacaaaatccagaaaacagctcactattagtattttctaaacaaaaggacatggattgcatgttcagccaagctttagcatatccaataaatgaaaggaaaattttctatcataccatcaaataaccatttagttctatactatcggaattaaatttttacagtatgtattaatgacactcaaatagcaccccatttcatttaaacacaaccatcaaaagtgctcttttctgtcatgttgaccattttgccctcatccgcaaaaagaaaatttccctgcattcccacagctggttcttccctccccaactcatttcagtgccaagtcacttcaaactcaccaatgcacccccaagactgtcaatgtttacccaacgaatgtcaaaggcacggaccgcacagaagataagaagccatctccaacccctaatgggtgatagggaaccaagagcagcattgaaatggcaacttaggcatattatgattatattgtagtgtaccacaaaattccagtggtataaaacaagatcagtgatattttggtggtatacaaccaatttttccttaaaactatagcgcatttagttcaccaacatataggattcttacttctgcgtaagcatatttggatggccagcttattataggatcaacatatgctaatacgtattgcctgccttcagcatataaagccataggtaggcaattaagctaccacaaatgagaaaattttcataccataccagaactaaggaagttgtggtatctattcaaatcgtagaaagcaatctcatgggatctactatttggatggactgtcattcacaatttcacaattgcagataagcaaatcacttgtaggtataatgaaatgaagtgcaggctacatgaacagtacggacttcaataaaccctagaaaaaatcccccgcgatgatgatcaaattcgttgccatcagcattcgcacaactgaatccagcaaccatcgcaattcaagcggaacaggagcgaagaccctcgagcacccatctaaccggcccaatcaaacagtaaaaccctaacaggttcgaatggggaccaaatctgctcgccgtcaccgaccgtccaacaccgaaagcgcgaggagcacagagcccccgagcgcctcaagccgccgccatacccaactcgaccggctcctcgcccctcgggacgaggtgagagtacggagaggcgcgtacctgctctgctctacgatggcgtcctcttgttccacgaccaccaccacatcctcctcctcctcgtcaccaccttcgtcgtcgtcgtcggtggcggcggaggggtctccggcggaggccgagtcggcggcggaggtcagctcgagctccgcgtcgaggagcgccgcgaagtcgtcgctgccgctcgacgacgacggggaggacggcgacggcgactcggcggcgaggctcatgaccgagggcaaaggggcgagctttggtcggttggggtgggtggatgcgcaagtgttgtgtaataaatcatagggggaagaaaagctggcccgccagaagaaggcctccgtttgggcctcgtttgggccatcatctcaggtgaaacggcccatgatgccgcgagatctcccggcggcgggataagttcaatttgtctctcttaaccagtggccgaatcttatttgtatccttaaatcacaataccaaatatgtagaccctgaactattaaaaccggtgcaatttgactctctcgacggttttggagggtggtttcgttgactacgtggcggtgttaccttttctacgttctacgtgacgttgaccggatgaggcaacgcgcggggcgccgactccaacgcgaggcttcggcttgtgacttcgcggctcccgagcccagacgcgacgcttgcaccggttcctctgcaagctcactgacagcctgcgagaccacccaaactcgtgccagctcggctcggttccgatgtggagttttgagaccacagtccagggtcacgcgttttacatgacctaagttcgaaagcttgctggttcccacgcgattgacgatggattaattaaaaacttactcaaacacggatgacgtatcaaaatcttagcaaaaacatcttaaatttttataatagtagagatttactaataaaaataggaaacatatcctatgcacacaagatttccgtgcacaccaactggcaaatatcacgaaaaattctaaaaaaaatttggacatttactcataatagtactacacatatctgcaaaatctcatatttaaattcattatattttagccgtagcaaaaaagtgaaaaatctgacagatttaaggataaaaatttgtcagaattttatctttttttgttacggttaaaatataatgaatttgaagataagatttcacatgtaggtgtaaaactattggaagtatgtgtccaattttctagaattttctgtgatatttactagttggtgtacacgaagtgtccacgggaagcttgtatgcataggatatgttcccaataaaatatttttacaaaaatttggttttaaagtttttatccttgctaaaattacacccctaacgttatatgggaggctttttatgccgtggcacatatcctttggtatgctgtaataattgagcgattgataggtggtccccttgcagctcttaggagggtggcaaacgagttgcctgtaaaatagcgacatacgatattttgcaaggtcctggctataaatggccaaccctggtcattttataggtggtctctgtaaccctttgggagagcggcaaggagttgcttgcaaaatgaccggttatccttcatcactcgatgtgaccgttacaatgtgtcaatggacgtgtgccacgtcataaaaaatgcattttggaagggagaggagttagggatatagaattgtaaaacttgaaaaccagtttgttttaaaatattttaataagagtaaattgcattggagatacataaacttgttagatgggtacaatttaatgcataaacttgtgaaatgctcgtttcagtacacaaacttgtctagttagtgcgaacgaggaccaaaataacttggcaatattaattttacaaagctgatgttgattaagaattgtgacgtgcatacgtgtagtgagtatgcataaaaaaagcaatatttataaatttggtctctactttatccttcatcatcgaaatgatgaattccatatatcctgattggatttttttatcactgttggatttttttaatctttttctactattactatatcctattcttttttttattgaagatgtgtatgtctagtagcaaccttctctgatatatgtctacatagcatcctaatcaacttctaaatcaataagattagccatgcagtgtccttttcgtcttcccccgcatgcaccagacaagttcatgcaccaaaataaacattttacaagtttgtgcactaaattgcacccacctgacaagttcgtgtaccagcaatgcaatttactcttttaataagtaaaattaaaaattaaaaagggaaatccgagatctcccgacggcggcgcgtgtttcgcctgcgccgatggcggcagttggcgcggacgcccgacacgagatcgccgacgcgatcgcgcattcgcgccgcgcccaccagcagagcagaagtgcaggggagaccgagtggaggagccggttgggcatggagaccagggaggaatcccacgatgccagcgtcagacgagagctttgtcaacgacaacgacaaacgccgacgcgacgcgcgatatccccccagccttaacttaagatcgacgtcacgtcgtcgtcgccgtggagaaaacaatccccagagttggaaggcgtggagttgacctgacgcgggaggttgtgagaaactgagaaccaaccaaccaaccgctgagctgcacgcgtggttgccggagattttgctgctcgattcctgcactaccgctgctgcttccttttcgcgtgcgtcggcagctagcgcgcgcagcagcgagcttgtgctgaatacggcagtattgctcgctgtcgcgtggcgcgcgcactcgcgtagtacaccgtcgcgagcacgcacgcacgcgcattgcctcgatcgatcgagccctctcgacgggagttttctttttgtcgccggtgtgtctctccttttgtttactccctcgtgggctcctgtcaatcgtcatgtgcaaagccggtcagatagatagatagatattcagatgtttcgtcttttctcaggccgggagaggaagacaggaagagacgtcgaattgcacgtgttgtgtgcagccatgcaggtgtcaatacatgtgtgatgtgtctactaccaatcgcatgacctggtcgctcctttcctcgtttgttcaagtttaaccagtaaccacaccgacaccacgcgaggtccaattaagttcaatttcgctttggttttatatcattgatatgtatgcatggctgattgtttcgctttggttttattgagtttatgattaaacaaattaccaacttcaagcagtaccagagctagaggcactatcgaccctaggcgactaatatcgctcctaggtggctaggtgtccgatcacttcttgttgatatcgatggcaccctgcacccgatagagcaatctgcagtggagatgtaatgcgcaaattaagctagcttgggtggccgtccaactatggcctagctacgatacttcaagatttatcagattttgaggggaaaacattaaaattgtggtggttaagtatcatagtatatctattaagtttacttattagggtttaaaattctcgtgcgagtagcctttggatagatatcatgtgaggtccataaaaaaaattattaagcgctatctaatgtgaaaatgcaagtgtcggacgtccaatggacccgagaaaaatcgggcgccgcaccgcccgccgcccacgcgcgtgctccaggcgtccccaccacgctccacgtgtcccccaccacacgcgtccccgttacaacagtcgtccggatataacagaaacaccctattaagggaatccgttttatttttttccaccaacaatatttcagcaagtgaactcgtgatgtttcattatgcatgaataaaatgttgcagtgggttttttatactgtttaatattttccatcttgatggacacgtgggttgttgatatacacggggtttaagtgttgaatggcttcgaatcattcgttgcatacgttgaacaaaattgtttcatctagcgatctgaccgtgtttcacttttttaaagaattgaaacattctttcgctatttgctgaaactttatttttatatagggtaaaagagcgtctgattttttggaacccgttgtttcatatgttgtagcaaaatgtttcatgaggtaatttagttgtgtttcaactttttaaaagactgaaacattttcgatctatttagtgaaacatattctgtcagggttacggataaggtataccctctatccttggatatacgttgtatgctgacacagtatacctgtgcgtatacggatatttcctgtatatattaagaaaatctatcacgagatagaaacggagtccacagatggagggagttctactcggacaagactgggtcgttaccatatcgtgaggggtccgatatctccgagtcccacttggagatcaactgatccgcggtataaaagggaccccccgggcaggacctaagacatcgaatctcactgccaacacatacaccacagcctacgaagccggagcctacaggagccaagtcgccgggtgatctagtcgaaccaacttgactacgatctcgtcggtatcattgagttccattattccctttgtaatatgtgacttccatcatataatcccataccaactggattagggctattacctatcaaggggcctaaaccagtataatccttgtcttctatttgcttgatgtcgtattacgtagatcctcgtaccagcgtaccccaataccctctatatccggtctacgggtatcccccgtcgacatattcgatctttcaaaaatcgggcgctcgatttataggcgcctcctatctattgagcatataaaaaagggtgtatttgtactttgggtttgttggaaccatgccaccctatatttgcaaaatttgagatatgccacccgtatctcaatgacatataggacccacatgaatcgatgacatgtgggtcagggtggcatatcacaaattttgcaaaatttgtgtggcatggttcaaattgtcccttgtacttgtgtgacggtggtgtgcctccttcctgctacaaggaaaaaaagattagattttgagatgagccaagttctttaggacagatcagtatctagcttgtgtgaaatgtcggcatggtccctttcctcatttttcatgtttaaccacagtaatatccacaccacccctaaggtctaaggattttgatgtgcaaggctggttgcgtaacttaacttggtttcattggacttaccctcttcagatcaaattttctaggtggtttaaacatatagagttacgagatgacgatttgacgactccgtgttgatgcgcggagcaattttggacgctaacgtcatgacgtagaaatgatcaattttcagaatgaccttgatttcactaggttgattcacttttgtagaactgaatgaatgatcaatacagtgaatcggtaaagaaagataactattgccctaacctaatgctcggtaggaaaaaagacctaaagaaaggttttgtcagttgtgttgctaactccaatttgctacggaagtgaccctttctatttatttatttatttatagagatgactacactcgcgaaaacaaacactttgcacacgcaaaagtaaccaaagcctaaaactaaagcctgacataattttttgcgtaacttcacatagttgaaaactatataactctatcttcatttagatataaccaaaccaaattatgattaccaattgccttttcacattgtttggtcgtattctcaaatatagcgtgcgctctctctctctctcctataggaggatctctatcacatttaacagtttgttttttgaaactatcaaatacaactatattataattaaaacgtaaccctacatacattgtaattaatttgtaacatttatatacttcattgaaatgtgtatgtgggcaactggttagcagcacgaaccattgtcctacaaagcgggagtttgacttccactagcgtgagtcggataatttttctcggaaaatgctagggatcgggcgcccgccgcttcccgcgcctccgcgcgggcctccgtgccgtccccaccatgcgccccactacatgcgccgttgcaataaattgcctacatattatggaaacgctctattaagggaatccgttttaatttttgttctaccaacaatgtttcagtcagtgtactcgtgatgtttcactatgtatagatcaaatgttgcagtgaattaaaacatcctttcgctatttgttataacattgtttttatatatggtgaaacaacacctgattttttggaaaccgtttgtttcatgcattatagcaaaatgttccaagaggtgatttagttgtgcttcagctttttaaacgattgaaacattttcggtctatatagtgaaacaattctgatctatttggtggaacaacgtccgatttataggcgcctcgatttttctcctgccttgcatgaatctagagagaatacgacggtaaaaaaaaatcaaaagcgttgaagaagaaaagctttacgttcttcagaaattccgattcctttatatgtcaatttgacaatatcggctacgatacaagtaattactttaggccaaattaagtctccagcctgaatgtttttgtccacacatgtgctgggagtcaaatcagggtgtttttttttcttaagttatgcggatatgacacatttgggcccatgatttttaattaagtgtgttaacaggatagtactccctccagtccaaaatataagcaattttggatcctgacacggtcttcaagatgctactttgaccaacaatatctataaaaataagatgttttaaataaaaaatttgcatatatattatgatagtttgcttaataataaatctagtaacatcaattttatatgattgatctttttttttcttattaatggttaaagttaaaaacgtttgacttgttattatgctaaaaatgcttatattctgggacggagggagtactatctcagtccaaaattagatgtcgttttgacttttttgcttgtaaccttttaccattcgtcttatttaaaaattagtacaaatataaaaagaataagtcatacttaaaatatttttgataataaagcaagtcacaaacaaaacaaatagtaatttcataatcttttaagtaagacgaatggtcaaccattacaaacaaaaactaaaaacaataagtatgttgggatggagggagtattcacataggtgccattcaggataaaatgacttcaattttcagcagatgtgtgcaagttgagttgaagagtgttgaatacccggttttaaagttaagatgtatattttagattaacacaaaagttgaaattaaggaggtaaaataaacttatccctatgtaaaaatacctgcaggttgccatcgtacagtacactacccgcagctcgtccggccctacggggcccaagtgcaaaaaaaaaaaaaagcacagtcagcatccagatcacattcgtggacatcagcacagattctcatctagtcatttggttccggcagcgtcgctgcactgcatctcccttgtctccctctcacaagttttccgccgttcgcaaggcaaaaattctgaagcaagttgacgcagcagcgagagcgcgtggtttaattggttggttttgtgctgttttctctaaaaaaagacactgtttgttcgttttgttttcttgcttcagaaatgatcaacagagacctatacctgcataacgactcagaaatatcctgaaccattttaagccaagtgtttactactgaagaatatgatcacatatggtgacagtgacacaatggcatatcgattgtagatcacataattaagccacgggtttttcattcagatgcatccatgcatacatatgcaagccaatcaataatattgataacggctactaattacacctcaatcaccaatgatataacggagtcatataccgttcttgactgatgatcaatcaagaagctataaggtgagagaaaaatatagatcgaaagaggcactgtgagatgccagagatcaaaagtgttcgatcaatcacgtagttatggataccatctcctaggtagagatggatcaaggtgattaattaattaagcttaatttagcctagaaattgattgattagtagttgatgtgatgatgatgttgatgtgtccgtcatcttaaaagtggttcaggaggtggccacccagaatggggcagcctgctccggctcccacttcttgccgcgcctcgccgccgccgccgcggcgacctccgcctccacgcaccgcccgccgcgaacgtacttggcgacgccgccgtactcctcctccggcgtcgcctcgtcgccggcgtcgtgctcttcttccttcttcgtgacgatggcggcggcgtcctctgcctcttgcttgatcagttgcttctccttctggtggcactcggcggcattgctgcagccggcgcaggggacgaggaggaggcggaggcggccgccgcagcgctcggcctgcaccccggccgtccgcaccgcgtacaccgccagccccccgtc

SEQ ID NO: 6310 - DNA, 3206 bp, Oryza sativa
ggggaggaggcgctgccgccacgagaagaagcaaatggagctcgagctcggctcgctcgcttgctagctcagctcagctgcgtttgtgggtgtgtggggaagaggagagcgagtaccactcatttatatagggccacacaaggagggggtaaaatggtaaattcataattaaaccctcctaaaaaaattaaattcatctttgcttttgcttaatttgctttttccagtgttgctgctgttagctaatggctcaatgacggcgattccttaatgcaaaaaaagaagggtcgccatggaaggggcagctgctgctgcgggttgtgtgctactctctctgccctgtaaagttaggcagtgtcctccaatggtgaatttgcctttttgtgcaagtgagtgtggtgacgtcctcaaatgtgctgattttatggcttatacaagagatagttggtcactgaaagtgcatcagcttggagtttatagggtgttagaatgaagctccaactggcactgacgcatgcttgattgcctttgagttagggccaatggaaataaatatatggagccactcgcaattagaatggggtaattggttgtccactgttcactggttggctgggagttatacttaaatattcaatctaggccgataaatgcgtgcaaatgtcatagacctataaaggtagaagttttttttttactgtacttaaggttgtgcagtatcaaatcttagctgttgatctagcatcatccaacggtcaaaaatcatccgtacctcgtggtaccgcacctccccattgaaacgataccgtgggtgggaggtgtcacgcccagaaattcccgaataggattccaagcagaatgtgtattaaaacccccgtccaggaccggccgggtacacaaacgacaaagttgacatacagatccacgtcttacaaacatcataaagtcttacataaatgcagcagaaaaattaaaagataactggagctaagccttgacttggaccgcagcgggatcaccactccacaggcatcctcgacagcacgaacgaagcctactcctcggagaagccaccatttgacaaatactcaaactctggggtttggggaaaatagagcaagactgagtactacccaccgtactcagcaagtcatatcaagggatagctatagaggttcgtttgcataaagcgagcatttataaatagtagttgaaagtagtaaaacaattgtaataattaatcaatattaatcatccactgtccaacgctataccacgttgcaacaggcccaaccacccacctatactattcaattccattagactagactagggtgaaactaatcacggtgaatctggttgaccgcccataaccgcgggcacggctattcgaatagatttactctgatcagaagtgtacaactatacccacaagacatagccccacgacacgtttccgtgcgccgacatgccaccacgacataccagatagaggccgtgacaggaccgttcacataaccccctctaaccaagcataccacacctcaggtttcacccccactcctcgcaaggcagcgggcagtcccctctcgtgcctaggtgaatccggaagccgcataggccgtcgcagggcccatccaaactccatcacgcccacccttgcctggatgcgtcagctagaggaaagctacactacaagcccagccgttgcccacgctggcttgtggtaagtacgaggaattcttctagggtttcccgcgaaccgatccttaagtgccatgggcgcgactagcaaaaccatgcacccacagcccaccatttaacatattttaatgaagcgacaccaggacggtggctctaatccaacatcaacactagatcctgaagtctatacattaatataattttccccattgtgtgctagttgaactaagcatggctaagcaatccctagtccaatatctaggcatgttatatcccaagctaacaaaggaccatggtacaaaatagcatggctataacagtaggtaaacatcccatggtaatattataaaacaatgcagtatttgaaggaaaacaatggagcatttgcaatataggatcaacatgttcaagtgacaagaatgacttgccttgctctgctgctggaggaacctcggcgactatttcaaagtacgccggagcgtcgggagagccggaatctaagcgacatacaaagcaaacaatacaaacaggctataagactactgaaacagagaacaaaaccatttttaatggattctatatatatttcttgatttactgagatttgaatgggcttaaacggagctcagatgaattagatatgaattttagaagattcactgtgtttttactaaaaacagaaaaatccttaattgatttattgcgcaataaataaatcccgggagagagaggggcggtgccgacatgtgggctccacatggcagtggctgcgggcgctggtccatggtggatggggtccatggaccgggaaaggggcggcgcaccacgtggtgctgacagggcgccgacgcggcggccacgcggcagccacgcgggcagccgggttggacggccccgatctaccgcccggtagatcggacagcggatgcggctcgcggccggcgcgcgcgggcacggctcaagctggcccggtggccatggcgcgcggcggcgcggcgcgcacgcagcggcgacgcgaggcagcgaccggcggcggagggtggcggcgtcacggcaacgtgggcggcgatagcggcggctaagcggcacgggagagagggagaaaggggaggaggggcctcaccaacgacgatcaacgacggcgagcgacggagggcgatggcgaaggcgagacgagctccgggaccacctaagggatcaaaaggtatgagttagagagggagagggaaaccatggatggctagggcggcgaccgaaggcgttggccacggcgaagctcaccggtgcgcggcgcggacggggttctggcggtggattgctatggaggaggggtggacggaacggcccgcacgacggcgaacatgacgacgtcaatggcgtggctcggcacggtggctagcggcggctagcggcgaccggagcgacggcggcggcggcggagaggaggacgacggcgctagggcggtggagtgcacgggagcgggcggctgcaaaacgaaaaa

SEQ ID NO: 6311 - DNA, 863 bp, Oryza sativa
atggcgacccttctttttttgcattaaggaatcgccgtcattgagccattagctaacagcagcaacactggaaaaagcaaattaagcaaaagcaaagatgaatttaatttttttaggagggtttaattatgaatttaccattttaccccctccttgtgtggccctatataaatgagtggtactcgctctcctcttccccacacacccacaaacgcagctgagctgagctagcaagcgagcgagccgagctcgagctccatttgcttcttctcgtggcggcagcgcctcctccccgtcgccgtcgtctccacgtcgtccgctccgatccgcctcgatcggcgttcgatcgcgtccaccacctcgatctccagaaacctttatataagcagccgcgtccgcattcttgttcgatctatctctccacaccatgccttcgttgctcgactcgccgccgcagatcacgccggcggctgctgccggcgactggagctcgctgtacgcggcggcgcaggcggagacggccgtgaaggcgccgcggcatggggcggtggcggtgaagaaggccgcggcgtatggtggtggcggcgggaggaggatcaagaacctggagatgtgcaccgaggcgctcgggtgcgagaccggcggcgtcgacggcgcggcggccaccgccgccgatgccgtcgttgtcgctgctgctgcggcggcggcggcggctgaggatgccatgcccgtggtggtggagaccgacggcgcggagaggaagaggcgcgcccgggaggaggaagcggggtcgatggtggagctggcggccgccgcggcgagggcgcgccgcgcgggcccccgcggcggcgcgccgctgcccc

SEQ ID NO: 6312 - DNA, 31706 bp, Oryza sativa
aaagttaaaagtttgatgaaaaagtttagaaataaactcagcctataatacaaattgcagcaaatgtatgcagtgtaatctatgcacaaccgtactagctaatactcatggttagcaagtcgtcatagggaggaacatgtcttcaagagattcaacatcttaatacgtgatacgagtagagaccgcaaattgttcaaccaaaggacatcaccactatcaccaaatgctatcagctgtgtcctttttaaaaattttgtcatgaaccaataaatttggcacttgtagttatttattatgttttggaaaatagaaaagtacgcatgttctagatgacggatcacgcacgctagctatatctcaaacaagatcacactatcattgccatctctcataaataaaagagagagaggatcatatatcatgagtagtatcatataattgcatctcatgtccctgtatgactaataggcgatatgatcgatctatactagtataccacatgatcacatgatttttttaaacacatgctgaatgcaagctgccacctactactatacatatactgtactatgttgcattcctgtaataaactggccaagtggtcgaccttctgccctccggtctttagtctcttactaggccataatctcgtcattaagagtactaattcttcttcaaagaaaaaataattaataagagtactaatgagatgacttgaccgcttcagaatattcctgggccgaaccaccttttctatcgttgattacttgtaggcgttcgagaatttatactcttacccggtgaccacgctactgtcattttctaccgtctgtttagccctttcaaccatttcaatgtacttaagtctatgacacagcccgtttcaggcgacgtcatcaccttcaagttgttagcttatactaaaccactgggccggcgtgactgagataggcatgcggtgacgtttagggattaggtagtttcgttttatgtcaaaataaatttattaaattttgttgacgtcaaattttgttattgtttttttaaaatgaaataggcatagaaagacctctttggtttgacgtcctaccattttaggttggtatgcagatgtagtgatgtattcagggttactaaatattcagtgatagtggtttgttaaaatattgcgtttgtcgccttatttcaagaactttattttttaccgaaatcaattgagttctgactttcaaaagttagctttttgatagtacgaattaaaaacgtgcatgtagtgatgtattcggagctaccgaatcttgttgtgaacttgtgattaagtggtttattaaaatatagcttttgtcaccttattttataagaaccattttttttaccgaaatcagttcagttctgactttcagaaattagcttcagatatttgagcatatggatgaggaggtagtgaaaacgtgcaaattaccagatgtagggaagtatttggagttaccaaatcttctcgtgattgagcggttggttaaaaaacttaatatagtgcttttgttgccttatttcaactcctttttttttttaccaaaatcggctcggttctgactttcaaaagttggctttcggagatttgagcatggatgatgaggtaggtaccaaatgtgcaaagctgatgaggtcaagttgagatggtcaccattattagtttctaatgaacattaaataggatagaaaataaaaaaactattaacacatgattaattaaatttcaattatttatataaacttaaaaaataaatttatttaatattttaaattaatttcatctgaaagtattttatgcaagttttatattaaaaagggcgtatttaaaaaactaccgcaagtttttttaattaaaaactttcagtgtagctatattttaactacactaaactaggatataacttatataaaacttgtattcaagtatagtttggtttagttagttagtactgagattttaagtacaacattttctatcgatttttttcatgcacatatttggagacatatgtggagacaatctcatggttgcaaatctaaaagttttagggaccaagaaaaacctacgaaagttttattttttagtaaatttaaaaaacgaactatcatcttaatcagaagtgaaggagggcttacccgtcgaggaggtggaggtgcgcctcgaggttgtggaagcaggccgggtcgagcgtgtccttgaggaacggcgaccgcttgtggtcgagcgcgagctccacgccgacgtgcgcgtagcaccacggcacccggaggatgccctccgccacccgccgcagcgccgccggcgccccctcgttcagcaggatccccggcatccgcgccaccccgtcgtgcacgttcaccacccgcagcgccttcaccccgagctccccctcgaacctctccttgaacctcgcgttccccaccctcggccccgcgaacgagtacacgcacaccgccgccgccgcctccttcccgccgccgtgcgccgcgctcgcggcgcccgactccgcgatgtcgtacgcgctgatcatcgccagcgcgctgccgaggctgtgccccgtcaccgtcacgctcacgtcctcgccgagcgcggcgtagcgggtgacgaggcggcggacctccgtgagcacctgctcgcgcgcggagtacttgcagaagcggcaggtggggtccttgtcggtgtagaggtccacgaagccggactccaccttcacctcccggtccgggcacgggatgccctcgtcggcgacggggcggaggaagtccatgaggtcggagacccactcgaggcgcgtgaccgtgccgcgccacgcgatggcgatgtcgcgccggcccaggcgcgcggtctcctcgtcggtggagacggcgacgtagccgatccagttggcgcgctggctccagatcttggcacccgcgcgcgactgcgagaagaagtttgggaagcggaagttggaggtggcgtagaggtagcgggtcacggtgtagccccgcgcggcggcgggcatgccgaggcggtcgaagaaggcgcggcgcgggtacttgcagctgccgcagtagcgggaggacgggtcgtagtcgaaggcgtcgtagcacgcctgcgcgaactcgccgtagcggatgagctccgagcggagcagcgggtccatcgggtcgagcagccccgcccagtcgtcgcgcccgtggatctcccgccaccgcgccgccagctcgtgcccgtcctggtggtgctgccggtgatggcgcctccgcgccgccccgaggtcctggctatcgtggtgatacagctcctcatcctcctcctcctcctcctcctcctccgccgcttgtccgtggcgaacgacgacgtcgtgctcgagctggccgacgagggaggcgagcgcatcgtccctcgtggccgcggaggggaggaggcgcagcctgtcgccgtcgtcgctggctgtgccggtgaggaggcggcacggaggtggagcgcgtcggaaggagaggtgcgtgtgggcggtggtggtggcggcggcgcgggggagagaggagaggtgcggggagagttcgcggcaggagatgggcgccatcgggaaggtcaccggcgaagtcgccgcgggttcgggtgagcgagtattctggacgtaccaacgtggggagatcatcaaaggagtagtttattgatgatgatgggtgtaggactgtgggaggctctgtccggtgggtcggctaccactgccgtaatttattactccgatactgtaacaatcgattaagataacagactttgcctcagtcttcaagactctaagagccctttaaatcataggaatacgaaaacataggaatagaaaaaacacaggattttgatagaaatataagtgtaaaacagaggattgcaaaatacaagaatgaccgtttgattggaccgcaggaaaaacataggaattagaggagagataaagactcaaaaggaaagtttctaagaggttttacctcatgttagaatttctccaaaacttacatggcattaggcaatccataggaattttataggattccataagatccattcctttgattcaaaggctatataggaaaaattcttataggaatgaaattctctaaaaatttctatgaatttcctttgaatcaaagggggcctaaacatcgtcgaccttcgactggtcatggagtagggaaccggacaagtccataaaatttgctcgctaatttatttctcacatgatagtataatattttttttaaaaaaataaagttcactcgttagttcatttctcacatggtaatataacttttagataaaataaactagaaatgaaataagaagaagaaaaatcccactaacccatcctgcttgcatccatagagataaaagagtggcagggaaagggtgagaggagggaagaggacaactgaacatttctgtttaacagagtatttattctatccttaaaaaaatcaattgtttatatatcttgttttaagctatttattaagttttatttctaaaatatttaacttatccttttattttacaaaatccacatcaataatatttttaaaaatctaaattaaattgggccttaggtgacttgagaagaggagagacggagacactagtggtggcggtaataggaaagcaataccaacgagtgacaacaagtctagaggcggtagtgcataggaaggtgggggtgtcactactctagcagggagaaaaggaatccgtcaacaggctataccccatatatggtatttttgaagtataggagtcgttggtgtcaaggtatacgcaagattaaggtaaaagttaagagacgagagacatttattttttatacatatccaagactcttacttacgtgtaataactttactcctgttgatcggaactggtgttgctattatatatcaatatcacacgagtacaataataaggatgacctaacataatctctatcagtatagtggtgtaaagctgtcgacgactagtagtagtcgacttcctcgaacatgaactcaacaagattggagattgccctagcttttgtggcgctatagtcttgtcttgacttatgctaatctgtattggttttttatttgtgcgtcccttctccttctggtggacttgtatttatatcctcgggtgctctcttgtccaagtaaggcgagggaggcaactatggatacgattcaagtagaccttgtagtgttcaagtaggactttgtttctcttcccttatccagaacaccttccatatatgagacttgattctgtattaaacttagtatatggttggtcccaccgagcctaaaatagaagtaagaagtatctcatgtccagaacacttacagaacctccattttgtgattcagccaaggcgctagtgtgcggacctaaagtcgggaacacgagacaatgagtttatacaggttcgccgtacggaaacgtaataccctactcatatgttcttatctggatccttttgctgtagtgtgtacaagatgttaagtttcttctattctagagctggagagggctcttgtccttagtggcttttttggttggtagattcaggatgccctcctctctttgtctcttgagagtagcggtgatattgagttctatgtttgggtacatgaatggtgggattgatcacgaagagatggattaattagtttgttgacgtgcatgaatttctaggcaatgctaagcatgtaaaagtgattaatggaaaaagaaaaaaaaagaaggcaaccgataaatagacaacttaagaaaaaaatattttggtattgcaatgtgatcttaggtcctagcttctctcttcccattacgatcacctttgtgcggagaaagtcaattcaaacattttaagggtacatacttcatttcttacacatcatcgtatatatattatatgtctaaataaaaagtaactattaatgacatagtaccaaattttggaaacaatgaaaaggaactgttcgatttgatatcaaatctgtgtccataagagagaatatgcgcaatgacaaaatttaataggatagcatttccatggtttgtctagtttgttaccctgttcaagttctggtacgatggattttgatagaaaagcaaacatagattctagttggatcacctgaataggaaaaccgtaaaaacgtagaaacatgataggatgacaatcaaatttctatgttaactttaaaaatacataaagcttcaaaactattatacatagggaacatgcagaaaatttgagtcacgggaagaagaaaacatgaagcacaacctcaatcttattttcctaaatgtttcccatggattggccgtccattccatacaatttttaaaggaatttgtagtgctggatcctttgttttaaatgtatgcattgaattttttttcataggatacaaatctttcaaaattcctttgcttttctattattccatatgagctgtgaaaatctatggtgtaaagatggaagtgctaatattctcgtctattttttcaattgagtcaaatgcattgtcaattcttaaagttatacttggtgtcattatagtttctaaactttcgaaatacaaatgtaacccctcattcttgttaaatatacccactccgttttcaaatgttgtaacatagaatgagattagacccatgttagcactacgaatttggataaagcagttatctgatttgtttgttttactaggataagtatatttaagtgcagagtgactatcatacaagttaaaaaaaatagtaggacgtgtactctatgtactaacgtggttaccgacgtgtatttatgttgttttcaaagtttaggaatcaatattatatcgtgatataagtgtcagcgtatttcactcttcttaattagttgcttatagctactaatggggttatgttcggtaggccgaaactatagctgcaactttatctgccgctgtcttgtgtgggtggtactatttgtgcttgctatagcacaacattaaaccatatagccaaacaaccccaataattcttagcagatattctttttacaaaattagttgatagatgtgttcaatgtgttcaattaaactgtatctctatctctactattataaaaattgaagatgtttttgctggtattttggtacgtcatccgtgttagagtcggtttttaaatttttttcgcttttagaaatatacatccatgtttgagtccaattttaagttcgtttgcttttagaaatataaaaggagtcgtataagaaatctctttaaaaaaatttgcatactaacttaagatgagtgtcagactcctaattacaactcatgattttctagaaaaaaaatatccaagcgaattctcacagtaaattttaccatagccaaaccgtataacaataataagattaaaataatattcatccgttgtaacgcatagacatcttttatagtaaactaaaatatctggttagtgcacgtactcatgtctcccgacgcattttgcacaagccggaagttaaactccagtaaaaaacctgtcacttaaaccacgctagtttttgaaggaaactgccatcaaacggtttgtgcgagtgagcgcgaccgggaaaatcccccgtgcgggcgccgggcggtgctccgcaatcaccctatccaaccaaatccgcgagaaaactccatatcccctccactccactccacgcgcggctctacctcccactcccccctctcctctcctctcctctcctccacctccactctccgctgtccacacgcgcccgcgcgcgcgagaggcgagagctcgctctcccagtcccatccctgtcgctccccatgttcgccgcttccacctcctccaccggcctccccttgccgcgcgcgggcggcctcctcctcctccccacctcccgctccctcctcctcccgcgccaccgccaccgcctccgcctccgcgatgttggcgccgctgcggccgccggagggggagtgtccggcgggggcggcggtgctgcttcttcgagggagccgccgaggacgctgttcccgggcgggttcaagcggccggagatccgggtcccggcgctcgtcctccgcgtcggcgccgacgaggcgctggcctccggggacgcggtggtcgcggccgtggcgcggggcgtggggatcgtcgtgctcgaggccggggaggagggcggcgggcgcgtctacgaggccgcgctctcgctcaaggcgtcggtcggggaccgcgcctacctgctcgtcgcggagcgcgtcgacgtcgcctcggcggtcggtgccagcggcgtcgtgctggctgacgacggttggtgactgctttttttctccccagcttcgtatttcgtacgagtagttgcttgttgtggtaggtagttgcttgtttgaaacaaagccattgaaaaatatgtttcagggtgatatttattcggtttgaaagttgaggccgaacgccaatcgattttatagttcatggcgaaaaatggatttcgagcaaagtttaagggccataattggactttaccctttagaatatgccatatggtttcgtataatttagtaccacctctatcccaaaataagttcatttttcatcaatcacacgcatatcataaaaaacaaaaaaaaaactagaatactcctattttatcaaatcccaatgcaactattcatcactttatctactccaaataccatcctttcttcctttatagttggtacccactacaagtcatttatgctataaagcttaaattctgtgagaccacatcatcaagattatattaaccattagatcatcttgcgtctatgcaaatcaaccattagatcaagttcttctcagccgatggcatttgagaggaccaatgctttttgtcttccgcttaattacctcacgcatcattatatatccctttatcactaaccactaaccaatacatctcccacctaaagcctacaccactacatttgtgtctacctttttatcattccttttaatttttctaatgcatctactagccatatctaggttgatccaatggattttcttggaatatttatgcttgaacaggcttcctcaatcatctaaagaggaaatgtcaatggtccaatgaaattttggtttgtcactgtcatagatgacatcgaaaatttgttggacagattacaacactcgatgatttttaccaattgcaaggatgtgtatctatgcctatctcctatggtgattggtttttggtactctatcatgatcttgcttcttttcatatctgatttcttcgtgttaaaaggttgtgccaaatctttgtgtttttaagaccgcaatcactaaatttgtttctccacagttcctccaatttacttataggtgaacatgtttcttgaaattactagattcatgcacccaatagttgtttttttttaagatcatataccaacatatgcatgcaacattatccgtattttctctttgttttctcacaaaaagaaatattttattagttatttaaaatatctgaatgagatcttaagccaatttagtacataataaaaatagtgtcatgtttgcttaccgtttatggttcttcgaaatgggagtatcttaattggaatcatgtcatttctattcatatagcaattcaatgtacagatcgaacgttcaagcatgttgatcatgtaattatgataaatttataactatatggtcccttctatgtaatgatactataccaatagtcaaaagttctagaattattcagtcaaaaaaaaagttctagaattatagcttacaaattcatgatataactgtcccgcagcaacgcgtggggtatcaactagtcattcacaatgattactccaaaaatgaacttattttgggacaaattgaagggctaaaaatgaacttaatatgggacgaaggaagtacattttttagtcacttgtcttacctgctccttttcccagttttcagtacttgtcatgtcaataactttgaccagatttcgctagatattgttctctgtcgtggtgctaaccaataatcagtcagtttctttagaagtactaaaaaagaaactactagtatgtagcaacaaccaagcatttttctaaggaggttccttctgtactttgatgcaggtattcctgctattgttgcaaggagtatgatgatgaagtccaactcggactccatatacctccctcttgtcgctagaaccatacgttctgcagacactgcaagaagcgccacaagttcagagggggctgattttcttatcatcgataccggcagtgatgatgctattaatgttatgaatggtgttagtggcactcagcatgtgaagatccccattttttccactttgagtgattcgcaaagtgaagggtcttactcagataacacatccaggttgctccaatccggtgcatctggaattgttatgtctttggctggtattcaagtactcgctgatgatattatagaacgggatttttcaaaagtggataccgctgaaagtgtcctacaggctaattactcttcagctagtactttggaagaagcagataatgtaatggtcctaactcgtgagaaggcaaaagttgctggattcacaaaactagatgaaaaagtaatgcagctgatatcgatagaaaagcctattctaagtgaagctgttgctgttatccgcaaggcagcaccaatggtgatcatctaatgttacatatttggtagttgaagttgccctggaatgaattcagtttttcttcacatcatcatttctagcatatcctcgacttgaaatataattttctgttttgtggcaacagatggaggaagttgagcttctagttgatgctgcttctcgcctgagtgagccatttttgttggttactgtggtaatttggtttacattaaatgttgatagcttgctttatacttcatagacagatgattttttagacatgattcttctgttgtttgcataaataatgaaattgtattatgtggttcatggaaatgctgcttctcacgctggataacactgacagtcctgccatggattttctcaaagcaatttatattatatgattatttctcaccccaaggatttttttatgagaagttatgaccatgttggatcaatgcttagcagcaattatatttttaggcggttcagataaacctgtagcatttaatgttgattttggctgattttacatcatgaactctggctaaaaaatttaaaaaactaaaattctttttaagaggagaaatattgttcacactatgctcgtatgatgctgacatacactatgtttttctgaaaaaatccatttacagcccacacctttgcaaagtgttgaaatcaactatctcaacctccaaccttggaacttaaaaatggatcactcccaacctgaattcctggagtagagaattggacattttgcgaccacaaactctaaaatcttgttcactttttaaaccctcaggctggtttggttgatgtctgctcacatgctgatgaccacactgatgttttagctcacatgccagcccacctagcaaagtcttttttaggtctggcactgacaaaatctcaagggggtggcatgcaaatgccacataaacaaaagcaatccagttttgctgtgagagggttgagagtttgatgttaaaaaatatctggttttgtagtttagagttcatataaactaccagaagagtcgctattaaatggacatttcttaaaacaaaactcatttatgtccacatcctcatttatgtaactggaagcatatatgccgacatccttgatggtgatccatttgcatcagctgacataaagccccttgcttttctctttcatctttcattataattaatcagattataactccaccaaacataggtcctgttctacaaaggcataaactgaactgctgtgcttgttgtcctgatgaaatcaatttattttattaaaaagttgaactgttcttcagactgttatacattatattggtcaatctatcttctcttacatttatgtttcttaattagtctctaaatttatctcagggtgaatttaattcgggaaaatcaacttttataaatgctctacttgggaggaagtatcttcaggaaggagttgtgcccacaacaaatgagatcatgttgctatcatattctgatgttgactctgaaagcgcagaacgatgtgagaggcacccggatggtcaatacatgtgctatttatcggcacccgtattgaaggaagtaagtacatagttgatgtcttgatgctaccctttcaccctttactgtatttggttgaacaagctagctacgccaggatggttatcatgatgtaaggaaacataatatttttcaactacttgaaggctgctttctctatgaatctcaaagaaatatttgttctaaggaagcattcgagttaatgaatatgtatgaaatagaggaatacaactctttcctctacaaaatgctgtagttttagcatgtacaacctgtctgttagctgtttactgactttttatgggtctgcattcgctataattgagagggatttcaaaaaataaatggcagtcgtcttccaccttatttccccttagtgtttctgggttacattaatgttacaatgccaacttactggtgcaattttcttgactcatgacttcatctccatggctgtgagatgtttaattgtgtactattgaacagatgaacctagttgatacgcctggaacaaatgttattctccaaaggcagcaacggcttactgaagaatatgtgccccgagctgacctaatactctttgttctttcatcagacagaccattgactgacagtgaggtaatgattatgattatttgattgtgccaattctttaggcatttgatagtcattatctcaccactatgttttaggaatggtaggtagaaagcatgaaacaataaaaaaaatgagtcaaatcctataatagatcatttgttgaatgtgccccatttttatttcctctgcatggataactgaataatctcttgatttgtatttggttctagttctttacaattatgaaattaatcaaaagggaaggattgtctgtatgacttgtctaagttcctgggatcggtgggtttaaaatataatctcccagggcgattaactcaatgcatccttttatcatgcattggcaatttagcatgctgcacttccttaggaaagtgcctgttgcctgttgcctaaattattgcagaacacacttccttggccccaacctatgatatgcattctgtctcacattttttatgtagtttggtacacttatttgaatactgactaaagacttaaattttcacacccaagtttattttttgaggaacgtgatattgtggccatctgtgacgagcctttttaaacttatagattgcatattgcttaggattttatccttatgcgattccttacctaacaaatattttattgaaaattctataatccttatttatctctcaaggatgcagttttgtccttggtcctttattatttgtcctttacagtggagctaaaaacgttcttgacttctaggtcggatttctccagtatgttcagcagtggaagaagaaagttgtatttgtactaaacaaattggacctttatcggaacagtaacgaggtctgatataaatctctagttcaaaatccctgcaaaatattgcctatcctatttacctttttcctgattgctattttgcttctcaatccaacggttttagcttgaagaggctactgcatttatcaaggaaaatgcaagaaaattgcttaacacagaggatgtgacattatttcctgtatcttcacgctctgctctggaggccaagcttttgtattcaaaaaatgatggaagagagcatcatggggaagctttgtttaatgaccctagatggagaaacagcaagttttatgatctagagcattacctattgagcttcttggatggatcaacagaaaatgggaaggaaagggtccggctgaaacttgaaacgccaattggaattgcagatcgtttgctaacgtcatgtcaaaggcttgtgaagctagaatatgaaaaggctattgatgacctaacatccatcaaggatcttgtttctggtgcaaacaattatgctgtgaagattgaggctgacagtgattcttggcaaaggcagatttcatcccttgtaggttttctgaagatgactatttctgttttacccttatgttcttcaattctactatgatatattccctatttgcaaccataaggcatacatagtagttagctttgatgcaaaataagagaaaacatacaaataatggtgtttttcctgctggtttttcattttttctccctgaagtttatgcgaacaaaagagtgaaagtcttcctctcctttctaaggaaattatgaggggtggtttagtttttcttccagtggcatgtgcttcagttgagatatctttagtccatatgtaatactgtatagttgacaaatgtcttaacctgttgcattgatattttctttttatcttgcagattgcgagagctaaaggccgagcaatttcgctcatggaatctacacttcagttgtcaaacattgaccttatttttacatacaccctttcaggggggaaaagcactcccaccaaagttacatcattttttcaaaatgatattctgagcccttcccttgatgacgcagcagtatgttgaacactcttctcatttacatatcatattaaaaattttctttctacatgtttgtattttccacattttcttgcacatgtcattcagacaaaaattgcccaggtttgttgcaaacaattcagatacataaatatcacgagaaaattgagtagtgggcatcattaactcctggtgtctggttcatatttgttcatgcctgttactcctatttgtttaaaagatttctaacatttgcttcatgttggttatttatttgcattgtggtgcttatttgtttgtgttatcaacaaaactttctttcttttgtctagaatttgctaagtgaatattctacatggttgagttctaccaatgtccgtgaagcaaatatatatgtggactgcttccatgagagatggggtgcattggttgcccaggagcaaaggattccgccagagaaaaatgaacttgtcaatgaagaagagaaactctgtgtaaaggcactggatggcttcagtgctagtgctgctgctaaggtttttgaagaagaaattcgtgaagtggtatgcctatgaagatatagttataacttttttatacatacagtatacttctttattattcctgaaactgtagaataagcttatccttataaactaacaaagtgtgacttctaagccctgaagttttcagcacagatgagaaaacctaaaaccactgaaaggtctcaagtaatactgatacagaaagtcacatggaagagatgatataccaactataataacattaaaataacctgaagtaggggagttggactgaagcttactttgattctttttttcttaatgaaaatgataataatggtcttcttaattcttattatgtaccaactattttaattttatcataggcaagtaattagtatttgggcaagtagatactcttgctggggtagatgaagccttcctattactactacttcgtacttcccatggttatcaattttgtttgagagcatctagttttgaggccgtctatgatttcattatacttgttttttcttcgctgttctcattctgagctttgctaagtgaaggcttggggaacctttggagggctaggggttgctggattgtcagcttctcttttgacctctgttttgacaagtacacttgaagaccttcttgctctagctctttgctcagctggcgggtaattctcgattgataactagaggccacttttcagtaaataggtttgctatgcatggaatcagctgatatgaaattatatgcatattgatctaatggacaatactcctttttcaggttctttgcaatatcaaattttcctacccgtcggaaacttgcagtagagaagatcggcaaggctgctgaaaaactttcttctaaagttgacgaagctattcagcaggatatatcccgtagtgctaatcaattagtccattttgttgagactgtcagcaaaccttatcaagatgcatgtcagcaaaagatagattggctgcagggtgttcagggtgagttgtccactgttgagcgtaagctccaaactttgaaagttgaaattcaaaatcttcatgaatcatgaggtttcaattccattgaaattttcttcatttatttgcactcatgccttggatgggtgatatgcgctcatcaaattttgttagttggtgttgtattatggtggggctgttgatagatatatctgtaatatatgttgtaccttctcaacaagtgatacttatcacgtaatcaggagcaatgcaaccacaggttcaatcgatcattattcaaatgtttttccctgttctatgttagttgcccagggccattacaaaagctttgcaatggtgttggaactactgccctacacatgaagctggatttagattgagtttctacatacatagtatgtaaacagttctttatatttgaatgtaaattttaaattcgcgaacgctttttcataattttatggctagcttcaatcaatacgactgcttgcattcactaataaacgtttgttgtcgtacacagtacagaatacacattatggcattattccagccgtatatcctccaattgtttaatttctctggtccagttggtacttcgtatcacccctttttcttatgccaagttcttctccgtcgtctaattaagacaaaaggacaagtactacaccattcattggtaattgcttctgttgaaatcttgtagctgtcgtgcatctgggcatctagcctttcggttagtgccttgctacagagtacaactagatactgttgatagcttagtcaaatgccatccgagtgcccataaaacctcctctgattggaggtcttggcaacaaatggtgatgtgccttctgccactctcttgctctctttattcttcctttcactaccatgtctcaggtagatgcatatgcacggatacctgtccaagctgcacggtatatcactgaacttgtgggtaacagatgccaagctgaatttattctctcccactctcttttcatatgtatacaccatacacacacatccacgagtgcgttctcatttcatatgcgacaagaagaaaaaagccaacaaaactctttatggaagcgcgcccgtaatcgcacgattacgggtactaggatttaacctctgataggtaagagtcatgtatccacacacgtcaaatgtgcttcctcaaactgcatttgttctctttctaggattggaaaaaatgctgcctgaaagttcaaacattccggtgagcaataataatgcaatatgccagtgttccaagattatttctactaattccttcggctcagattaattaacaagcagttgaattttcgtgctaccgaaactagcagctactgggggtgcctaataatcgcctaccattccatgttttgtccttgtttatgtttgttttgctaaagcatgtcttgggagtacttttaattgcttgtcctgcatgcatcacagcatcagcagcataaacttttttttgcaccccttttctttaatttaagagtagtacaatgcatgaagtagccgcgagtgcacggtaggattcttgcctttgcggtgctggattcagctcaacgctcgttggacacatgcgaagcacaagcacaaaaggttaaggcgattgtttaccttgtgttaaaaggtgctaagttgacatcattaggggtagatatattaaaagtgatcgagactatgcatgcctaaatattgtttttaacgttgtcgtcacgaacagtcactgtgatacctccgttttaaatatactctctccgtcccataaaaaaccaatctagtatcgaatgtgacacatgctagtactacgaatctgaatatacaatgtcatatccggtcctgtattcgttttttatgggacaaatggagtataactcagtcggtttgttatactgattgttataattaaaataaatttaatgtaaaacaagtttcacagcaaaataaatcatacttacataaatttaaaagatgaagagaaacataagcaaacgaagggctaacatgtccgtgagacaacaaatgatcgtgtatgcatgagatttccattgagatgaagaagtgatgatgagctttgctgtgctcaagagtacgtaggtgactaggcttcactttgtttttagggagacaaaacgtctccctagctacgtaaactactcctgacgtgtcgcaattagtgaaaagctaatccttcattttaatctctaattaactatactatgaatcatggtggcctgctcgtgcagccagaccatggaattagctgtttgtcggcttcttgtcctaggcgctggtttgagcttagctatgctagagctagagcttagagcaggtacaatagcaggctataagcgagcagcgggctacacatctgtagccagctgaagtacggatttcaagacataatgtgtatatgataggtaggaccagatattaataatatagtaagcacctattatatgaattggctatatataatttagagctagtagtgggctatactattaaacttgctcttagctgaatcctttctgcatatatatgtacgtacgatttcgatggatctcgcaaatctgaacaaggtgacagcacaatccgggctcgaagtgacggtactcgctttggctgattcaccggtggccaaagatctcacattgtctgtgaaactccacggcctttttatttttgccggccaactttgtctgaaaccccagcatatcatccaggggcaaagattctgagctacaggtgtcaacaggggagaagaacgccactgacacccaaaatgagaggccatagcttaattagcaatggccagtgccagatgtggccagaccatggcaccatcacatctcaaatcggtgtattatgggatacatttgacagtaagcaatacatgggaatttaacaaagctgaatatgtaacagaagttctagccaggggaccaagctctcaaaggaaaaaggcattgtccatattttgatgtcatctagtagtatatatcttggagcaacattgtccagtcatttcttgagaaccaaaaagatgagcttagcttaagaacataaatgtcttgctttctgcttaagaagggtagctaaaggcaaaaaaaaaaaaaaaaaactaatgcagaggcagacatattattatagaaatatggaacagtgatctttcacttaagaaggcaaaaagggcagggaccaatgtagagacaggggtttgtaggttggtaccacctaaccaaccctagatactcttaacatttatgcaaaagttagaacatataggtaatgtagggttataggctatgttaagcaattaagcttgcaaactacctcggccgtccaaattgtatcgactatcacaagtgtttatataaggagatgtattactactgatttgaccaaaaaaaaacaaaatcttcaaaagccatgattctctctctaaaaaaatgcatgcacatagccaaaaaaacgctatgtagttacaattcatttcgaattcaatcaatggtttgaagaactagaccaattgatagcaactttctggtgtggtactgtcatttgtcttatttttgttttcgggtaatctccaaaagaagagagaaaataatcagaacaaaatcaacatatgccatgtacagtactatccattgtgtccacaagctaaggtagtaacatatgtgagggatgtttcaccttttggttttattcttatccactatccagagaaccaaaaagctagcaaagcacaaaccggaaattgacctcttcatggaattatttttattttcagaaaaaaaggtcaaaaattaagaaagcacccaaccagtgcgtatttttatatctcctccacaagatagggaaaaagaccttttccatttaaattgctaggaatgtattcttttacacttactaattattttttcgcatccgaaaatttctgaaccatcaattctgaagtctgattggtgcaggtggatccacaatggatttagattctttcagctgcctagcaaactacagtaatccttaatataaatacatcatatggaaattgtttacttcacaaaagataattagcaaaaagcaattacaaccacagaaggaaagggacaacttattgatcaatatttcgtaaaaaaacacttattgatcaatatttgtgcaccattgacaccggtacactactgctacgatttacacttataacacaagtgcagacgttacattggtgcgttgataatcaaatattagtgctaattatttacaccattacgagtgcatgtctccttggtggtttgtccacggtatatcctcatccatccaaaacctctggacgtgtgtgcacaacgtgccctgcaaatttaaagcaactgattggagcaacttatttctgtccccaatgtaaaataatgtccagatacaacgagggaggtgatgtgatgtgaataatgctccaattgttttttttttttggtgggggttaagttggtcgtgagacatggatgatatcaggaggccaactgagctgttaaagctgatctttgccgtgacttgttcgtatatatgatcaattattctttcctcagtgtacgtacagcttacacaaaaatctaatgagggggataatgagactatgttaactgaaaacctagaattggagaaatgtgacattccatccttgtctgacattgcaaaacagatggaagaggaagagtgtgatgaagaggatagctttcaagaggttccttacaagaagaacagacccatgaaagcagaacctgctattacttcaagaatgagcctgaggaatagagctgaacttctaaccaaaaagaagaatctggagtccacgggtaattccaacccttttgctgtttttcagttaattgatccctttgagttgaataacattgctattgctgctaatatttccttagatagtaacttagtagaaatcaataatactgtcagggttatggataaggtataccctctatacttggatgtgcgttgtatactgatacggtatactcgcgcgtatacggatagttcctgtatacgttaaggaaatctatcacgtgacagaaacagaatccacagatggagggagtcctactcggacaagactgggtctttaccatatcgtgaggggtccgatatctccgagccctacttggagatcaactgacccgcggtataaaagggaccccctaggcaggacctaaggcatcgaatctcaccgccaatacatccaccacagcctacgaagttggagtctataggagccaagtcgccgggtgatctagtcgaaccaactcaactacggtcttgtcggtatcatcgagttccgctattccctttgtaatatgtggtttccatcatataatcccataccaactggattagggctattacctatcaaggggcctgaactagtataatccttgtcttttgtttgcttgatgtcgtactatgtggatcctcataccagcgtaccccaataccctctatatccggtctacgggtattccccgtcgacaaatactattgatactattaagaccaaggaggaggttcaagctaaaattagctaaactgagatggaaaaaaagagaaggagaaggaaaaggagactcatgacataccacatactgatttgagagatgtcttggaaaataaatccgaagaggttgacattgtggataacactgaacaagaggtaggtgtagtaaacaaatcatctgagagcttagaacagaagaggagaggcggtcctaaaaaacttaggaaaaaaatgaaagtattattttggaatgtgagaggtttgggaaataaagctagaaaaagacagttgaaagagttagttagagatagaggggctgacattatttgcttacaagagacaaagaaaatgagttttcaggataaatagttgaactccttccaaggctccaaggatttctcttgggcttgggaatcttcaagaggtgcatctggtgtaattctattagatactaacaatgaggtgattgagaggttggggactcatgttggtgcttttttcctgagtactgatatcaaatataggaaagacaacagtatatgggaagtaattgtggtctgtggtcctgttgtggattctttgacagatgagttcttagaagagttgagatggtatttataggataaacaacacccttttatcattggtggagatttcaatatgtacagatttgctagtgataaatcaaatgataacctgaatctgagatccatggagtctttcaattcttttatctttgatcttgaacttagagattcatatagaagtggcccaaaattcacttggactaataagcaagattgccctactttagaggtgctagataaagttctagttagtgctggttgggaggatagatatccaaattctactctttcctccctccttaggattgggtctgatcattctccccttattctagacactggtgaggatttagagagacctcttaaatattttagatttgagtcaacctggctagccatagagggttttcatgagatggttagacaaatttgatccctagagatagttcttacatccttgactactggaataaaaaacaatcctccctaagaaggtttttgaagggatgggagataaatacaaaaaaggagaggaatcaacacaaaactgagttgacgtctctgatccaagagatggactctcaagctgacctaagggagttagatgtagaggaatggaataagagatatgaaatggaacctgagttagaacacatatatgagatggaggaattgttctggcacaagagatgtggtgacatgactttgttgcaaggagacagaagcactgaattttttcacagaatggccaatggaagaagaagaagaagaagatgcatgatactctccctggaagatgaaggcaaagagctgcattctaaagaagagttgaaaacccatgtcattgagttttataagactttgtttagagctgatgacccttcaaatgttcacctctcaccacttatttggcattaagagttgagcttgaaagatagtcaaaaagaatatcttatttgacctttttccatagaagagatggacaaagttctaaaagaatccaaattaaatattgctctaggtcctgatggtctcaatgttcacctttttagagctttctggcctgagattaaaaatgagttgtttgagatgctgctgatgttgtatgaagggaagttagacctaaaaagacttaacttcggagttatttccctgatccctaagagctctgatcccaccaatataagacagttcagacctatttgtgtgctgaatgaatgttttaaattcatcagtaaagtggtgactaacagattctctgaggtgacctctttagtgatttggcatacacaactacctttatccctggcagattcattctgaaaggttgtataatcctacatgaggttcttcatgtgttgaaaacaaaatcaaagaaagggattattatgaaaatagattttgaaaaagcttatgacagtgtgagctggaatttcttatttgaggtcctagagaagaagaactttccaaatagatggattgattggatcaaggcttgtgttatgggtggtaaagtccatgtcaatatcaatggagagagaagtgatttctttagaacttacaggggtcttagacaaggagatcctctatctcctcttttgttttaacctagtcagtgatgcttttgcagctattcttgatagtgctaagagatcatttgttcttataggccttgttcctgagattttcccaggaaggatcacctatttacaatatgctgatgacattgttatttttatttcttttgatgctaagcaagtgattgtcacaaaaattctcttatactgctttgaagagatggcagggatgaaaattaactatcataaaagtgaggttttcatagtgggtttagagagattagaaattgaagaggttgcaaagatgctcaactatcctataggtgaattttccatgaagtatcttggtttgcccattggtcctaacaaaattttaaaccaagagtttgatttccttccccagaagatggaaaaaagaccctctctttggattgggggtaacttaacctatgcaggaagagctattcatatcaatgcatgtttatcttctatcccatcctatgctgtgggtttttaccaacttcctgaagggattcatcataagtttgattcgataagaggttagatactattgggctggcaataaacaagggagaaaataccacatggtgagatggatagacctttcttttcctaaagagtttcgaggcattggtttaactaaaaccagaatgcttaactctgctctattggctaaatgaatcattaaaattgaatcccctaataatagtctttgtataaatttgttgaggagaaaatatattcaagaggatggtatcttccaatacattggtgacaagggtctcaattctggaaaggtgtgatgaatgttagaaaatggatgacattagggtctgaatggcttctgggagttgggaatcatatttgattctagaaagatgtttggaatggttcttgtccttttaaaatcactttccacaatttatttgagatctgtaatcaacagaatgttacagtctcagagctgatatcaagaggtgctaatgtgctaacttttaggagatcttttggagaactggagagaaatcagtggttagagctgagaggaataactgaaaatacctccctaagtgtctcacctaactctcagacctggggtttatcagctaataaactttatacaacaaaatcgctctatgaggctatggcttttagaggtatgaaagatgttaaaatgtagatggtttggaaatgccctgctcccatgaaaatgaaacactttgtttggttagctatgaagggtagaatccaatcagcagagcaattgaaaaagaaaaactgcgcaggctcagaattttgtcagctctgtggtgccttggaaactacttctcacatcttattcacctgtcctatggcttcttttgtttggtgtgtgtgtagatattcttttggctgggtctttgttccgagagattttgatgatttctttctcatttctaagcagaacaataaggcaaattctatagtttttccagctttacttatggttgtttcctggttgctttggaccaccagaaacaacatgattatcagagataaaatggtttactctccactgatcctgcctttccaaatcatttcctttttattgcagtggaaagccctatgtcgttctgaggtgactttgctgatggagacgatggctgagaagttaaaagtgacaacaactacccttggcgctcagagaaccggcgttggatgatgatgtgccttgttttagcttgtcatagtatcttttgtttactgtctaccttagagtttttctgctcatggcctgatgtgtggtgactgtttagttttactgtggtagttgtggcttaagcctgtgctgtaaaatggatattccccataaccttgttcaacattttgctttcaatataaggagggatgtgaggccttttatctaaaaaaaattattctttgaatggtaggtgatataccattcgatagtgagttgtctatgatgatttcgtcaatcttaagatattcatacacactctttgaagatactcatatggataggatgtatgtatgcgtttatagaggtgtgtgtgagcgttagcatttgtactatgttttgaagaaagaaaaaacacgccaacaaaataagatggctttgcaatctagactgatatccaccgaggaaaccctgctgtaggatacaaggtcttttcttttgttttgttttcaaggcttgggccactatcatctcctgcccttttctccacattctctgctccttgatgggtcatccatcgccacgttttcttctggtccgacatggtttgaattatctcttggaaactttgcatgaaatatatccaacttttcttgtgaggaaaatgtagctacaacaaaaagttttgcgaatgtacaagctatattacgagtaaaataaaccacgtgtgtctaaacttgtccagcggattcacttagatctacaaactttgaatctgtagttcgagttttctaaacttgtctaaatagttcattatagtttgggcctatttggtttactagctattgttagtatcaaaatatagatacgtttttagaactactattaggagcgcagcgccaaacatgcatcagctcaggcccaccccaccccgcgtcccgtcatcccactcctaccgttatcggagtaaacgacttactcctatcgcgtgcctctaccacccacctatattcgagtaaacgatttactttgataataaaaaccactcccttgcttccgatcccacccccacgtcccgcatcgtgctcccactattatcggaataaatgacttacttcgataaaaacaacttctctgcttccggtatatatattctatttttctcgtacccaaccaaccactctcgcccccacttttattttttttcctttttttcggatctgaatcgatctaccttcctagtgcacagatcggcgacacaccatggaggaggacaacgacaccgtggtggttgatggtggtggctggcgagcagtggccagcggcggttcaggcgaaggcactgcttcggtcctcgctgccggacgctgggcagcaccttaaacaacaaggaggtgttcacttaggtcaatagcaacaaccagcggctgctccacgtcagcgacaatgctagaacaagcaagtaaggaaatgacactctgatttgcatctgcatactctccttcaacttcacgcatgaagccccaattttttttttttgcaaatcaaattaacgtgcaatctccaatattacctgatctcaattgataggctgcacaggtcctacatttgcacatcattctccatgtggctagccctgagaggatagggtggagtacgccggtgatagaggttgtttgctatttttcttttgctcgtcatctctattgacatgaacgagaatgtttttgcatttttttcgtgcttgctagatgatggatggctgctactgcgcaaaatcgagctcatccactacatccttccatgattccatcgtcgactactgctcgccacccggttgccctctccactaccagtcacaagacacaaaccaccctcttcatccttatagcaagatccagcaaagctgccagatgaatttttggctgaatcatttttttcttttctagtttgattcacctgtgagtaattttattgcttgtctgtgattgagcctgcaattttttcattcatacgactattttgtgatacagatcaacgatacttttagtatcagtttttactcttgtatattgaacacatcagtaaacatattactacacgagatcatggctatatcgataggaaggtgataattgttttactcgatgaccacaaaatattagtttttattcttagactatgtattgaacacatcagtgacatattactacacggtggctacgagatcatgggctatatcgagaggaaggtagtaattgttttactcacagaccacgaaatctaaacaatatttataatattggaattactagcgttttaagctagtagtaattcttttacgaccatctaggtatggcgtcatacgatgtggaggcattcatgcgagtaaatttgttacttttgaatgagccgatgtgggaggctgggagtaaatgaaaaactccatggagtatattcgttacttttgaaacgtgcggagatactagaaaaacagaaaactcagaaagaaaaactagacggtaaatattttactaaaacgcgaaaacagaaaaactacagagaaggaacgaaaaacaaaaaaatctagatggttaatattttaccgagcccattgatgaagcacggatgagatggaaaagagaaaaaagaaacacggaaggtgaggtggtaaaaaacgaaaaaaacaaaccgagaaaagatgggatgcggaggaaaggtggggtggtaaaaaacaggaaaaccagaaggagagggcgtgctacgtttgaactaatattccgcgctgtagcacgcggattagcgctaccgataagttttagcagtaacaattactggtagagtaagtttatattggtcatgtttttgtttgttatcaccatagagcgaaattgtaaaactatatatagtaaaaagtattctagattgctactaaatttagtataggcattgatttctgtatagttggtacccaccaactcctaaatcttatcatgcaagtgtgttatatcatcacccattagtaattattatttagagcatcttaaatcccatacaagcatgacacatcatttacaatttattatatttttagagctcgatatgtaatatcaaatcattatatccacatcattttctataatgtataacatgtattcatccatatattttgtagtaaaacgtgaggtatcaactagtatatactattattgatagggcatattttggtagcaatctaaaacagcccgtaaatctaactcacgttgcaccatctactacctccgtcccaaaatatagtaatttttagctatgaatctggatacgcgtttttggacggaggtagtacatggcagctacatggtgcctgggtggataagaacaaaccaacatgtacaatctgatcatgtgccctcttttttccacctaaaaattttcaaataattgaatataacgcttgtcaagttcacagtcgaaatattacgttgcgcttgaactatcatagctatcctttgaaataggcattcattgattcataaaagttgtttcacgtccataattatcgtgactaatgtaaatcatactccttagatgatttaactgcaaaatgcccccacctagaaacggcacaaaaattccagctgcagtgcacgagtgcccaccatggtagtagaaatggaggtgtgggcgaggttggaccgttgaagagtttagacaagtttaagaacctcaaattcaatatgaaaagttcatggacttaaataaacaggtagacaagattagtggcccatggtaaactgaaaagagatgaatatattactcaaagaaggaagaaaaggggtattcatgcacatacgcactttcttacttatttggatgagtgtagatatccacaatccctttggaagaaggaaatttgaatgtaaatactaatcaacccgaaccattctagccatcaaggtttaggccctcaagagttgtactcgactaacataaattgtcttacagccgttgatataccacctctattgattcgacgtcttctgatattagatctaacaacccctcctcgaccacactagtatacatacttgtttactttaattaactcctctggtgctgaatctggacgagcgacgaccaacgatatgcatggtggcacctaagtccccggcgacgagaagtcgggagagctagcagctcctatgttggtttttcttttctctggcatgagtttgcctcatgtcttatgcttcgttcattgccttgtaaagagtcgactcttcttttccttctcccctccagtcatccataccgtgatggtatttttatgagcattttttctatccttaaggaggtaccatgaggtatcataaggtaacaatctaatctaactattgatttaggatgggtatgatggggttaaataatgctcttgccgtgcacgcacgtggaggtatacatttcatcgaacaccttcaaggcgtcctgcggtggcctccagtccctcaaccctccaggaaccccctcaccggcggcagtccctcaaccctccaggaaccccctcaccggcggcagtccctcaaccctccaggaaccccctcaccggcggcggcatggtggccctgttcccggacccgtacctccacggcggcactgacgaggtgaacacggcgtgctgggagaacgacccggtggtgcgccggttcctcgccgagggcggcacgcacaaccacctcctggaggtgttcatcaacacgacgcgaccattcgtggcgcaggagctgaaccagctgccatggcattcagtacctcaacctctcggccaaccagtttgccggccgccgtcgcatcgcattgagtccgccgcggcgaccgtcgcatcgagcttccgacgaatcgctgctgcaaccatcgccgagctcccgatgaatggtagctgcaaccatcgccggactcccaccgattcagcgccgacgtcgcatcgagaccaccgcccgccgtcgctgatgaatcgccaccgcaaccatcatcaagctcccgtcgctgatgaatcgccgccgcaaccgtcgctgatctgggccaccatcgggtcgccgatctagggttcgagacctaccgcccctgccgccatcccaagcttcgggtttgtttctctcgttgctcctgcccggcgagatgcggaaacagcgacaaaggaggaagagatgcgcgtgcgtgatgcggaataaacgcgaaagtacaaaactaccctcctatcacaccctgaagttcttttccaagcctaaattgaagttataaatggtctcaagaaaatactggtgtaaaagcaagagtaaaccctaataaatcaatgcaaataataatcgaaattggcatgtggaattttttcttgagttctacatgtcgaaatacgctaacaagatttttagtggaatttttagagctctagaaataattttaaccaattaaaattgagcacaagcaatatttaatcccaggaaaattcatttccttctttttctttttccctttttctctttcgaatgggccgccggcccattctctcttctctccccctccccgctgggccggccgaaggccacggcccagccagccgcccgagcccccctcctctctccctgggtcgccgacaggtggggcccacctgtcgggcccgtctcccacctccagtcggcgccgccgcgccccgcaaccgccgccgcaccccgctcccgcgtctcctgggcaacgtcgccctcgcgcccactccccctctctctctcccgtccgcgcccgcgctcgagacggccgggattcaatttttgaatcccacctctctctcctccccacccctccccacccgccggtgaaatcgcggtctccccggccacgatcgaccct

SEQ ID NO: 6313 - DNA, 45186 bp, Oryza sativa
gttatgcgacggccttcagcagtgtattcactataaaacaatcagaggatcatgaaacaacaaacattagactataatttcatattgaacatatacatatgctaaatgtgcaagtgaaaaaaactaataaacatcagtatggttttgctaagtgatttcctagatgatacattagtttggcaagggtgatggtggtaacttcatattcagctaataggaataaattccaccattaggtccagcattttattaggggactagtgaaacattgcacatcaacagatcatatagatttcagtcatggtatataatcagatgacacaaactctaaaacacgctcacttcagccccttctgcaagatggctcaacaaccatcattatgttgcagtatatgtttgtgatattttttgttgttaggaaatacctctctttttaagaacatagttacaacatccacatgtgcattctacaaactactaagatactgaatatgaatatttctagaactaattcaggtataatagaacattgtaatatcggggaaaacaaagtaatacatcaacacctgggaggactagtataaacttaatgcaacaattgtgaagagctagcacaaaatacatgatgcatcagtataacactcatggaaacctactgccaccatctgctaaatatctttagtcatttttacatgaccaattccctcctagctatcaactatcattctgtcctataccacaaataaataaccatataaatcatgatgaaaagagcttgtcttcccttccgcgagaaataatattcccaaacaagacaatactaactacaacgatgaacatgttactgcagcagaaatcctacaaaacagtgtgttccactgctgcagcttctttggaatcaagcgttcatatcagttgatcttagaacagacagactagtgattgcgttacaccttaagtactaaacaacaaataaaatcttcagttatattaagtatactgaattactgataagagcagcaaatgttataattatgtaacttcatgaaaccaagtctgtgtgagttaaattgaagcacacaatgggttaacaatcatgacatgagtactgaaaggatcaaaaatagcttgcactataccaactatgatgattggtagtataatacaaactcatgttatacgaaatctgcctgatgacatggaggaaagtaaccaacaaagcaacaaggtaggagcaatctggcataaggtgggcaatatttctgtacttcagttctcagaaaatcaaacaatgttttctaaatattttagctaattccaatatcagcacactgagacacaaatgtgagaaactgagctaaactaatctaagaatctaatcagaagaaaccgaaattaccctacgactgtgacaccaaaattaccctacaagaaaaaaacctggcgcggaaagtagaaaaataaatagggttgagaattggaagatttttcacatactactcagtaacgtcctcgagcaccatgttgacgtacacatcgaacccacagagagtgccgacgagctccttgtcacccttcataatcacccaaatcttggacccgatgcagcggtcaatcagctctgcacaaaccaaagcccgcaagaactgaatcaagaactcgaaccccaaaaaacaaaatctatctggaacaaagttagcaagctaggatgcgagatttataagaaactaaagcgaagcttcttccgcgcacctgaggggaggagctgggaggggttgttctgagacatggcggcggacgccctctccggcggagatcgaggtggaagcggcgacgggaagggcgcgcgcggctacggcggaggcgatgcaagagtagcggcgctgcggcggcggaggcttctgctttgggtggaggattccaactgcgaacgctgcgccctagccgactccacccacgagacgtattctccaccgtccgatcgagcaatcagccgtcgattagatatcacactttttttttcttttgctaggtttcaagcaccataggaataggtcaactttaacttccttataagtgactcgaatctaatccataaccctcaaccgtaaaatcagatagggtgactctccgaactattaaaaccagtgcaatttgattcccttcgtggttttggaaggcgattttgctgatgtggcgctgacgtggcaatgttgacatagtcttcgtcccacgtggcgcttacgtggcttagaattaaaaaaaattatttgtggaacccatatgtgattcaaacaaaaaaaatgacatgtgggaatcggctggtacgacggcgcggcgagcctccgaccaagcggctgggatgccgagaggcggagcgaccggcatcccgtagagcaccaacccattctccggcgaccctccatccgtcctcgcctgcaagagcgagtgcacacattaaaacactcttcgactgagctcgtgcagaaccgagctacgggaggatgatcaccttgatgtcctgcacaatgaacgagttcgtctccacgagcctcgagcaacctgagccgacgacgactagctccggcgagtcgtggtagtaccccaacatcaacgccgccggcgctgttccatcaatgtaaaggatcaaagcgagttatagcactgagatatagtatgtgttgtcaacaaagacgatcttaatcagagattcagagtaactaacccaaaaaacagaaggcgaggagggtgacaaagccgagcgccgccaccgccatgactgtaagtcatgtacccttcaccggcgctggactgacagcaagacgacgcgtaagagaagctatgaatccttgaacgggtcacggccaagggggattttgtggaatcggtatcttagctgatgtctcccccttttctcttcaccttctctctcgtggagcaatcgacgggcagggacggcgacagtgggtgggagccgaagcggcggcggcggtgacaggcgggagggctagggggagggcgctggagtgtgtggcgtggaagctacccccttcagcggcggggtgcgcgggggaggcgtgcgagcacgctaacatccctccggttcttctcgaaagtcggagcagggttcctccctatctctaccatcttcggcggaatcctgtcggtcaattggttgtcagccagagcaagctgctacagttccgccgctaccgtcgcttcagctctcgccggccaccaccactctagcccccgccactgccactccagcccgtgctccccgtggccgaccgaaggggggagaagagaaagagaaagaaagagagaagggaggaagaggggaggaagaagaaagagagagcaggacatgtgggtggccccacaatttttttatgtgtgtgaatgacaaacgggtcccacatatacgtttttaattcaaatgccacctaagcaccacgtcagcgaaaccgccctcaaaaccacaaagggagtcaaattacaccggttttaatagttcgggggccgagatatccggttttgcgatttatgatcatggattagatttaggtcacttttaggggagacaaagtggacttattccacgaaaataatattattgattagttgggcttattcattccaaagaaatataagttgggcctaaattcaaaagatataaattaggctcaatttcgaacagaatttattagtcggcctctctgacagccttggcccaattgaattattggacaaagcggtgggcccactgaaaacccagcccagatggccgaccaccgatgtggtgatgtggccagcaccagcacgacaccgcacctgaccaaaaagcccagtcacatccgcccatggcttaggccagcccgcgccgacgagctcctcttctcctcccatctccaccacgcgcctacccgcacgccgagctgtcgccgcgtgtgcccccgcctcgttccatcgccttcgcgtcgcgctgtgcccactaaaacaatccggccagttaacacttcacacccccgcgccctctcgtcccccttcctacgtgtccccctccctgatcaagaacggatcaccggctcggcgccccactctcttcttggatcggggagcgggagagggggaggaagaggcggcggatcagaagatttgggcggcggcggcggcggcggcggcggcggcggaggtggtgtgggtgggtgagtgagtgaggagtgatggagaaggagaggaagatggagggggagaggagggtggaggcgacgcggcggtgggtgatcgcggtggggttctgggtgcaggggttccggctgttcccatggctgggcgtcaacttcttcctcaaggacggcatgggcgtcgccgcctcctcgctgcagatcctccaggcgtccgccaacctccccatggtcgccaagccgcttctcggcctcctctccgacgccgtccccatccgcggccaccgccgcctcccctacgtcgccatcggcggtatgtatatgctcccactcccactcccactcgttcctctcctcccttccccccctgaatttcccgtcccagatccagaattcctctcacatctcaactttgcgcggaacccgtgtcgccgaattgtgatgcggaattataataatctcaaatctgttcgtcttgcctgggcgcgcctggccatccaatgcagcatttcgttagagcagtatgtgaataactgaatatgcatagcatctccatctttagcattaacctcactgcacattcttttcttgcatttgtttggaggcgcatcacctaatcctgtggcagctggcgacaatggcatcgccgcaaaggatatgctctgatgctcacggactttgtcctcttgattcttctcaccctttccctttgtttcggtttacttttcatttttgtgcataatttgtagtatctgtcagtcatcttttcccgtattaacctttgacagcaacaacttttatctaatgctccaccaaatttgtcctcctgttagtatcacacattcgcaaagcaacaagcaagtaatcccttgccaaccagctcacgcacggcatgaatatttcatctactttaggactttgggtgtggccctttcggtccactttaattaaagctgtgttgaaaaacaagcacagaggaatgtcatgatgaaattcttcaaggatgaatggatagtgaaccatctcactccaacatcacataacttgggattttatatgtgcaaattctgtgtttttatcacaaactttttgaatgccatcaagttagtttaacctcagtgaggcctttaaactctagcttgcgttaagaagtttgctaaccggaaatatgacataaggataggcccgctatggaagttcagggacctaagtggcatgttaagcaatgaacagttgaatgtaaatgactgaaccaaatagggatggacataattgacaagatcatatgcctaaggacgttgctataatttacaaaatgaagtatacaaaattgggatatgcttactgtgcattgcaatgcctttttcttcttttgcgcttgtattagactatgatactaacctgacttgttattgctatctgtgcagctctcttgcaggcaatttcatggttagcaattgccctctggccagctatttctcttccagttcttaccatttttctcctcttgagcaactttggtgcatccatatgtgaggttgccaatgatgccattgtagcagaagctgggaagcaagcaaccttgtcctcagggtcaggtcagcttcaatcctttgcttggatgtttggttcatctgctggcgctttaggaaatcttgttggtggcattgcactcagttacttttctccaaaaatcatgtttctgttttttgcaatccttctcgtgctccagttctgcactactgtggctatacctgaaagctccctccaactcccaaaggcagatactaatctatcagctgtctccagcgtccgtaagcaaatcaaagagctgtcatatgcgctgtgtatgcctgaaatattttggtcagtcatttggttttcattgtcctatgctgccataccatttctacttgggaccatgttcttctatcagactgaagtgttaagacttgactcatcagttatcggtttgtccaaggtttttggacaagtaactctattagcttggagtgtggcatacaacaagtacttcaaaacaacacctgcacagaaggttttatcagttctgcagtttcttacagcactcgtaatgctgtcagatgtactatttgttcagggaatatacagaaacttcggaataccggattccatgtacacaattgttttctcagggttgttggagggtcttatgttgttcaaggtgctgcccttcagtgttcttgttgcaaaactttgcccttctgggtgtgagggatcacttatggcttttgtcatgtctgcacttgccctcgcaactatcatcagcggttatcttggggttgcacttgctgaattcatgggagtatctggaggtgatttctcagcgctgccgacttgtctgttgattgaggctgcatgcacaatgctaccactctttttctcctcattgataaaagagaggagagaaaaggagaagaaagaagaatagaattcacctataggattcgatgaggttgtactggtgctcgttatactttacagtcatctttgggatcatatggatttgccgatagttcggtttcataatcagaacatagctggtggacacaatttaaaagactaggttcctcgagaggttttcagtgtttgtcgagaatcatgttcagtgtagatggcatatttgtacctatatttgtgttaccattcttctatagatcaagtcttgtttcatgtaactagtattctttttgtgtatgctaatctgttttttgtagatgaaacaatataaatgttttgtgcatcttaaaagtgttattggctcctacctttgtgtccacacgactaactaaaattagcacatttctttatgattcccaagttgacgagtgttgccagaagaaatgatatggtgcaagatccatcctccatctggtctgctatctgagcccttcactaccataactccataaggaacttaaggtctagctacaaactttagtcctatgaaatcctggtagtgaaactttaaagataataataacaaataccctccaatgtgtagaccatgtaacaaaaattctggttgatattaataaatttgctactgtttctacaataaatccaaacaaatcacggggaacgatcccaggggacatttgttgctgccgtgcaaaatgcaatcagccttcgctgccgagtacctgaaaatcggcaccgattggcaaatgatcgctaggatggtgaaagttgggtagccctccttggacttcggcagaatcccctcgtggtatacgaagtagactggtaggttttactgaactgccgtccgacaagaatatgtagtccagtgttcctgtaaaaccaggagtgcagttggtgaactctggctcccctccattcgcagcataaaggctgcgtaatttgatcggagcttcgtccgtagaatcggagttggctgatacgaggtagttgtatacctgcaaatgattagtgacatattatagaggtggaacaaccaagaaatttcggcggagctgggaattaaggtcaggtaatatttttcctaattggagggcctgaagttttgaatatcgttcagtaaagcatgaacctagaagaatgcagaatgtgcatatcggaagttacatcacccactatggtttgatgagtcgtttgcatacaagttcacagtatttgatattgacatcagcctacgtctatccagaatattgtactgagagtaaagttcaaaaaaacaccatgttcatagccatttgtaaacacaaaacaccatgtgatggtttcggaagtctgttaagcttgaaagaacaaaatgtagcagacgcagaccataccttgtcaccaggagttgagttgaagtcaccagcaatcatgactgaaggtttacagttaaatttattcgagataagtttctcaaactgagtaactcttgaaagaatatactttgcttgagccaattttacatcaatccattcaggatccctacaaaatcagaatagtatgaacaggggatccaatacagatatacaaaataaaacagacagatggcttaaaaaacatcttcaaaacgagaataatagagaactctggccattttacttgccaataaatatgtgtgttcgccataattaaaatatgatcacaaggatcattaagcttgaaagcggcaagtaaaccaacacagtcacgtttcaatctgaaacgtggatcatttggatctccatgcttgttattatccaccttcttgcttgcttctgaaagagcataatactgaattaacccaattaacttaggtagagcatcatactagccacagatacagcagacataaaataagtacggaatgcaattggacaaatctatgtcctagctagaatatgattaatgataaaggtccaaaggtagaatcataatagtggaggcccaaagaatttgtacttcatgagtttggatgtggagtttgaatatttgtctactttctttgttttcaagatatgacagaatagtttgtatgttgtaacttgtaagtagtttgtttagcctggctcactactttaccttttgtcgcctccaatgaaagaagtcattatgattcacaggataatatcaagttgagcagctgatccattaccttctgttggtgaagaattatttgatgtatcactatttacatgatcagtatgaacatatttttccactaaatcattgtaatgtagtacttccttctggaccagttccatgctgtaaaagtaagaatagcccaaaagggggatattgagaagttaatttgcaagtcaatcgaaacattcatgcatactataatttccattcttgtcttctcattgttaatcatcacttatttgaaacaatatggatacctttttggtttatagaatatgccacatccatcccgtttgtccccagatcgttgaatgtaaatacttgaatatccagaattctccatgtttttcttgtagaaggtatcatactcatccaactcctgagcaaaccacatattaaaaataagcagacaaaaatgttccaaagaacgaaaaaagcagacaaaaatattccaaagaagaaaaaaaagggtcaaaagtacacattaatataggtcatgactaaatattgaaacaatacaatcatatgtaatatgtaaccctcccaatatttatttctgaatgagtagaacactaattaatttgtgttgggcataatggaggaagactacataatttttttgagaaacagtaatagccaaaactttctactatccaccattgtgttgtgttttggcactaggaaccttgtgtatcaggttccaatctgtcacgttgagaacttgggattaatgctccctttatcctaggatccaatcaatgttgcagttttttcttggagggtatttttcaatccactaaatacaaacttggggaatgttacataaaccatatatagaaccaaataaggatataatatgatttaaaaacgttcacattctatatttatcaatgacaagtacatgaccacatgaaaaaaatgagttgcttaaaaagtcataagtctgtccaacctgtatgcacatgaggtcagcttcgaagctcttgagttctgatagaacagctttagaccgagttttccacctgtttctcaaacatgaggggaagcatacagtccacaaatgaatgattgaagagcagggactagaacagaaatggaaaattgtttacagtcacaaaacgaaactagcacactgatgcaccaatcctttgatagttttatactttgttcttgggctgggtctactcatggtgagaactgagaatggaactcaagtttgtccgaaaatataaatgtacaaacatcatatcgtaaagcttactgttgacaaataaatctattcgtacaacctgaatgctactaaggctgcgctcattgctgctagttgggaaccaatgtgcaatgcacacaaaacatagtatttatgtaatgtctttctttcatagtaaattatttggcattcaccgcagtgtgttgccactgctctaatgcttagtagaatcactaaagtggtcgcaagaaaatattgaaacccaaaagaattctaggaagaagcttgtcagtcaagagcttacttgagacaggcagatggagaatgcgggaaaaacgcactcttcacataaacctgcaacacagatcaaatagttagatgcagctagttttctttcctctgtgaatactgtaatccactcatcgtcaccaaagaaaataccgaaccataagcagctcaacagaacaaaacagcatattgccagcctacctgggccaagatgttgtaggaaaccagccggaactggtacccagctgcccctgtaacccaaacactaaaacagttttaatacaaattaccctgggcctgcgcgatttgcaagtaatactagcaatcaaccaccaatcaaaatcgtattactcgcttcttaagattgaccaagaaaagaaaaaacacaacctgcatcggattcggattgcgccgtggggagaggggcgaaactgggctgcgcctgggtgctcatccgccgcttgcaaattctgactcgtcggtgtcacgatccattagaacagtagaaagggggggaaggggtttggaatcggggatcagcgtgtgcttacgggacgaaggggagacgggggccgcagggaggaggggagctggggcggggacggaggcggaagagagggagggaagcttggagctttagcatcggcggattcgttgggctctccggcgccggaacacgcgcatctggccgcgaggagatggtcgcgccgccgccgccgccgccgacggctgtacggctgtggctccaccgctcaagcgttttgattcaaacctgataactgggcccgatctgtcggtgagaagcgccggtgtacagtatatttgaagtaatacccttttcttttctttttttttccttttccttttcagagatggccacggatgggataagaaaagggatttcagccaaattatgttttcgtcggcacttttaactctagtcggattggaatgtgcttgctaccaccataagttatcgagtcagtcaggacacattataaacaggtaatgaattattcatgctgcgttttcaaaagggtgatttttaaaaaactttttatacataagtaatattccctccgttactaaatatttgacatcgttgactttttcaaatatgttgaccgtttgtcttattaaaaaatttaagtaattattaattctttttctattatctaattcattgttaaatatacttatatgtagacatattgttttacatattttacagaagtttttaataagacgaatagtcaaacatgtgcttaaaatttaactgtgtcaaatatttagaaatggagggagtagtatttaactcatccatacaaataatttcccttttccctttgactattatctatttatcactcagttaaactgtgatgttagtaatttaggacacgattgtttcgatttacattaagctttgtcaatgattttgttttgtagtatacaacgtatgagattttgagccgaaagtttaatttacagtataagtatatccagacaaacacataactttgttatgtcaaagggtatcactttttgttttggattttgacatgggcaatggtggatcctaatgttctttttcttaaactcgagaaaccttaataatggataaccagttccactggctgtgttcgaccgtttgggtttccaactcatctctctcgtattccacaaacatattttttaaattgctaaataatttttttttacaaaaagtttcttgttttaaaaaataatattaatccatttttttaaaaaaagtaattacttaattaatcataagaaaatgtgccgctttgttcttaacctcacctcccgaacacagcctaagagcaagtactctaatgcttaatatgttgcccctaaaaatactatatatgattagatatgaggtggaaaaaataagtgaagaaagagaaggtgagtcacccctcatgcaaggggcaacctccccacaatgacacaaaccccaaggagatgaaagaaagaggggattagacaaacaaataaaataaaattatttgggttagtatgctggaggtagtgtagatgtggtgtgttgtttatatcacctcctatcttatagggataaaattagatgtgacaactactcttactataaaacttgcagtaagacccgttctaaactcctctaaatttcgactttcctgttttccattagcacgttccccaactgttaaacgatgtatttttttaaaaaaaagttttatataaaagttcctttaaaaattcaaatggacccatttttcaaagttatgataattataactaattagtcatatgttaattgcttgttccggttttcgtgccgcttaaaagttcatggtgtgtttagttctttgggcgtaaagtttttgaagtatacggatacatatttaaagtattaaatataaactaataacaaaacaaattacagattccgcatgtaaactacgagacgaatttattaagcctaattaatccgtcattagcaaatatttactgtagcatcacattgtcaaatcatagcgtaattatgctcaaaagattcgtcttgcaatttacatgtaaactgtgtaattagtttttttcccacatttaatgtcccatgcatgtgtccaaatatttgatgtgatgtttttggccaaaactttttgggatctaaataaggcctcagtccctatgcagaaactaactaagcctagcctaattcatagtataactttacaaattatttactattggtacgaacacatctgaatatgtgatttagcaaggcttaattgctttgctagtttgcttgctagtatggtcttagttaacttgtatatgagcttgattagctaatgaggtaaaaaaaattactccctccatcccataatataaggcgcacatgtatttcaagattcaacatttaaaacatttgaccaacacttagtgtaatatgaaataaattttatttgttaaaaattatatcattagattgagattttaatttactttcatatgattataatgttgttgctacaaaccttatatatgagaaattagaagctaaagactagttttggagatcgtgacagttttgaccatgccttatattatgggatagagggagtatgaagtattaagtactacacaagtagttgcatgcagtggagagtggagcccagacaccttcctatggtggctctgctttggttccaacgctggatctgggtgatcttgggccttgttagttgggaaaaaaaattgggtttggttgtcacatcggatatacggacacacatttgaaatattaaacatagtctaataacaaaacaaattacatattccgccaggaaactgtgagacgaatttattaagcctaattaatccgtcattagcaaatgtttactatagcaccacattgtcaaatcatggcgcaattgggcttgaaagattcgtctcgcaatttacacgcaatttgtgtaattggttttttttcctatatttaatacttcatgtctgtgtccaaacattcgatttgacagcgtgaaaatttttgttttgggaactaaacagggcattaggtcgtattagctaaaaagtgtgacgtgcttttcccgggcatattgctcatgatgtgccaatgctaccaaataaatctcactgccacaatatcactcactcaacatgtgagttcaccaccgcaaaggccattctcttccacctatatttatggctgctaccttttcgcgatattgtgtccagggttcaccgttgttattttcttctcccataagttctatgtttgttactgatcatccttccctcccatagcttactaatccttgtgcaattttgtggcacatactagaggcaatcacagtgacacttgatcaaagggtcctttttttagtgagtgtgtttttcgaaaagaacaaacggtaagtgtggctaatgtgtaatgtgagtgttgatacactgagtgcttgggaatttatgttcttttatgagaaagaatgtactaacccgtgaagtttagctcatgaaagtggatgtttttccttttagatagtggacagtttgacctttacttcaatagaagctatagtcacctattacaatgttcttaactgaatcaaatgcaaatgtacataataaagaaacatgacgagaaaacgttgtaaaactcaccaactaaacaaaaggaaatacatagcgtttagaaagccatcctattactgattctccattggaaattggtgaagatatgaaagtcattatttggggaacattttttagtagtttgctcattttcgctatgtgggttgatgaatgatgtctagaccatattctagttggttgtatgctcattttggctgtgtagtcgtggagaacgactaaaacgtgtagttagatggttgttggttttgtaacttgactgggtgttactataatgtaattcctccactaaactaatatttgaatatcttgcactagactccaaccttttggaatggtactatttcaatgaatataaagtctattgtgcttgtaatattattcaaacatatgtatcttgttgctggaatgtgacatcctggctcaattaggatttggcatgtgcgaccatgaaagatgtgtgcgcatgtttatattgctagcttagcaagagttgaacaaacttacaagggcttgtccctctaaccatatcactctcgggttaatccttttatatgaaacaagaacgaaggtgtaagtgagcctgctcatcagatgggctgggctgcgcggttttgaagagtgtgttgtacgtacactaagagggggtgtgttctcggacatttagatatgcgggtaagttggactgatagagacatcaggtcttttctttgggtgggggatgtgacattctaacccaattaggatttgtcctgtgttatccatgatttgtgtgtatatctttagtaccatatttcaattaggatctgacatgtgttacccatgagagctgtgtgtacatgtttagaaccacattactagtttagcaagggcaaagcctacttataagggctagcccctccaaccatattactcatgggttaacccttttacacgaaatgaaaacaaaaatgtaagtggggtggtatgtgtaagtgggtccgctcgtccaatgtaggttgggctgcacggttctggatggtggtctgttacatgaaatgtgattgtttcgttagaaggcactatggtatcaagatgtttttactaacgtgtggtagcaattcaaacaactaccacaacttacttccaaacattttttgtggcaatccaaacaacaaacggattgattttgtcacaccttagttgcgaaacaaacaatctaattttgcaaaaaaaatatggctagccacaacttagctaatacttaaccttagacatggaaatacatatctcaaaatcaaaatgacccgatattcgagaggtgggtgtaatatttttttatttaaggtgggggtgtattaattgttagatattaatccacgtcatttgatagccggatcatcaatcttgttctttactaaatgatggttatgttatggccaaatttgtcacaataaatattgactttgtggatttagtttctagacatggcagaactcaatctttgggaaaagacactcttaaaatgcggctatttgctatcggacacaatggtcactaaaatattaatttttggttgagtaggtgataaaaatagagtgaaatatcctcaattatgaccttcatgtgagcaaatcatagaaaaaaactgaataaattggtttgaacaaatgaactagtatcttcagatccaacacatccatctggtgcatttaatcaacaaattacttccaaacccaaagagtaatatatgctcaatcaactcattaacttcagatctgatgtgaccatggctaccacagatgcaaccattgctcacatcatggatgaacaagaagatatcaagatcaagtcctccaagtgctggaatccgattcggccacctactacactgctgacttcaaacggctgccgaatctgcatacgacctccgttttcggcccgtgagtacttgatggaaagctcttggagtcctctttccaatggatccagcctcattgcgaaattccatcttattgagctgcaattgaagcaacaaggtgatgcgtcacctataatgggcctatgggcttgtaacttcgtctgggaccccggcccaggtggggcccatgtggggtgcgccccagccaggtggagcacgaccctaggcaccctaggtcgtcctccccacccctatttatatagttaggtaccccttcagggtttcttgggttttgttagattaaagtttagccattgctacttgctagcagcgcgcgtgtcggctagaccgtccgtctacttgttcttcggaaccccaacttatcatttgtattaaattcctatttgcaatatcagattgcttttatcttgttcttgcttgtttcttcgatttgcttgcaggaatagggttgatctgcaccggcaagatcagcaacccacggagaggtgtatcgatcgctaaggcgcaacacaacgtctcgtagggttgtagtcggatcgtcaacgtttctcccaaatcgtagttatcacaactcaccgaaagatcgggccaacaacagccttgagtgtcgagaggaactcagggttcatcaggtggtatcagagctttcgttgctcggtgagtttttatcttcctataaccagaaaatagccatacaaaaaaattcgtatcatttacctagccatattgtgccattgcattgttcttttcagtttttgctttgttgaattttgtgttgcatcgtcacgtcgtgttgctggtcttagcgtctagttcgtttagagtttcgagttctggtcacgttttgtaccacagtcgttgctgccaccgtgtctctgttgttgtcgggacctacgaaaacggaatcggctcgctgccacggttctatttttgtagttttcagaagtttctgtcggttagttttggagttcttgagttgcatctagagtttgccgatccttgtgtgtgtttgttttggccgtgcctgtgtcgtgcacgagaggaggaaggtgaattaccatatctgattttggaagtagtcaagattgttttggaaagatatagtagattggattggttaaaaatcagttccctttttatcccatacaccaaattcggctgccatccactccacctcctggccgagtcccactcgcccctttggccgagtccgactccctccctctcttccaccgttccgagttgtgtcaaacaccttggcgaatttttgtttggtgtcggtttcgagatctgtttggaaaaacggaaccggcataaattcagcattccattttttgtataattttaattttgggtttagacttttacatttgagtccctgtaaattttatatttatgtttgagtccctgtaatcttacattaaggtccttgagtcagtttttgttaaaaaaaatcaagaaaaaagtgaaaaaaaggcagaaaggtgcaaaaaaaaagaaaaaaaaagccacacaaaaaaaaaacagaaaagaaaaggaaaaaaaagaaaagaagaaagaagaaagaaagaaaagagaaaatactgttatgtttgagctaaacttcatatatcagagttgtgcatgagttgttcctagtgctatcttgtggtatcgtttgtgtctaggctcgcgtctctagtacgttctagcctaggaccagcacggtacttgactttgaacaattattcaactttgcattatctgatttgagcatttgctattcctttgctacatatttaagcctacccagagctccacatatttgattacagccgtaccgcaagtgtttgccaaggcatcgatacatccaaccttcattggggtgcttggttgagtcggtgtatgtcaccattccacttgcattggtaagatcttgtaagagcttggttaaaagcttgagtgtgtgcgatttttgagctgccactacctagtagttaataggaacgcgcatatttttgtgtatgtttcttgttttctactaacaatggcagggatatgcaagataattggggatagctgtgctcaacatcgacatcttcgtcgagacatgaggagggatcaacatgaccattatgaggtaagtgatgatgttctaggtaagatcaaatctgcactgccttatttcgagggaaactatgatcctcgtgcttacattaattgggagctagcggttgatagtgaatttcaaaagcatgtcttgtcggagaaacaaaaggttatgtgtgcctctagtgttttaattaaacatgcttctaatgattggaaacatctttgtaggcataacaaaataccacaatcttggaaagacctgaaacgatattttagatatgtttatgttcccatgtattatgctgacattttgttcaacaaactgcaatgtttaaaacaagataccagaactgttacttcatactatcatgatatgcaagcttgtttattacgttgtggtttagatgaatgcgaagaagctaaagaattgaggtttttatgtgggcttaacaaagaaattcaggacatgcttgattgtcaaagatatacatctctttctcatttgttacaacttgcttgcaatgctgaaagtaaaatagaggaggacatgaagaagcaacatgctatgtttttgtcttctattactaaccatttgcaggaagtgcataatcatgaaaaggaggagagagacatgaaagagccgccagtcccattgatcacactcaaagtcgaggcacctccattatctgaagagggcatcaaaggtaaacttaatggtgctgaaattaataaaggtgagtgtgttgttaatgaattgaattcgtccactttttatgctatagcagagcaaccattagtggaaccaactgctggaattcctttgtcacaagttgatttactcgctgttctttgtgataaagaagagttgtgtgataatgcttcacttattatatccattccacaactagtgaatgaacatgctatttctagtgtttctttatgtgctgattttaagcatgttgttcatattgctaatgaagtacaggaacgtgaattgctatcttctttaaatactttgggctatgttcagtttgatgatttttgtgagctcgataatttgaagaagaaattatttgctaagtctgatttgccttgtccaactactgctatttttcatatatttggcgaatctgatgatagaggaatatatttggtgcatagagtttacatatgttcagatttagaacctcctatacatgtggataaaacatgcaagctagagcgaaatgttattgctaaccaaattgtctcgagtttgccttgttttgactggaagaaacaggttgttgtaaatggactacgcaaagagcaccatatggaaaaaccgaggacggttttccgtgaagaaggggaggatgatgtgaccatggctaccacagatgcaaccattgctcacatcatggatgaacaagaagatatcaagatcaagtcctccaagtgctggaatccgattcggccacctactacactgctgacttcaaacggctgccgaatctgcatacgacctccgttttcggcccgtgagtacttgatggaaagctcttggagtcctctttccaatggatccagcctcattgcgaaattccatcttattgagccgcaattgaagcaacaaggtgctgcgtcacctataatgggcctatgggcttgtaacttcgtctgggaccccggcccaggtggggcccatgtggggtgcgccccagccaggtggagcacgaccctaggcacccctaggtcgtcctcccacccctatttatatagttaggtaccccttcagggtttcttgggttttgttagattaaagtttagccattgctatttgcttgcagcgcgcgtgtcggctagaccgtccgtctgcttgttcttcggaaccccaacttatcatttgtattaaattcctatttgcaatatcagattgcttttatcttgttcttgcttgtttcttcgatttgcttgcaggaatagggttgatctgcaccggcaagatcagcaacccgcggagaggtgtatcgatcgctaaggcgcaacacaacgtctcgtacggttgtagtcggatcgtcaacgtttctcccaaatcgtagttatcacaactcaccgaaagatcgggccaacaacagccttgagtgtcgagaggaactcagggttcatcaagatctagtgggaaatcgagggaatcgatgatggggcgaaactcgatctttagatggtgcggtggggctgagctcgagaaccaagtagtacttgggaacgtgaacgacaacgacgtggggcttagcacgtagttggaggacgaattacgacgaaccacaatatctctcggacccacaaaccacaactgtcaactgatgatcaacttgttcttgattgagctagaggcggctggcaatttaaaattgggtgaaaatggcctaaagtgaaatttaggccctgtttgattcagcttaggattattataatatggattactatgagtaagctgaaacagacaaatagattattatgatagattattataatctataagccagattactataatctaataatctccttggaggagctttttccagattattgggtggctaaaaacccactaccctaagatgccttcaataatccagagaaacaaacaactcgtagcttattttatgttagcttattataatccagtttagagtaatctgatttaataatctagattacaataatcttaagctgcaacaaacaatcccttagtcaatactttctccgtcccaaaataaatgtagccatggttttccacgcccaacttttaccgttcgtcttatttgaaaactttttgaaaaaaaattaaaaacataagtcacgagcaaaatactattcatgttttatcatctcataataacaaaaacgctaattataaaaaaattttaaataagacggacgatcaaagttaggcgtgaaaactcatggctgcacttattttgggatggaggtagtaaaagatagcctaaatgcaaatcactcaaatttaaacgctgaaatattaaattaaattgcatggataatctacgaataattaaacaattcaaaagttttgaaaatacagcatcaaggctaattaaagcggccgaacccaacaaaacaagctagccgttctgctgtcatcagactacgccggcacgatccggtcaaaccgaaaaccaccaccaccagaggtgtccgtaccgcgcgccacagtgcctaacgaaacacggacgcagacggcagacggcagacgagacacccacaacgacaattcgaaatcaaaaaccggcgcccccgccgcgagagaccccacgccccccgcccggatccacccatccgccgcgcggccgcggacaccaaccacacgcccacccacccacccacccgaggcatcggcgggttggccgggttgctgccgcgccgcgcgtcgcgtggtgcgtgtgcgcgcgggcgggcggcaaaagcggacggggaacgtgggcgatgtatcgccgcgctccgctccgttgtgcggtcgcggtctcggtctcggactctctctcggctagtagggcggtctcggtctcggtctcgtctgccatcctgtgcctcgtgcctccacatgcggacaagtcgcgcggggtgggggcggaggagtttttcgatcggcacgacgagcgaagctacagcaccgcctgccccccaggcagctgactgctccgctggattttgtgttgcgggtggcccccaccatccccgccccggccgcgcatctgccaccatcaattatcctctcgtctcgactcacatcacctactatactacattgtactccttccctaaaaaaaacttggtttccgtgcctaatatttgaccgtccgtcttatttaaaaaaattataaaaaaaaattaaaaagacaagtcacccataaaatattaatcatgttttatcatctaacaataataaaaatacgaattataaaaaatttcatataagacgtacagttaaagttgcacacgaaaagtagggtttgtaaacagagagagtagtacacagtttacaggacgggactcttgtattacgttttcccacaatcctattaccagcgcaagcatagtactgtaccactcttacgagtgtactcctgctactacgagcgtactgtactagtcactccgtctcctaatataatataagggattttaacttgttatttgtactgtttgaccatttatcttatttaaaaaatttgtgcaaatataaaaatttaaaagttatgcttaaagtattttgggtaataaagtaagtcacagataaaataaataataatttcaattttttttgagtaagacgaatgatcaaatagtgcaaataaaatatcaaaatccctcgtattaggggatgaagggagtacactgtactagtacttcctccgttccataaaaaatcaatctaataccggatacgacatatactagtactacgaatctgaacgtagatatgttacatccgattttagattcgttttttttatagaacagagggagtatactatgtaccgctgcccttaccagcatcctcttggatttatactgacgtgaacagtgcatgaaacgatccttaattccttattgaatcaagattgtgattcacgctcataagaaccgtagtatacgtatctcatgagaaactgaacattttcgtagtgcggtagctgtaaaatttagggttaattcgatcgtaccattgcaaatttgattgactgaaaaaaaaaaccatttggtattcctttgaaatttgaattgtgccattatgttgtcttcaatcgtcagcgagctcatttttttctctaccgtatttttatatggacacgtttgcccctgcctgaatgacctaagacgtatgaataggatgatacgttagagataaaaaaaagaagctcgatggcaattcaaggcaatgtaattgcatgattcaaatttcagatgtataccgatgatggcactcaactagtttaacgaataataaagatattttttcaatcgttcaaaatcacaatgatatggatctgattaacctcaaatgtagtaagggtgtgcataaaaaagagagtaaatttgagagtagaaaaatggaaattctcggtgaaaggaagcgaggagttgtctcggagagagaggagagtgcattattgcacactcatcgtaaggctgaagtccacgaggacgccattattggtaactatccaatccaatcaaatcgaagagagagaggcattagttaattttaccgaaccctctcttctcctctctctctctctctctctgactgcctcgcaagcctcgcctcgcctcgctaggaaggaaggagagagtggttgctaggctagcagcaggagcgaggcggagcggagctactcctactagcttccctttcgcggccatccatgcgcgcacgcgcgagcgaggcgtgaaatccgagcaatgccgatggtgatggcgcgcggcctgccccgatccgctcatctgtagtagaggtgggagtggggttggtggtggtggtggtgtggtggcgcgagatgggatctggaagcagcaaggccggcgcctcgtcggcgtcatcttcgtcgtcggcgtcggcgtcggcgtcggcgtccggcggcgacgaggcgagtaaggggaatgggaaggggcagcggagggggagggggagggggagaggcctgctgcagcggctgccgagctcctcctcctcctgcttccgcggccacggcacgccgtcgcgcgacgacgcttcctcggcgtcttcgccaccgccaccgccacggccgccgcggcggccgttcgaggtaaggaggacaccgccgtcccgcgcttcctttgactgagccgggaatgctgcctgtgcaaacgtcgtgtgatgatgaagtggtgtgcgtatgcgtgcatttccatcgatggactggggctagatctcgtgtttgttgagcgattgccttgtttttcatgtcgagtcgtggttggggggagtttgtggtttccaccgttttcgctgcagagcattcgagttagtacttgggtggggatgggagattgcccaatgcgatttcactgagtgctgcatgatttggctacagtggctttgacagtgagtggagcttgatgaatagtgagagtttcctaatccatactcatagtatgaatcagtgtataatgaaattgattaaatttgttgggatcagacaagtctgttcatatgtaagcaatatgtggttttatgaattagatgccctgctaataacagaatgatgcatttgtgtgtttccagtctagcaagggagaggagaatggaagcctgccttcaatcgctcaaatggacaaatcagaagaggatgctcccacaatccctaaatctcatccaggtgaaggggcaacattgccttcatcacatataaacagggatcaggatgttgatgtattgcagaatgccactgccgtcaacaacagggtggaggtcaaccagtcaccaaatcattctgacagttcacggccacgttttggtgtcaacttcgggttgagtagagctgtcagcttgggatcatcggtagcctgctccattctctcatcggacctctccacttcagctaatcctgatggaggccatggaaatgtggacaattcttctgatgcaaacatctcccagcaaggtggtgcatcaactgctgggattgattcgactctggatatgcttagagatagtgtaaccgcacaagctagagcagcccatcaggctaggagaaatttgctagaatccgacaatgctaacttgagatattccaacagaaggatgggacctcaggaaccttttgaaggcagtgttcgattcagccgaacgttgagtgttggacgtcttcgtgacagagttcttaggaggactccattctcagatgggttattcaccccttcacttctttacgatagggcaatatggccatcaggaaatgctagtgccaggcaaaattcagcaatcatgcaaaggactaattcagagagaaattctgaactgcaattggattcttcaaccgactctgcaactctaagagaggccaataatcgggatctactggagcgcagatcagcttttcttgagaggaggaggatacgatctcaggtgatctgtgtttcaactattttgagcctttagttttcagctatacatactaatgtgtttgctttcttaacaggtccgagctctccaaagattgggcagcaggtatgaaaatctatcaggactatcaggacatgagagatcatgcatactatctggtcagcatagaacgggaaattgtaattgcagaacgagcagtcgaccaggaaattctgatgaagaaacaaacacaagagctagcatatcaagaatcgttatgttagcagaagcactttttgaggtaagtagtacaattgtttgtagttattgccgctttcttttactggagaaaaatgttaaattgcatccataattccatatggttatacacatcaggttctggatgagatccaccaacagtctgctgccttatcctcaaggccatcgttttcttcaattgggtccgttcctgctccaaaggaggttgtcgagcgtcttcctgtaaaagtatacaggagatcattaaaacaccaaactgaggaggctgcacagtaagccactgagcttgtatagaaattatttaacatttttagttcaatatttgaacttctacccatgctcaatttatagccattattatttgcccacaaagttcagagtctaaaactaaatcttgaggacaagtgaagcagaggcaagtaaaaaactgtgaatgtctagagtgattaagatcttatgtcttttaattgcataggcataagattatttgtgctatttgatcacccatcaagtgcttggatgaagacatgagcggtattgagttgctatcaacgctctatctagccacaaacacatgccatttttaagtcaacatttaagtgcatggtctatggatgcaacctttttccactgaaatttgcttttatttatttataaaattctataaaactatggtaccatgaatgtagtttatgagacatttcttcacatctacttttttactcatccaaactaaatagaactggtgttagtactcaaaagttttgatactttgactagatgttgtgatgtatcatgcgtggtccgaaattccaaattttaagctgagtataagaaagggcccatggatgctaattcttggcttctcgcaatataacagaattgctattctcttcatagggcatttgagctgctagttcatttccagcttaggctgttgcgtctgtaaatttttctactgtagaattatttagtactatcgttgaataaatctaaagaaaagtgtgtcattttgcaacttctcatcttttccttgctatgcagatgctacatttgccttgttgaatatgccgagggagactgtgtccgtattcttccatgcaatcatgaatttcatctaacatgcgtagataaatggttgaaagagatacacaggtatgatggattaatctaaataatttataatttgcataagtaaatgaacagaactgcggtcaacatgctattgttacctctttatgtcagagctctatagctgttccttgataagtgttctaacataacttgagtaaatgacagttaagaaagcaacattatgtactgaaaagacctacatgcttcgtgtttttcaggggtgcgtgtggggaattgggtgccaattctttttagactacaaaatccaatcataaacgaaaaaataattcccaaccccatgtcttcttttgcaattttgttatcttcctgttaagtgagttttcaactgaacaccatgcgatcgaatactcattttctctttgacatggttctgccagtatagtaatataggttaattacaatacaaaaagatttcaatttttcagcaaagtagatttatacatgtacgtttataaattcttagttgagatcattggttgtatagatattttaaatatttttctttgcatcaagatgtgtactcgaaatagttcttgattgccacatttgtagtactttttttttagataatggaagctttattaagactcagtcaaataaaccaagatgatacatttcaactaagcccacccccggcctctgcataaaatgcacacagccaataaaaggacgaaacatacttggcttaaatattttaaactttggtatcctaacctagatatactttctccaataaagctaagagctacgtagtagaaccatatgagtttttctctgaatttagtttctcaatttgctcaaaacatctggcttcatatatatgtgtgataagagtagatgtcaggttagcattttatattttagagctaccaagatatgccatcctgctaatatgaacataacccttttctttcagggtttgtccactttgtcgtggtgatgtctgcagatccaatgcatcaggcattggaaaaaccacatgatcttctcttctgtgagaaaaatggagcttctgacattgtttctgatccaatcccaacagaatttgtaatacacgtgtttcaggtgtaatttcacatattctttccctccttcgatcaggacaactcagagtgctccttcatgtggtggcaaatttgcatcgcagtcatccctgttataaaatcgatgaactgccatgtgaatttggaattcttgtatggcaagggaagtttgttgatattaggatttcattatacgttttctttgagtgttgtttgaacttgttgagacgatgactgtctttttagatgcatcagccaacgacaactttcaaaattgtgttgtcatgctgaagcaatcaatagatttttcatgctatatgggtttgatgaggcaaagaggcagtttgtggctacctggcagtgcaggagtatcttatgattataatgcgcttagtatcttcttaaggataaatgaagtataactcttatagtcttgttgtatacacgtatacaatcatcggctaaatgtaagtatagacaaaactgccatcagctaaatgtttattgtacaaccaaacggaggaaaacgaaaaaaatggttatatacaccaattaccatgctatgagctcatagtcttgctatatttaatctattagactcgctctaacgtggaatacaactcatgttatgattgccaaacccaacttagataaaaacttccaatttgggatgttgggcgatgccacttggattaatgcgaaaatccacgtggaatacaactcatgttatgattgccaaacccaacttagataaaaacttccaatctgtcgtcaccagcaagcacaaattgggggagggggagggagaattaaagatgggaaagaagggtattttggtttaagaaaatattttgtcaatgatgagcgtttgagagtagtaaattaacgaaaccaatctatagagtgatatattaacgagacttacattttttacaatggcataatttcaaatttctctacaaggacatgtacgtcccctaaccttctcttccctcgtcttgcactctagcggttacaatggtattgctagattacaatggtattgccgtaccctagctcctttgaggccggagcctgacattattgatgaggaatacaatttaccgcaactttaaaataggtcaaatgtacagttgacccaaaagaaaaatactgagaagatacataacgagatgagccattaacacacgattaatttaagtattaattacttaaaacttaaaaagtaaattaatatgatttttttgaagcaaatttatataactttttaaagaaactatcattcaacagtttggcccgtgaaaatgtatgaaaattttcactcgattgtatcagtagcgacgcaccctattttttagcattttgttgtttacccatatacccagtgggtatgggtaagattcggtgagggctgggctaccatgggtatgggtatgggtatgggctgccgtgggtatacccataccctctgcaacggctgatccgtacgcgaaaaggaaaagaaaaaggaaagaaaaacctaaaaaaaatagctgataattaaaagagaggaaaaaaaaaactcgccccgtcgttccctcctcagctcctctcccctcggaagtcgaaaccctaagaaacgcgtagcgaaggcgaggctcccgagagagagagagagagccatggcggtggcggcgccggggcagctgaacctcgacgagtcgccgtcgtggggctcccgcagcgtcgattgcttcgagaagctcgagcagatcggcgagggcacatacgggtaagccccgaacctatcgattctccccccaatctcaattcgatttctaatcccttgaaaaacgccgttccaatccggctgcgttgttcgtaggcaagtgtacatggcgagggagacggagacgcaggagatcgtcgcgctcaagaagatccgcatggataacgagcgcgagggcgtaagtatccgtgcccctgtttccggcgattttgtgtctctctctctttttttttggtttgattgatgtattcttcatcgttacggtatctggcgtagttccccatcactgcaatccgcgaaatcaaaatcctcaagaagctgcaccaccagaacgtcatccagctcaaggagatcgtcacctcgccaggtttaaccaatgattcgacatagtagaacatcttgtgatttactgaaaaatcatcctctgtatccagaggaattgatggatttggttaattgttgcaggaccggagagagatgagcaggggaaaccaagtacggctttttaaaagaacgataaatattgatattcttgggttgctgcatatatttttttttatgttgaagttgttatgtcgttgtatagtccatggtaacaagtacaaggggagcatttacatggtcttcgagtacatggaccatgacttgactgggttggcagataggcctgggatgcgtttcaccgtgccgcagattaaggtaaaaccatccattatgttatgatggctcttggtttgctaggaggtagttcttgatccaatgatggcaagataactggtataacctcttgtaccagtgttacatgaagcaactccttacaggccttcattattgtcacattaatcaagttctgcatcgtgatattaaaggtatacaacactaagcttcgttacattttattcatctcatagtgatcatgattttgtggtttttatgctaaaatattcctgattcaaaatctactcttgcaggatccaatctcttgatagacaatgaaggtaacttgaagctggctgattttggcctagcaagatcattttcaaatgatcataacggaaatctcactaatcgtgtgatcactttgtggtacaggtattgcagaattatgaacttgccattgaattttgcatattgtgttatggtatttagtttttgcttggatcatgctgaccatttgccaatgattttcagacctccagagttgctgctcggaagcaccaagtatggaccagcagttgacatgtggtctgtcggttgtatttttgcagagcttctcaatggaaagccaattctgccaggaaagaatgaggtacgatttcttcaggatttgagctagtaacatcactatcttaggattagcaattcatatggtaagttttttactagtcttggtatcttggagttggatgtgttctgaactaatatcttattgtgctaccgttgaggaaatttatgattctacctcatgttgaccaaaagaaatacggattctttgttgtcataatttgtttaaatgctattaacagctgtttctgtttattactatgattatcgacaaaacttatgtttaagaatgctttctgatgaagtgatgtgacttctgcatacatgtgaaagtgaaaccagagtgtatagataatggaacaaattgatagatttgtgcaatttagaaggtagaatgaaactttaggaagttccctatatttagtgtactgccttcagtcataaattaaactttgctgctgcagccaccagggaaaaacatgattcatcctgcagccctgtacacgaaaaatgatttgcacctagtgcatgctcatttactgaatttgttttagaagttgagaaatgcctttatgctttcccaagaggaacatgaacttaacacattcactgtgggtcagctttatgaatcttaatttgtttcaagacctgtggggttactttgtacatgacatgaactctgaacacggtaactccctgtctgacctagctctccctcaccttagacaaatgcaatcagtctcttgaattgtttcattgctgtcatacattcgaagcttgaatatgtaacttaatctagttaataatgcacatttgtgagtgaacttttgtcgctctgcctttttatgcagccagagcaactgagcaaaatatttgatgtttgtggcacacctgatgaatcaaactggccgggtgtcacaaaaatgccttggtacaacaatttcaagcctccccgccaactgaagagacgtgtaaaggagtactttaagcagtaagtattatactcgtattgtttgaaacttgcttggctactcttccaggttacttaacctttatttgttttcagttttgacaggcttgctctggatctgcttgaaaagatgttaacactagatccagcacaggtatattttcttcttttagtttgcttactctgttgacataggaaatgcccgtacctgcgtatttcctcagctgtcattgcatttcattactgagctgtaagttgacatgattttgcgctgttcagaggatatcagcacaagatgcacttgatgcagagtatttctggtctgatcccctaccatgtgatcctaaaaggtagtgatcatggccttctctcctgttcttgccatctaaggttgctattttggatctcttctttctttatttgatcatatccttttcatttggaataatgcagcttgccaaagtatgaatcttcacacgagttccagaccaagaaaaaacgccaacaaatgcgtcaagccgatgaagctgcgaagaggcaaaagacacaacatcctcaaccacatggccgtttgcctccaattcaacaaacaggacagccccatcctcaaatcagaccaggccagccgatgaacaacccccatgcgccgatggctgctgggccaggccatcactatgcaaaacccagagggccaggaggctcaagcaggtatccacagggtgggaaccaaggtggaggatatccgaaccgcggcggacaaggtggtggtggcagctatggaaatgccccttaccctcaacaaggtcgagggccgccgccaccgtaccctggcagtggaatggccggaacaggtggcccaaggggtggcgttggtggtggctatggaggaggatcaaattatccccagcaaggcggcccatatggtccttctggcccaggccgagggtcaaattatccccaacaaggtggttctcgcaaccagcagcagtacggaaactggcagtagtacgttacctaaactcagcaacactatgccaattgtcttaaactctgatgttgatgctaacttgtgcttaatctattctattgggcattacattttgttagagcgtgtattgccctgaatccagtaggaattgtagcaatgttgttcgttttgattaaagaatgataagagatacacaaattgagcaacaagcaaattgtcttgaattttcactagttggtttggtaattacagctattttacaagttaaaatggtactttacacgtcgaagaaattaatgtgttctattaggcattacgtttgttagagcgtgtattgcctgaatccagtagggattgtagcaatgtttttcgttttgattaaagcatgataagtcacaagttgagcaacaaacaaattgtcttgaacttttcacttgttagtttggtataattacagctatttacaagttccaatggcactctttacacgtcgaagaaactattcagattcggagtctgcttcgttggtgtagagccggccgtcgtctgctcttgcggcgtagtcgccgccgccgtcttcttgggctcaggctcgtcgacgtccttgcgctcgtagtagtgcggcgcgatctccaccagccactccggcttgagctccgtcacctgcctcatgtactccttggtcgtgagcaccagctcgtggtacaacgcccaccgcggcggcgcctgcgccaccccggagctcgggtggacgaacaccgtctgccggctcttcacggcgcggtacgacccgtccctctgcagccgcgcagcgtggcggaagtagcccgccgtgaccgccttcctgaccgcgtcgaggtcgccgccgccggcggaggagcacggcgcgatctccacccgctcaagcagcgcccccagctggtcccgcacgtcccgcgcgcgccgcatggtgcggtgctgcacgaagctctcgcggcaccactgcggcgagtagccggactccgcccacgcgttgtacacgttgagcagcgcgacgtggtcgccggcgttgccggcgtggaacgcccgccgtgcggcgtcggcgtggacccgcttgtcccttgggcggtagaagacggcgttcccggcggacagcatggccgcgatggtgatcacctcctcggagcacccgtacctctccgacgcgacgatggccttggagagcatggggtccagggggaactccgccatcctcctcccggtcttggtgagctcgccgcggctgttgagcgcgccgagggcgaagagctcctccagcgccctgagcagcgactccgccggcggcgggtccatgaagtcgaagccgacgaggtcgttgatcccgagcgccttgagcgccagcacgacgctggcgaggttgctccgctggatctccggcaccgcgtcgtcgtcgaggtcgctgacgaagttgtactccgtgtagagccggaagcactcgcccggcccggtgcgccccgaccggccggcgcgctgctccgccgacgccctcgacaccggcgccaccaacagcgactccatcccggtgcgcgggttgtacgacttcaccttgcagaaccccgggtcgaccacgtacttgatcccgtcgatggttttttacgtctcggcgatgttggtggcgagcaccaccttgcgcgcgcccgccggcgccggctcgaagatcttggcctgcagctcggcggggaggttggcgtagatggggcagatcaccagctccgccaccttgccgccgagcacccgcagccgatgcctcaggatctcctccaccgtctcgatctcctcctgccccgtgaggaacagcaggatgtcgccgccgccggggggctccgtgacgtgcagctgcagcaccgtcacgacggcggcgtcgatgtagtccgcctccggcgccacggtgtagtggatgcccacctcgaaccgccgcccggggatccggaagacgggcgccgcgtcgaagaagtcgctgaacttgtcggcgttgagcgtcgcgctggagatgagcagcttcatgtcagggcggaggcgggcgatgtccttgacgaggccgaagaggatgtcggtggcgagcgtccgctcgtgggcctcgtcgacgacgacgacgctgtagctgcccaggtcgggctcgccgaggaactcgcggaggagcatcccgtcggtcatgtacttgatcaccgtcttctccgacgtgcagtcctcgaaccggatggagtagccgacctcgtgcccgagcttgacgcccatctcctccgccaccctcgccgccacgctcatcgccgccacgcgccgcggctgcgtgcacgccaccttcttcctcccccccgccgtgtacccgacctcgtggaggtactgcggtatctgcgtcgtcttgccggagccggtctcgccgacgacgatcaggaccttgtgctcgtcgatggccttgagcaggtcgtccttgagcttgtacaccgggagagtcttcctctcgtcttgcaacgtggccttggcatccatggcctcggcatggtactcgtcggccgccgccgccgccgccgtgtcgtcgtcgtctgcaggcgcggtgcccgccatcaccgtcgacctgacgaactcgacgccgtcgtcgaacaggagctcgtactcgtcgccgcgccggccgcgatccatggatccgaactgcagcctcgacttccgtatctgctgctcctcccaggcctcctgctcggacaaggcgttcgccgtcttgccgtccctcgccgcctcagctggctcctcgtaccgccgccgcgccaccgagaacctcttctcctgatcgacgttcgcggcggcgtcgtaggcgtccggcattctgtagtagtcgtcgcgatcgtgcacgaggccgtagacttgcttcttgtgcctcatgtccctctcctcggcggccgtcagctggacgccggggaagaggaactcgtggtcgacgatctcgtcgcgcatctcctcgaccttcttctccttccgcctctgcaggtacgcgcgccgggagagcctcctgagccccgaggtgtcgttcttgtccatggcgtccgaccggcgcgcgagctcgccctgctcccgcttggtcgtcttccgatccgtcagcctcctcgtgctcgccgcgtcgcgctccctgatgttccgctcgagctgcgccctctcgatctgatcccgctccatctcttcttcctcgccggcgtcgccgtcctcctcctcgtcgtccgggctacgccgccgtcgcgcgttccgtccggcatcgtcatcgtcttcgcccacggccttcctcctgaaacgcttcctgccgccgctggagggcgacgcggaaacgccgatctcgccgtcgtcgtcgagcagcttgatggtgctctgcttcttggccatcgccgcagcctcctgcatctgcctctggtactcgctgaccccggcgtcgtcgccgccgccgccgcaactgcggggcaccctcccgtacacgtcctcggcgaacgcggcggtgtcgggggaaggcgggaacccggcgaggtcgacgagccgcgccgcgaggtcacccgcggaggcgcactcccgcgcgaggcggacgacaagccgcgccacgaggccctgggagtatccgaggagcgccatgaggcggtcggagacccacgtcctgagctggccatcatcgctcgccgccatggcctcggcctccgtagcctcgtttgcggcggcggcgcggcggtgccgcgagaggcggtatcgaagggggttacgggcttgggctttgtggtcgccggtcggtggtgcggccaaggccgctttatccgtgcgtgaccgtgtttgtgtttgacgtattcgacgtggaggtggctccgctatggcggttcgtgtcagtgctgggaaaccgggaaccgacgcaaaccgactttgagtttggcgcatgttttttttttaataaccccgagcataagtcaaatacacgtgcatacgtcacacttgtgctacacacatttgagtgcgactcaactggcgtatttgtctctggtcaaaattttggtaatgaactggtagggtgtagccagttcaaaatttatgtcactactaaattaccatttttcatatcaccgtccgtttattttattgacgggttaaaaaaacacacgcttgtgaaaatacattttggagattatggtcatgaaccgctagtgagaatcgactttcgctaacagtcacttaaaaggtccacttgtaaaaatagagtgtttttacaaacgggtctattaagtcatcgttgcgaaaaaatcaattttcattggataaagaggatcgtaaggaaaaaaaatcgacataataaaagaggagtccttgaccaatccaccagctgagtccctctccttcatcctctcccttacctctccttcctccctctcccttcagcttctgggtcatttaactttttgtcacttttaaaatgtggcaattaggaatttgttattcacaatctatgtgagccctcacatgtctatgatatgtgggtccaatagcaaatccttaattgtcacaagtaatagtggcaaatagttaaatatttctccaccttatgtaccagtctccttctccctcctcctttctagaaaattgtgatttttctatcgcaaaagaatggtttcgctggaatactatcccttcaaagtgattcattaaaatgctattctaaactaaggctgcattctatacccatggttcccaactttcctccatcgttttacgcacacacgcttttcaaactgctagacggtgtgttttttgcaaaaaaaaaattctatacgaaagttgctcaaaaaatcatattaatccatttttgaaaaaaaaatagcaaatactaaattaatcgcgtgctaatcgctactccgttttccgtgctaggaagtgaggttcccaaccctcactcccgaacacagcctaagaggtgttcactgaaatgctattttggatctttttggttagtactaatgtttttactctcttttagtttttctccggaccaaaatgccctcgcctctatgtcctcctttcgcccaggataatggctggttgacacatgctttgctctagcaaaatatattgctatatatttgtgaaacctatgcacggctcacgctccgctgcgtgatatatatatactaattgatcattaacactaatacaaaagctctagtgcactggtttgaaagtcaaacagcacttctctggttttgacacatgctttgctatagcaatatattttgctttcacattttgtacaattaaaaatggtgtgtagtccagttcagccacaagcgcgcatacacatcaagatttttctcactccaagttataaagatataatggagaagctagcttaacccataaaatttgggcatgaaaaaattgtaaaaacaaaatagaacaaatttggacagcatgtagacataatattgaatagcatgtggttcacaaaatacctcacataacaatggttcacaacataacagtagttcacaacataccagtggttcacatgcaccatggttcacaacgtaataaagacaaggacacaagggtattttggtcagaacaaaacttaaaatagagtaaaatcatttctagcaatcaaaaagatctaaaatagcatttcagtgaacacccttagtttatgatagcatttaatgaatcactttgaagggatagcattccagcgaaaccattcttttgcgatagcaaaatcacaattttctccctcctttcgcctccttccctaccggcgtcgcttggattccacaggtgtgtgcccctctcctcgtccttccccatgggtggtggtgagcttgggcgagcctcgcaggctgtatgtggtggtgactcaggcgaggcgcgcgggtgaagctagggtgaggcgtgtgggtgacagatctggtagcggcgacttggttcgatagtggattcgtcggcggacctcgcgcgaggcacatgggcggcggatccggtggcagcgactccgttcagcggcggatccgatggcatcgagtctcgcgggcggtggagctcgagctgggcatgcgggcggcggatgcgacgacgacgacgacttgtgcgggatggtggatccgatggcaaggcattagcggtagtccggtggcagcaacttgcgtgggtgggaaggtacaagcggtagttcggctgatccagtgacaacaaaccgtgctccaacgaggcgtgcgtcctctgcctctcttttttttttctcttttctatttgttctttccgttctcttccggatccatgttggtatgatgcaaatgatttgatttgtattttgtgtttgatctatggaaatgggcagggagctagggttcctaggagagcaatgatgcagatgatttgttttgttttttgtgtttgatatgtgaaagtgggcagggagttatgggggagcagggtttctaaaagttttatttttttcactgaaaatctatgttgctggcttaacctcaccatttgcaaaaatgattttcacaagtggtcggcttaacatagctgcttctggaaatcaattttcactgacattgtaggacccgctcgcgaagattgtcgattttcactggcttttgatctcacggtattaccagccgaccgactgtaaaaacctattttgaccgcctgcgaaaatcatttctattttgtagcggcttttaagtgccgctacgaaagaggcagcaatcgtagccaatcaatgccgatgtgtagtttgctatcaatatgtttggtatagcaaagaaagttaagtgttgttaaattgagtatggagcaatgggagattaaaaaaaagattgagtatgggaattatccatgctttgactctaatccaacccaatcacattatcattagagttgccaaataatcgtcatggcacattttgacacagatccaaaatggcccaacactcatctaaacaggattggaggccctagcccacaagcgccaattttttttgagaactttgacatctattcttcacgtcttgcaccatagttgttcctatttatttgagcttacatttttaataagttcataatattgtaagacgtaaagatttttagtaaccaacgcggctggaaatatgttgactcattcatcatttatcatttataaacgaaaaacccatccgaaagctaacttgatctgcaagaacaattgacttgtgaacccagaagtcaaagtagatactccaacatcgtccgaactcgtaagattttccaggatttgcagataccgacatacgtcgtttggatgaaacggttgctagggcagcttccgagaaaatcactgtaaaatagtactagcccatagctccaacgaatgatggcagtagccagatgagctagctgttgaccaacaaggttcagttgcccagattgcatcgtgctgctacgcaaatgggctgcgtgcccctcatggtgggctgcacacgttcggaatgctcatcatgaattccgaacctggaaaaagttcactttaggtacatcatcttgacgtcgagtttaacttgcatacttaaaccacaataccagatataatgcatccctaaatttacaaaaccagtgtaccaattacctgaagcagtataatacctgttttggttgacttagcgagtagatcccatatgctagcaactcactcttcttccttctccctccccctctcccctctttcccatccctcttcagaataggtggcgagagatggggagaaggaaggctattggcgggaggcagtggtagggagacgcgagctagtgagcgcgagtccgtgagcacgggagcctagaggaggaagaacacgacccttccagtccgctgcaaccatcgctcctctccaagaccgtccttctccacgctgcttgccacctctagtaggtcaccgtgcaccaccccctcccccttgtcgacaacccttttcccagccgcttgctaccctcccgttggctgcctctccctattagccgccacccttctccccaccactcaaagccctcccatcaacttctgctcaaaggcttggtgagaatctaagagaaggggaagtgagggaagaggtgggaggaggaagatttagccactgacatgtgaggcccgtgcaatataccgctctgggacctcgggcaaaccagttttataagttgagggacacgttatatccggtattgcggataaaggaaataattcaaacttgacaccaagataagagatctaaagtgaacttattccttctggactttcgctagcgttgacggctcagtaactttaatagtaaaattcatcgttttttattagcacgttttctgtactgctaaaccatgtattttgtgtaaaatttatctatataaaagtaaaacaaattaaataaacctaatttttaaatttataataattaatattcgataaattatacgttcatgggctttcacttcccgtcaaaattctaagttcaattcctcaaagcaccctcagcttattctcttctctgattttaatacaagaaaagatgacacggaacaagcatctggacgaccttggacaatgcgcagagataagggagcatcgcatcgcatctcgcaagttcacaacgcgttttggtcgatgaatcaacaggaacaggttcttccatgtacatgccgacaccgatgcacgtttttacactttgcatactctccgcgaaccagatctccccattctccccgcccacccacccgcgcgcgctgaggctgtggctgtgactgcgactgcgactgcttttccgcccggcaacgggccggggccgcgtgcgctgcggctaattaggctggcgccggacgaggcggatgtggctgctgtggcggtggtgcgcgccgtcgacggcgccgtcgtgcccgtgttgcccctcaccgtggtggtcgtcgtggtcgtcgaggtgccagctgtggcggtcgggctggacccagcggccgtcgggggcgcggaccatgcccttgttctcgtcctggcgccagcacgggggcacgcagtggtggtccttgaggaagtcgcacgccttgttcaccagcgccgggtcgcgcccgctcgccagcacgaaccgctccccgcgcccgtggtacctgcatgcaccaacgccatcgcgcacatgtacacaccgtcaccgaccgatcgatacagaaaacgcaggactagtagtagtactcggaacgatgatataacctctatccagaatacttgtcaagtttttttttaacttttaatccatcatcttatttaaaaaattatagatttattttttattttttatttactttattgtcaaaagtactttatgatttctctgtttttatatttgtattaattttttaaataaaacgaatggtcaaagaaaaaaaaaagtcaaagcaactactaatttactaatttatgacggagggacggaggtagtatatgctaatctatctatctatctatctactattatatactaaaagtccattaaacgtcctacaaacgctcctaagccgtcatgtggcatcctataaacactatcgagtcgccacgtgacaaatcataaaaaatctatctattatatacttaaaagtccattaaactttctacaaacgctcctaagccgctatatgtcatcctataaacactcttgagtcgcattgattttccgttaaatcagtggacccatatattttaaccattagatctcttccggaaaaaaaatccggtagccccatccctatcatgcgcaggtactccctctgacctctcttttcctctcctattttctaggtaactactcctattttttagctaattacaattagatctatctaagatttcctagctatgtttatctttgtaagatttgcacgtacaaaaagttccacatacgtacgtacatacgtactctcactttttttcccttgatgagatagaaaaccaaattaataattcaatacacatattaactgttaatattttaagttgtaaaaatacacattagtaaattagaaaatatttctagaaaaatacgaggaaaaaagcaaaacatctggtcatcgatttttatttaaattagtggatatgttatctcggatcattaaattaaatatattaataaccttacacctaatctctctcagcgcaccgacgagagaaaggtacttacacacagctaataaaaaaaccaaaaaatacatatataactgtaatgtgtgattaaaaaggataaaatggaaaaaaacataaatttttattccatgtatcattaaaaattacatccgcttccatctcctcctctcttttctccatgcatgtatagatgagattgtaactataattagtgatattaaattttaaagaactataactttataaacatagattatatatatcataatatatacgtaaataaattagatccataatctttggaaataaaatttattggactctgttatttcacccattatattaacaatataatataattttatttcgaaccattattttaaaaacacacggtttaaaataaaggttacagaactatgttttgtaccattaaattaccaatttatgatctatattaactaatttatacttcaattagtggactcactattttaaattatttttaataaaatattttgccatcgatttttacttaaactgacggacctattaattaattaggcagacatatctatcttacgtaaaaaaagaaaaaaaaagcttctaaagacctatcttcaatcctctgcacaacacacgtgttcatatttgccttctgcagatataacaaagcttcgtagctgaggtagctaaaagtgattgccaaagtgatcatgattgtcgataaacactacacatactaattaaatttatataatttctctcttatttcaaacaaatattattttgaagaaaacaattgaacatgtgaaaaacaaaaaaaaatagcttcaaataattgctgatatttttgcactactaaaccaagcatttgtgcactactaaaccaagcaattgtgtaggtgatttgtgccctaacataaaaagcctttaattctttaaaagtgtggaaaaatatgaacattttgaacttctacgaagggaagaacaatgcaaccgttaatctatccttaatttggttgttactaaatcatgcatcttcatgaggcgattcaatcacaataactttaaatttcttactatttatagtaatattgtacagtatgtgttcagatggtatacatattatttacttactatttacttactagatccaatagtcgacctcatataaccttgatttatcttctaagtcgataaatgatatttagacatgcccaacctataatttacctttataaggtacaatttccaaaaaaactataatatcacgttttaataatacgaatgtccacggaccacctttctagttaatatacagattgccaatggcaaaatatacgtctcagccaacgatagaaaacgacaaatattgactagaccaatgacacgccgtacgtgtgttttggtccgcctttggtagttgcagccgctggctggccggctggttgatgtggctcaggcagtcaggctcacgttggtttcgtagagtaaatggggagctatgccccccgtctggcatgacaacttgatgattgctccggtacaagggacccggtttcttgaaaactctagtatagcaccatgacagtagccacaccaccatggtgtggtagtattcattaatcaggtcgcattgtgcattgatcctaccgtattgatcaacatttattgagctgtcaaacaggctggcatcccacttaaataaacccgaccttgctgaacccccttgataggagtagacaaccttaacagaacctcaaaccgcaaactttcagcgaggcctggtttagttcctagtaacttttttttcaaacttttaacttttccatcccatcaaaactttcctacacacataaacttctaacttt

SEQ ID NO: 6314 - DNA, 4963 bp, Oryza sativa
atcagctcatgctcagaaataccttttttcttgtaagggttcttttgtttggcatgtgttttcatatcttatctttcttttactgatactccaggattcccagaacattggtagtttataatttatatggctaagatatctcttgtggttaaccgaagtaggacatgcatatgaagatattcttttggttgagttttattgctttttttaactctttaccttcaggtctgaccttaccaaggatgagatggaagccgagttgtcttctcgtgctaaaacactcttttgggctagtgttgttcttggaacaatgtcagtttgcttgctgggctttgcgacttacaggtatcaaactgtgacatttttgcaattgttaatgattttattggttagtattcaattagtatttagttctgaggataatctacagcttgatacttcaatcttactctctttgttagttatttcgtacatcttgtgagttccagatgacttgatgttgtactgatgcaggagctggaagaagatcaaagagcggagggaggcaaggcaagcccaagaggtatttcgacaaactactgatgaagttacagacgatcagtctagcgatgaagaggctggtgaaatgggagacgggcaactatgtgttatatgcttaaggaaaagaaggaaggcagcttttattccttgtggtcaccttgtctgctgctgcaaatgtgcactgattgtggaacgtcagttcgacccattgtgccctatgtgtcggcaagacatccgatacatgataaggatctacgacaattgaggtacgtgacaagttttcttttagccttttggagagggactactcatgatgtttgactcacttaaattgcaacatattacttgggttacactaaggaaaatctgcaagtgtatccttttttggctgttctgtcacaaggaaatgaaattcttgccgatgtgaaaattatttttttggcagacaactcctggttaagctttaagctaaacagtaagtagatgaacagcactgtagatacatgtttaagtgaatttagtttcctgcaataggcataaaatgttaactcttctatggaggagcattaactgttagccgcattagcctgacttatttgatttttagcatctgaaatagtggaatttggagatgacttatttgatatttgttgcaggcttcttgatgttttgctgataacccttcgacactgtatggtcacccagattgtctgcgagcctgaagacctcaactgatcatcctgcgtgcactagtctaagctacttggctaacaaaactatgttacctgaattttgtgtatatatatgacgtgttagtcactcccaggagaactcatatgggcagagatcaccggatacttttcatagtcgcatagaatcctgtagctagccaaactgccagagtcatgagctgacgcctatagttgcaattacagtactaccaagtttttgttggctctcccttctcatgtctgtgcattctgtaaagatggttttgccgctagcaaaagtatgatggttcggatttttattcttgttctgctgatccatgaatttccagttcctggtacgagtttcaggttgtcgtgtttgcaaatttgtttcaggactcgggagtacgcaggagattaccgagtgatagaatttcgccacttaaagagaaagacagctgtgctgggaatctgggacatgaataaaatgaaattgtaaataaagtatctgctatacaatccgcactatgagagcttattcatatgtgtttatatagttgagtgcacacgtatatttgagagtttatgtgcttatacagatgagtgcacatgttatttgagagtttgcgtttgtagtgtatttcgatttttttaaaaaaaagaaatcaataagggagtctaccggtagagaggcgaaaacattgatttttcaccagcgaggagataaaccttgtaaacctttttctctaatccaaaaacaaacttgaattatgtgtacttacttgcgccctgcgaaacctcccgagacttaaacgtaacgcaaacgtttgaacaggctgaccgcaggattaacatcgaacgatcaatactgcaacgcaacaacaaccatcagacaaagatcggacggctaggaaggaaccctagcacccgtgagtgcctatataagagacaatcctctcgccctaatccctcccctctcccatctcaccccgccgccgccgccgccgcagcctcctcaaggctgctcccatcctctccttcgaggtcagctgcagatcttctctcttctgttgtttgcgccggttcatggtagttcgtagccgtagatctgattcgatggagcgaggtttgggtgatttgatgcctgggcatgttgtttttgtccattattagtaactttttctgtgtattcgtctcactgctatgatcttagtttgctgttcgttgacgcgatgatttattgacttgtcggtgaatcatttatgtacgttgaaaattatcggtagaatcggactattaacttgatgtgctgcagaatcatgtacataagttgaaaatcatcggtagaatcagtagaagtatttctatctagaatccgttcgaatatctctgtttttatgttcgaatagatggtgttatcgtctatgcctggttcggtttggtcgattactgcgcgttagcacttataattgatgtcgaagttcatctgatctgtgagcttgcctgtaatattatttggagttagaaattatgcacgcctgttgtttctaatctttgtttcgttctgttttgcagttagcttcctccttattcaaccatgggtaaggagaagacgcacatcaacattgtggtcattggccacgtcgactccggcaagtcgaccaccacgggccatctgatctacaagcttggaggtatcgacaagcgtgtgattgagaggttcgagaaggaagccgctgagatgaacaagaggtccttcaagtacgcgtgggtgcttgacaagctcaaggccgagcgtgagagaggtatcaccatcgatatcgccctgtggaagttcgagtccaccaagtactactgcacggtcatcgatgcccctggtcaccgtgacttcatcaagaacatgatcacgggtacctcccaggctgactgtgccgtgctcatcattgactccaccactggtggttttgaggctggtatctccaaggatggccagacccgtgagcacgctcttcttgctttcactcttggagtgaagcagatgatctgctgctgcaacaaggtatatatctgtagtgtttggtcttttgttatgattgatgagcctagcacttgtttatacatatttgtgatgctattgcagaaacttttggttacataaatgatttactgctatattcagttggaaattggaaatgaacatattcgtgatgctattccagatattcttgttttctgttatgattgatgagcaacttctgtgaatattcatgatgctagtcctgaatactgttgattacatcaatgaagtagcattttcttttattgatttatccctctgtgctagtttttctgactgtctaccttctatgcatctaagactgcaatttaccatgcatctaaggctgctactgttgattgttgcttttgttatgactgtctgtctttatgatgcatctaagattgcaattgttgttggttgctttcctgctactactagctttagtaatttactgctgcaagaaactatacatatcttctgttagatttggttaagttcatttagatatcgtgctgtatgttactttatactagacttgtattgatgttgctgtccacctgtatttcattacatattggttgctattatttcattttttgtatcttatatggtgtttataatatgtttcataccatttgtagttagtaatgtatttgtatgctggtgcctgcccctgatttgttttcctttgttctgttacagatggatgccaccactcccaagtactccaaggcccgttacgatgaaatcgtgaaggaagtctcatcctacctgaagaaggtcggctacaaccctgacaagattcccttcgttcccatctctgggtttgagggtgacaacatgattgagaggtccaccaaccttgactggtacaagggccccaccttgcttgaggctcttgaccagatcaacgagcccaagaggccatcagacaagcccctgcgtcttccccttcaggacgtgtacaagatcggtggtattggcaccgtgcctgtgggtcgtgttgagactggagtcctcaagcctggtatggtggtgacctttggtcccagcggcctgaccactgaggtcaagtcggttgagatgcaccacgaggctctccaggaggctcttcctggtgacaacgtcgggttcaacgtgaagaacgttgcggtgaaggatctgaagcgtgggtacgtggcctccaactccaaggatgaccctgccaaggaggctgccagcttcacctcccaggtgatcatcatgaaccaccctggccagatcggcaacggctacgccccagtgctggactgccacacctcccacattgccgtcaagtttgctgagctggtgaccaagatcgacagacgatctggtaaggagctggagaaggagcccaagttcctcaagaacggtgatgctggtatggttaagatgattcccaccaagcccatggttgtggagaccttctctgagtaccctcctcttggtcgttttgccgtgcgggacatgaggcaaacggtggctgttggcgtcatcaagaacgtggagaagaaggacccaaccggtgccaaggtgaccaaggctgccgccaagaagaaatgagcctcgttcaagtggtgctttccatatctgcatttgagatatctagctcttttagtactcgttaagtttt

SEQ ID NO: 6315 - DNA, 15199 bp, Oryza sativa
aaactgaaaaccgagtgggtgtcggtttagcatattgttttgtttagttctttctgtcccataattgtttgggttgaattatgaattgattgggatttaaatttttgagattttgtttaccggccaagctaccgaagtactacaggatgaggtgacacatctgactgtttaccgctgaaattattctcatgggtcgtgtgatttctcccggatgcctatataggaaattgagttcaataaaaaacgatatttaatcattagcgaatgactaattaattgttaataattgtgacttaaaatataaattggagtatgatttaaaataactttcttttttaaaaaaaaaaacgagcgaaaggttgcttacaaaccttcttcctcctttgtaccgggctatacaggcatgggagaggaactatggacgagggcatgactctagttgtgtgctacctcggcgtcagcaacacgagagggagagctcgtcatctttataggccgaggaggtcggttactgggaatggatagaggaagaggacgactatgccgcgacgggtctagtgatgatgaaccgatggcaacaccggacatcggccttcaactggccaacgacatttgtttgtgcggcggcaatggcttgcaggtaacacgcaactagtgaggtgtagaagggagttggattggtggagggaaggaaaaaagaatgcatgggccaaatataagggatttctgcccatattaatagggactttgtaatttttgaagggatggtttgaatatgatttaaaagaaatgggatttgggataaattgtttagggactatatgagtttggaggatgaatttaaataaggtttcatgggctctaggggtgtttatattatttttggaatagggattcaaaggaatttaactttatggcaatgattggaggactaggacaataggattaaaaataaactaagggttttataaaaaaaaatgaaagaaatttagatgagaggctttaaatattgaaataaaacattaaatatttaggtcaaagataataaaagaagataaaaagaaaacaagatggctccaatttaaatgaaaatcaaggagggtgaaataaaaactttttcgcataattttttcttaaaattttgagtacgttacagagtaggccacacattcagctaggtgtggtaaaactaaaccaattcactatgtgcgtgattggattgagcggcatgtgtggcaagctactttatgccccattcttgatgggtcctcacttatgcttgccccaaggcttaacggtttcggaggcttagcatggcaagctctcaaacatactcaggcccggtttagtttcaaactttgaaccccaaaaacgtcacatcgtacttttctacacacacaaactttcaactttttcgtcacatcgttccaatttcaattaaacttctaattttagcgtgtaactaaacacaccctcagctcatggcgggccttgctaaggggtcggcccatgggccgacgaaactagcagataaaggagctgctaacaaaagttataatatctaatagtgatacgaatcaaatcttcccttgggcttgggtcatctggtgtttcatggagcaagtataataggagaaccgagactaaggaaagggggttagatcataggtgttacacatccagataaccataaagctttataatcccgtgcgttcacttgatctagcgatttaggggggttccctaacctcatacttattcctaactactccctccgtttcaggttataaaatattttgactttgttcaaagtcaaaatgctttaagtttaaaagtttgtagaaaaaaagtagtaacattttcaacacaagacaaatttattatgaaaatatattcaattattgatatgatgatactaatttagtattataaatattactatatttatctataaacttagttaaccttgaaatagtttgactttaaccaaagttaaaatgtcttataacctgaaacgaagtaagtaataactgtccgcttaaactcactgaatggggccttggatactccacaatccagatcattttgcccgacaccttggtctcaaaacaactatatagaccggtgcaaagtgactatttgcaactaaacgcccatctacttgttgcaaatctacttctcccaaacatcctcctctaaaaaaaatttaaatatacttatcacttgagcgctgcgaaacctacagagacttgaacgtaacgcaaacgtttgaacaggtcgaccgcaggattaaaatcgaacggtcaatactgccacgcaacaataaccaccagacaaagatcggacggccaggaaggaaccctagcacccgtggctgcctatataagaggcaatcctctcgccctaaccccctcctctctcccatctcatcccagccgccgccgccgcagcctcctcctctcgccatctcccgtcctctccttcaaggtcagcttcagatcttctcacttatccttgtttgcgcctgttcatgatcgttcgtagctgcagatctggtttggtatcgcgaggtttgggtgatttggtgcttgggcatgttgttttcgttcattttttattgtgtattcgtctcactgctgtgatcttagtttgatgtccgttgacgcgaagataaacttgatttgtccgcgaatcatgtgcgtatgttggaaattatcggtagaatcgaacgataaacttgagttactgcataatcatctacataagtggaaaactactggtagaatcggtagaaaatctgtatctagaatccataatttgttgttaaactactgctgagtagatgttgttattgtccgtgccctgttcagttgggtactgaaattctgtatctaaaatccaatccgtaaatttgtttctgtaaatttgttattgtgctactgctgagtagatggtgttattgtctgtaccctgttcggttgtgtcgattactgcgcgtctgtgtaaatctcatgctgattttgatggctattaacgttctgtggatgtccaagtgatctgatctgagatcttgcctgtgatatttatttggagttaaaaattatacagaaaattgtttctaatctttgttttattacgtagaacagtcagctacctgcttaatcaaccatgggtaaggagaagacgcacatcaacattgtggtcattggccacgtcgactctggcaagtcgaccaccacgggccatctgatctacaagcttggaggtatcgacaagcgtgtgattgagaggttcgagaaggaagccgctgagatgaacaagaggtccttcaagtacgcgtgggtgctcgacaagctcaaggccgagcgtgagagaggtatcaccatcgatattgccctgtggaagttcgagaccaccaagtactactgcacggtcatcgatgcccctggtcaccgtgacttcatcaagaacatgatcacgggtacctcccaggctgactgtgccgtgctcatcattgactccaccactggtggttttgaggctggtatctccaaggatggccagacccgtgagcacgctcttcttgctttcactcttggagtgaagcagatgatctgctgctgcaacaaggtatatctctagtgtttggtcttttgttatgattgttgagcctagcacttgtttgtacatattcgtgatgctattctagatacaatgaagtcgcataatctgttttattcactatgcatctaatacttcaatgtttgattcttgcatatctatcttcttttatgattgatctgcacagcacttctgtacatattcatgatgcttgtcctgaatactcttgattacatcaatgaagtagctttcatttgaacgtctagttgtttgttactttatactaagcatctatttgattggtttaagttatattttaaattatctggttgtggtgttgtacttcattttgtcatttttatcctgctggaagttgcagcccctgtcctgtttcattacatcttatctggtcactgtgtatcttatatgctgttaagtaccttttgatactcctacatctggtccctgctcttgtatatcttatatgctgttttaagtattgtttcatatgatcatatcttgtatggttatctttgtttggttgccaaccgaccccctgctgaggaaagttattgatttgttttcctttgttctgttacagatggatgccaccactcccaagtactccaaggcccgttatgatgaaatcgtgaaggaagtctcatcctacctgaagaaggtcggctacaaccctgacaagattccctttgttcccatctctgggtttgagggtgacaacatgattgagaggtccaccaaccttgactggtacaagggccccaccttgcttgaggctcttgaccagatcaacgagcccaagaggccatcagacaagcccctacgtcttccccttcaggacgtgtacaagatcggcggtattggtaccgtgcctgtgggtcgtgttgagactggtgtcctcaagcctggtatggtggtgacctttggtcccagcggtctgaccactgaggtcaagtcggttgagatgcaccacgaggctctccaggaggctcttcctggtgacaacgttgggttcaacgtgaagaacgttgccgtgaaggatctgaagcgtgggtacgtggcctctaactccaaggatgaccctgccaaggaggctgccagcttcacctcccaggtgatcatcatgaaccaccctgggcagatcggcaatggctacgccccagtgctggactgccacacctcacacattgccgtcaagtttgctgagctggtgaccaagatcgacagacgatccggcaaggagctggagaaggagcccaagttcctcaagaacggtgatgctggtatggttaagatgattcccaccaagcccatggttgtggagaccttctctgagtaccctcctcttggtcgttttgccgtgcgtgacatgaggcaaacggtggctgttggcgtcatcaagaacgtggagaagaaggacccaaccggtgccaaggtgaccaaggctgccgccaagaagaaatgatcctcgttcaagtggtagttttgtgcacggccatggcactcgttgcattgaccgttattatcatatgctcgctgtgtgcactgtgtcgtttaaaactctctattttctgttcggtttaaacttgttctgagcctgattattgcccttcggctgttgtggaatgcgggtatttacattgctaattcctatgtctttattttggcttgtggcattcgcttgttctactgctattgaaaactgtaatctgtttctgttattaaaaactgaaccttttcttctgctatttgaaactgaagcgagtgggtttcaatttgctgaaatcctgctacttgctatttaaattatttatgttcaatttcgttcagtcccatatttgttggattgagtgaaaaactgactactctggtttcgcttgaattatggaactgatacgatagcacaccgtttcaatttctccggttaagttctttcattaacagtttaactctgaaattagttccgttattacaatgataacttttgatgaaaacaaacttttgctcccttcttggtaatgtttcgggaccgtgagaatccactcaatacaacaaacttttgttaaagtaaaatggtggattcgactgatttaatttcatctctaaaatggatgaattcttcaagataggtttggagtagttggtattgacctttgatgaatttaggtcaaggaatttctatttttatcactctgtatttgcgagatataaatttacaagatctatatgaatgtcaaactatttaagctctatttaaatttagatatggtttatgtccaagttctgttgaatttcaacgataactgcatagagtatgatttccctaaggtgcctaattttgtgattctaacaagttctatttcagctcattttggagctggcatctatttacttttaattttacaagttttagataaaaattaggatatttatatgctacatagtttttagaggtgtcctatgtagcataagtgccagattctaatctacagttataaagagtagccgtaacaaaatttggttgttcttaattagaacttaggatgaattccttgcgagtattacaaggctctgttcgcaagaaaaggtttccaactcaaacattacgtatggaaaacggaacagtctattagcacgtaattaattaagtatttactatttttttaaaaaaatagatcaatatgatttttttaagcaactttcataaagagactttttttttataaaaaaaacgcaccaatttaacagtttgaaaagcgtgcgcacgaaaaacgagagtagggagttgggaaacagctcttgcaaatagaacctaagtctcggtacatattatagtaattatttactacacagtacttagagggatttcccataccgaaagtgcataattttagtttacaatattaacaagcacaatttgtttaatctactgagatttgattcatcctatttggagctaaaatgaaatttctatcaatatataggctgaacatatttttcagctgaacaattaaagctttagctactttcattatattttccagattttaaaaacatcggtccacctgtaagtgagagccaatatgcaaaaatgcccctggttttcacgaggagtcaactttgcactccctcacgtagtcacgtatctatgccaggttttaaaaggagtccctatcttcttttttatatctagggggtatttagatccagggtgtaaatttttggtgtgtcatatcggtattatatagggtgtcgcatggggtattcgggcactaacaagaaaaactaattacataatccgtcagtaaacaacgagacgaatttattaaacctaattaatctgtcattagcaaatgtttaccgtagcaccacattgtcaaatcatgaagcaataaggcttaaaatattcgtctcgcaatttagtcgcaatctgtgcaattagttgttttgttagcttatatttaatacttcatgcaagtgttcaaacgttcgatttgacatagtgtaaaattttgagttaatcagatccatgctattacaaatttatctattcagaaaaataccactacaattcgtatatttatagccgtgacactgaaattttataaaattagaaccgtgccactaccgtaacgttttccttccatctcctttgttttccgtctttcttccttcttgttctcaacgacctcagctgttcttgtgctcatcatcccaaccattattccttctccaaaattgtgagcccaaatccgacatgaagacaaagccaaggccgccatcctctgtcggcacgacacgaaacccacacacctcaaaggggcggaggcgaagccgaggcgacgcggcgcggtggcgatgacgttggggagagggctccggcgagctcggtgcctcggtggagaccgagatctctcttcgcaacggggagatgctgaggacgaagaccccacggccgcgtggtggcaagtcccatcgcgccacggctgcggcaggggtgcgcggggaaggggaggtcatcatcaggggagctgtcgctgcagcatgagcatgtctcactcttctccttcctcgtcgattccctcgcgaaggcgccgctgcggtgggcggcgcgcccaccggcatactaccacgcactccgcacctgcttgttatcatgtcgtcgacgtcccagaaggcggagcggcgacggcggcacgacaaagaagaacgtgagttagtcagtggcgtgcgagtgtgataggggagcgcctgcattgtggtgctgccatgccgctgcaggggggaggtgcaggtccacgggggccgctgccgtgccgaggacgacgccctgcccaccacgcggacgccgttgaggaagaagagctcgccctcgccggccatctccatgtcctccacgagtagctcgtcatccttcacacccttcgaggagctgcaaccgcctttgcctctacctatgttgcagccgctggccacgccaatggacgctgacaaggtcgtggaggagaaggattgtggcatccctggtgttcttggtgctgtggatttcgatctgaacgagcagaggctagttgtgattaatgtgcccatggctgtaagtgatgccgaagaggtgcgcatcacggcggcggtggtggtgggcgcaaaagcgacagaggaaggcgcggtcggcagtgacgaggcggcgctaacgcgtgcaaacagccgcggcaggaggcgggggagtatctcaggagaagaagacgggagaaagaaggaagaaacggaaaaggaagggtaggggtgggcgttcggtcagaccgaaaaattcggtctcagtcttcggtcttttggccatttcggtctttgaaaactcgagaccgaattttatccaaaaaaatctcaggaccggcaaatttggtctcggttttttcggtctttctcggtcagaccgattcttttccggagatggatgcggccgacgggatggaggctggctagaggaggcggcccgcgcggcgccggcgtggtggaggctggaggcggcccgcgcggcgcagtggaggactggagggcggaggcggcgaggcggcgctggcgccggcgcggtggacggcggaggcgggaggcagcgccggcgcggtggacggccgaggcggaggcagaaggcggaggcggcgaggcggcgccggcgcggtggagaggcggcgccggcgcagtcgagggcggaggtggcgagcgtgacacgatggccgatggggatgggaggcggcgccgcgtgagggagtgggagggagtggctgtgtggtattggttgcctctagggtttagtttgttgggcttattgggcctcctaggtctattgggccacaattcggttttctcggttaattcggttaaccgagggtaatgaccgaattacccgaataaatttcggtctttcaatggctgagatagaactactaaccgaatttctcggtctcggtcttttcggtctcgatctcggtcttttcggttcggttcttcagttcggtcttattttgcccacccctaaggaaggagatagatggaaaacgtgacagcgatggcacggttttaattttataaaattagagtggcacgactacaaataaataaattgtattgatatttttctgaataggtaaatttacaatggcatagattgaattaacctaaaatttttatgtgaaaactaaacagggccttactacccaagtccatgtcccttattttatataactccaagatggccgcgggaccgcggcactggaacagcttggtggtggcgaacttcagcaaacggtgacgacggtgttcggcccacgagctaccaaaccaatacgtgcaagtgctccgtgggatcctatggacgcttactgtttgtacagtgattgacgccttgacagcgacgtttgacgacgggagcagaggatagacagacaaatgtgacacaacttagtacataactagatttattatacagtatatatcatgtctgatactagtggatcggttttttatgagacggagggagtatgtggtttaggaggtgagtcagttttaggattaaattacttttggttccaacatgtaataaggataaataagaggcgggtcaacttccaagagttgaataagtagttttttcttttgtgttaccaatttgacacattcgaaaatacggaaactaaggttaatgtttggagtgcaatcgatagtactttatctaccgagttttaatatggaaatccaaattgtcgttagggttgacctaaccgttatttttgagtttgcaaatattgggatacggtgtaacttgctataatgtcttgctgagaataaattcaacaatcactcactctcataattggggctctcgctctctctagaaagctcaagagcgtcttctcaagcgaaaagaaaaaaacttccccttccgcccagcccctttccttccattcccgatggcttttcggtcgccggcgagggagggagatggtctagctcctttcttcgctagtaggcttagatttagtcttctttgatagtcgggttaaccccattttgtatagcttgagggggtcatcggcgtccgactccttcattctggttgcttctgccatggatgtcctcgtcgacttcttctccggtgaaggttccctgtcaatcgttttacaggttcaccatcaacgcccgaagctaagagtgtggtgggtttgctcaaaagaaggtagcgccgaccacttgcttcttcttgggcgagctttccgcaactgcgttgttcttcttcctagtcttcggcgtcagctttagaagtgtggatgatgtgtttctccgtttgccttggatgcttcaacctccatagagaggcctcttttgggtttgcatctaggcatcattatttttttttagaattacacagtacaacgcaaacactcataacgcacgcacgcaaaccttacccctatgagcatcttcgaatactgggccagcaaattcttgagattgacaaagtcaccaccatctaggcatcattacatgcagctagccaaggattatcagctccggtcgtcgttcagtgcgtcgatctggtcatcgttgttgtggacatggcaaagagaataacccgattaccttttctgtttctttctaggtcctttcttgcatatttcagggttaaagtgtaatttgcccatctgtcaggggcctctatgtaagatttgctgtactcttagcttgcttaataaaaacctgaaatgataaattcaacaatgccttcgtcgtaagaccatatgcaagtaagtgcctatatgcacggagttggatagagtgatagacaacgctgacttctaataactattgcgggtggaagctatcaattttagtgtactgagttttgtttcaaattgtgttcacgcaaggaattttcatagagattgatcatacttgttttacctggccttaatcttcattttgaagtattttaatttaccccatattctttgagtatgcactagctagttgaagcttgtttttattttagggttaattggatccattccattgcaactttgacaaattaaaaaaaaattgtcactactattcgtcatatcggttacatatcactataaatctctaaaattggaaccatgcaactctcgtcaatttttctgccctcatcgacccgcccccctccctccacgaaagaaggcgcatctgctgactgctgggcaccttcgccacttgccgagatggttgcgcgcgtcaaacgtgttggcgaggacgtatgtcgggagctcgccaccgccgtcggcgccgcattcgagtgtgtcaatgagttacacaaacttggagagcacaaaggcgaaggggtcatcatcggaggtgatggcgaggaaggacgggatgtcgcggaagcgtagcagcgagagccccgagaggctcacctcggcaaacgcgtcccttgatgcggccgccgccaagagggcgtcgcgtcggccacggaagtagtggtagtacgcggccagcgtggtggttgactggaactagaacacggcgatggcaaccactctatggttgtgtgcgacgtcagctgctgcggtgcacgacggggcggccaccgccatcaccatcgccgagattcggcatcgttggcgcgccaggcggtcgttgctcatcgcgctcgtctcccttcttagggcggcacctaacacctgcgccaccaaggacatgctcgccgacctctcccgccaccaaggaagccggcgtcagggacgacactaccaccgtagtcgtcctcgccggatccttgctctgccgacgccctccacctgctcgccgtcgacgccgccctcgccatcttcaatccggctaacccggacctcctcgatctccgcggcaggggcggtgaggcagacccggtgccgccaagcgcttcgtgccattccattgcgagggtagggacaacgacggttgcggtggtgctcggaggggatggcggcggctgcactgtgcggaggaagaagaagaggcggtgtggctggctggcgcatgaaggaggcgcgctcggaggggtcggcggtggctgcgccgcaaggctgaagtagaagcggcgactacggcgggcggaggaacggtagcgccggcaggcggaaggaggaagcggcggcggttgctgctccatgtgcatcttcatgataggacgaagacggtgatgctacggagtggcacggttctaattttagaaaattgtagtgatatatgtccgatttcgtgaataatagttgtatttttctaatacggtatatttgcagtggcatggattcaattaacccattttataaaaaaaagactgtaatatattactttctgaaagcattttaagtattttattgcaagctaaatttcaaaattctcaatttggataattgggaaaaaaatgtttgaattaggccattagggtacctacttgcgctctgcgaaacctccagcgacgtaaacgtaacgcaatcgtttgaacatgctgttaccgcaggattaaaatggaacggtcgatactgccacgcaagagcaaccatcagaaaaagatcggacggccaggaaggaaccctagcacccgtgtctgcctatataagaggcaacacggcccaaaccctcgtttctcccgtctcaccctagccgccgccgcctcctcctcctctcgccttctcccgtcttctccttcgaggtcagcttccgatcttctctcttctccatgtttgcgcctgttcatgatcgttcgtagctgcagatctggtttggtaccgcgaggtttgggtgatttggttcttgggcatgttgttttcgttcattttttagtatttttttgtgtgtattcgtctcactgctatgatcttagtttgctgttcgttgaagcgacaataaacttgatttgtccgcgaatcatctgcataggttgaaaattatcggtagaatcgaacgataaacttgatttgatgtggaataatctacataagttgaaaattgtcggtagaatcagtagaaggatttgtatctacaatccgttcgcttagatctcttcctatgtttctgtatttttttattctactacggctgattagatgctgttatagtctgtagcctgttcggtccggtcgattactgcgcgtctgtgttattctcctgccgattaactgatttagcactttgatagttgtcgaagtttgaattaggtacctactttgatagatgcccaacttttttgtgtgtattcgtctcactactatgatattcgtctgctgttcgctgacgcgaagataaacttgatttgttggtcaatcggtagaattggatgatgaacttgatttgttgcataatctagacaagttgaaaaatatcggttgaattgttggaagatttgtgtctataatccgtttgcatagacctagagcttagtttctgttctgttttttattctactactgctgctgagtagatgctgttatcgtctctacctgtttcaattgggtttattactgtccgtctgtgtaattccttcactgattttgatgcccattaactatgttagcactttgttagattaagtaacctgatctgtgagcttacctgtaatatttatttgtttctaatctttgtttcattctatgccgcagttagctacctccttattcaaccatgggtaaggagaagacgcacatcaacatcgtggtcattggccacgtcgactccggcaagtcgaccaccacgggccatctgatttacaagcttggaggtatcgacaagcgtgtgatcgagaggttcgagaaggaagccgctgagatgaacaagaggtccttcaagtacgcgtgggtgcttgacaagctcaaggccgagcgtgagagaggtatcaccatcgatattgccctgtggaagttcgagaccaccaagtactactgcacggtcatcgatgcccctggtcaccgtgacttcatcaagaacatgatcacgggtacctcccaggctgactgtgccgtgctcatcattgactccaccactggtggttttgaggctggtatctccaaggatggccagacccgtgagcacgctcttcttgctttcactcttggagtgaagcagatgatctgctgctgcaacaaggtatatctctagtgttcggtcttttgttatgattgattagccttgcacaagtagcataatctgttttcttcactatgcatctaatacttcaattgttgatgcttgcatctctctactgtttgtcttattttattattgatctgcacagcacttctgtacatattcatgatgctagtcctgaatactgttgattacaacaatgaagtagcattatgtttgtatggatttatccctatatttgctttttttttatcttcactacgcttttgcgcatcttctaagactgcaattattgttgtttgcttttgttattactgtctgtcttcactatgaatccaagagtggaattgctgatggttgctgtcctgctactactagcattagtgatttacctgttcattcagatatctagttgttttttactttatgctagacttctattgaagttgcagcttgcccctgtttcattacatcttatatctggtcactacttttttgtgtatcttagatgctagtattaattttttttgtttcatatcatgtatagttagttatctgtgtttgtttgctagtccctgcccctaattcgtttgcttatttctgttacagatggatgccaccactcccaagtactccaaggcccgttatgatgaaatcgtgaaggaagtctcatcctacctgaagaaggtcggctacaatcctgacaagattcccttcgttcccatctctgggtttgagggtgacaacatgattgagaggtccaccaaccttgactggtacaagggccccaccttgcttgaggctcttgaccagatcaacgagcccaagaggccatcagacaagcccctgcgtcttccccttcaggacgtgtacaagatcggtggtattggcaccgtgcctgtgg

SEQ ID NO: 6316 - DNA, 15100 bp, Oryza sativa
ctgaccatcttctacggtgggaggatggtcgtcttcgaggacttccccgcggacaaggcggcggaggtgatgcgcatggcctcctccgggatggcggcggcgccggctcagcgggagggcgccgcgctcgcggacatgcccatcatgaggaaggcgtcgctgcagcggttcttcgccaagcgcaaggaccgcctcgcggcgaccaccccctacgcccgcccgtcgccggcggagaccaaggcctccgagccggaggagaagaagacgcccacctcatggctggacctcgccgcctccgcctccgccgccgcgcgccgtgacagcctcaccatcgcgctgtgatctgcgcggctttgaccaaaaacgacttaagacgcgcgcgcgctctcagcgcgcaagaggattgattcactttgctcatacccatggcgacgtagagtttttaccgcttttgctatacttctttgtaaaattcgatagggagattgaattgatgggaaaccccttgtgcctgttcttttttgtcccactgtatcaaatattctttcctgtgcaaattaagccaactttttagttgttacctcaacaaaaaaaattatctctctcccggttaatttttcaactagcaaaataattccaaaagaattaccactgaattactccagatcaagcaacacacaccaaaaaaattaattaggcttggtatgaaagtaaagaagccacacgtgatgaaacggggcacagcatgtggcgggaggattgcgtacgcgtcaatacacgcgacactgtgtggattggaatcgggagcaagctaatcgcttcttctcctcgtccacatttaggcgtatggcccgcccaatcgcgcgtgctgaaaattcacgtggccagatagcgagtcgtctcgacgacctgctgcgcggggtcggttccgaccacgtttctttcgcctcgagatcgacggatcatctaaccgatttgaacgcaaattttttataattttggccttcttagagcaggtacaataacatactataagccagctgcaaatatattttaataagataaatgaggagagagaaaaacagcggactacagatttatagccagctgtagcacagactccaaaacacactatgtgcatgatatgtgggaccagatattaataatgtaatatgtaactagttagctatatatactattaaacttgctcttatacatacgaattgcttttactttcttgatgtgctttgccgacacgagttacgtgccatcatgtttgggattttttttatagtggggaaagatgattacatgccgaacttaatttagtactagtacagtagtacatcattgaacgttatttggatgtgaacatttttatgtttcgtttcacatgtaggagtaggttagtttgaacgttctggcaggggctaattgatgttggatgggtcatgtttggtttttttagataaggaaagtattccttgaactttataccattgaactctacttggacgtataaatatttttatggattgtttgattcgactccaaaacttgccctaccgaatcattgataactacaaaggtaataactcttatgtatttggattgcaaccaaacatgtgccaaataaatatagtcgaggaatcttatcctacaaaaacgagagtaccgattcctgcctcgtgcaagaaatttgaacattccaacagggataatggcgccgcacacataaaatcttctcatgaatcaattctggttgaaacgaaccgctgctacaatagaaaaaaaagaagattatggtttactaaaggcatgcaatgatgattagtactttgtgtctgatggatcattgtcatgatttatttcgaagcaaacgaattagctctgccgccatgagtagtactactatcaggtactgttaatagtggcattgtccaatttctgcactgaaaacaacccataaaaggttagacagcgccactgatacacacttagaagtcaagattggatcttgcctgccagaaaaacacggcggttagggggcaaagaaatcagaattaacccccaaaaaaaatgtcaaactaggcagcatgcctaactagacacggtcgcctgcacggattcactttaatgatgatcaaaatctctctgcaaatcttcagagatcgatcgagacataataaaaacacaggtggtgcatgtttcgtccacaaggagcactgtatgtggaggagtaattaagtgttatttgttcttcgtgaaacacaaaccaaagtcaaacccatgcgtccttaaacaattaattaaactactcagactaataatactactactagcagccgatggagagctagccaaggccaaggcgacgactgcaaagtcaaaacgcttctgaagaatatgtgcaggctaatgcttgcagcttgcttccttccaagttcagatcagcttcctgcaagaaatatgcatgcatgtgtgccaccatttggacctggtcagtgagacacaggcacagcagcaggagatagtagaaacttaattcgagatagtcgaaacttaatttgctcgtgcttcctgcaaggaagcaaagatgttttcttccttatttgaaagatcaacaggtgagaattcaacgactgatgttagaaaaaacgatgacttcagctagacagctgctgtacggttgtttattaatctgggcgatggccctgatgaattttcgtctctgagaatagtactggtacgtgctccatcaatttcatattgtaaatcattttaacttttttttctatttattctttttaagtttaactaaatttatagaataatatagcaacattttcaacacaaaataaatatattatcaaaatatattcaatgttacatctaatgaaactaattttggtgctatatatgttatcaaattttcctataaacttaatcaaacctaaataaatttgattagatcaagaaaagattaaaataatttattatatgaaacggagttagtagtatactgctccaaatacgtgacaaaactgacactgtaatccagtagggccgagggaaaatatctagcagctgaaacacctcttgttggtttcggtaccagcctgagactgctagttgggttgcaaaattgcaatcaactttaggtggcgctagctgtgtcatgtgtgcgcgcgagagagagactcagagaccaattacaattacagcatgtgcaatagggaaagatcggtatggctcgggtctgggtgctttccctttcttccgacagataattttcagccacagttgcagttttttgccgagagatcgaagcaaccggccggccactatctctccctctccatctccctacctttcgtctggaaaaggatggatttgcacggtgactcggccgtgccgagccagacgagacgcgagtacgcgttacgccggtcgccgcgctcgcctctgcctcagcatttgcccgttgcctcgttgctgttcgcaccaaggctaagtttagttccaaaatttttcttccaatttttctatcacatcaaaacttttctacacacaaacttctaacttttccgtcacattgtttcaatttcaaccaaacttttaattttaacatgaactaaacacaccccaatactaccctttctccggtcaaaaacaagcatcgcacggtgatgacgggaaacggcggcaggtttccttggacgataggttgccggcacaccgcgatgtacttcttctgtcttaaaaaagacaatttttatacacgtattcagagaaacaagtggtaggagagtagcgtggcaaagcacagcgaaatattaaagctagcgagagctcaaaacaaacgtttctgttcgaagtcacagttgtacgcacatgttttaatttagcacggatgaggggagtccctttaacatgtcttgatcatctcggcatcttctgctacatggtggacaatagtgtcgttgtccatgggtcacaagggtcatatgtatgtgatatgtcccccataaaaggaaaattgaaggaatggtggaatttggttatattacgggtctcatggttatcgatattacctaataagtccaaacggcttattcagaataaaaactaatatataggtaaaacttttatatatttgttcgtatcgatttaaaaaagccaaaaaaatatgctaaaaatatcttaaaattaactcaaaaatttaagttaaaaaaatggtttttcctttgacttattaggccaaccgacgggactctaggcttaatagaaattatagaaattataggtttgtttgactgtacttcctatggctctgttcgtatgtcaaggttctcaactcctacttctcgtttttcgcgcgcacgtttttcaaactgttaaacggtgtattttttgtaaaaaaaattatatacaaaagttgcttaaaaatcatattgatctattttcttttaaaaaaataattaattaatcacatactaatagactgctatgttttccgtgccggagggatgggttctcagcccaggcaaacgaacagagccatgcctgcaactcaactagcccatacagtgacttgtgtcagcaacaacggctgcattggctgcggaacgacggccatcatgtagccgaacacgggttagggtacatttggttttgtgttagaatagatcttaccaaatgttttggtattagtgtgaagagagacatggtgcgaatgcttttggagctactgaattttggaatggttgttcgtttgtgtttctttgcagctggctgtgggtgcggccgtgcgggtgtgctgtattacagtgcaggcagtaaaaattatgttgggtttggtggtgttgttgcggctgcacagttgcagcaatctcttcggatcaaccccaaagtgtttaagcaatatttagtttgtttctttactaattatttttgctaggaatttctttactaaagtttgataatactgaaatattacaccgatactctctttcagacaaaggcatgatccagaattaacttctagctactgatgtaggtagacatggctcttctagctactgatattgctttggtaaaactgcacagaggaacaattatcaattattgggctatgttttctttccttttcagaagtcacagaccattcttgtatcgaaatggcagcccaaaataagactgggctagatttgtagggaaacggaaatctcttcctgttaccagtaataggttatattttaagcacaaatataaacttttaactgaaaaattttaagcaagagatagaaactcttttttttattatacggtaaacacataggagcactcaacattacacacacaacatcacactcacaccccacgaatgtgctccataacgcactctaatagatggaaactaacgacatatctctaatctcgctaaaattctcggcctcgtcttttcgtttatgcttatacttatcagccaaaatttgaattttcaatcttaaatctggagttgattttggggttttttttcataagtatttacttttagatcgctaagaacacgtatataaaagttttatccacaaattatttttgtttgcaaatatgccatttcgcacgtctgttgaaaactcatctacgtgtgtgtaatattaattgtttggtaaatggaatcatgcacctatgacttcagtaccacatcacttgtgctttcctagaaacttaatctgcaagtgctttctgcgaggaatcaaagatgttttcatccttatttgaaataccaaggcctggtttagtttcccactttttcttcaaacttccaatttttctatcacatcaaaacttttctacacacatataaacttccaacttttttcttcaaacttttaattttagtcaaaattccaattttagcgtggaactaaacacaccccaagttaacttacacgaatatgcatggatagtgaacgacctcagccaactgatgtatggtttgtttaatactatatgcgataacctgagtgcaagttttatagtagagatagcttctaccacctttaatctgatgcacgttatatataataaattaagaggtaatatgtactaccaatagctataatactcttatgtttttattgaagttttatgtagaggttgacccttatataaggagtagctttctctctcctccacttcaccattttttagtcttacgtgacattttgagacgtgtgattagctgctcatttacttgctttgatgaattttcgtctccgataatagcacactcgtaatctagtactagtactgaaggaatatctagcagctgaaacgtaggagtacattctgtaccaacctggccataagtgtcttctcaaatatactttcccaacttgtacttactagtatttctttacaaccttttgcacgtttcctaaactgaacaatatatttttaaaataaagttctataggaaagatgctttaaaaaaatcaaattaatccctttttaagttttttagctaatgcttaactaatacttcctccgtttcatattataagactttctagcattgctcacatttatatatactagaaaagatgcccgtgcgttgcaatggatgaagtctattttaatcttattattgttatagcaaatatgctcgtgcgctgcaatggaaaaaaataaaattataataattactatatgattagatatcgtttttataatatcagctctttaagaaaaatatattcttcaaatagacctagtaatcttatgtgcaattcataatttaccataataataataataataataataataataataataataataataataataataataataataataataataataataacagtcttcaacctaaaaattgaaagaaaaatcataagatggaaccaagaattgaggacaatctcataacggaaaacgaataggagtagagaattattgtttttagggtaactggagtctagtttaatttttcattatgaggacgatatacaaaaatcgtgtataacgtttaacgaaagcacttcggtttttagtagtgtgtgatctccaactgctctttgttagacgaaaccaggcatggtcaggacggttacttcaatcctgagaccagtcattaaatcaaaagagttatcaaggtcgaagaataaaaaagacgttttctcaaatattttatttagtggggtataggattagaaatattaatattaacgttaacagaaagtcgagtcaatctcctgttagttattaatttctctagcgaacaactgtgtatgatatcacagaagcatgaggtctccttgaaagccaggcattagtttgtgcgttaaaatatttcttgttaattatccgcctcacaccctcgatgattagtttttttttacggacctcgctgattagttgctctagacggaaacggattcgatttacatggcggggttgtttgatggggaaaacgctttgtagacgatatcagtacgaatcgaaaacggacgacatacgaaaacttgtggcaaaaacatcttaaacttttatatttatggtagtatgtgctaatccttcactttgatcctcgtgccggcggggagggtttctaatccctccaaatagctagtcgggtttcaatcaactttaggtggcgctagctgtgggagagagagacaaattacaggcagcatgtgcatcgacattctccgtgttctttgcttttcctttcgtccttccaagagatagctatgaaccacggttgcatttttgtcgaagcaactggccatttttgtcacacactcacacaccctttcggctggaaaatgattggtggcacgtacggctgcacggtggatcggcgaaccacaggagtgtcgctgctattctgttcgcaccacgcgttggataaattggattatggcttttattatctggtccaaacaaacaccactcgcacgcctgaagatgaccggaagaggcaggtttcttggacgataggtttcactacagtataccgccataccggcacaccagcaaacgtacggtctaggggtgaaaacggtacggaaacggacggaaacaacctttatcgttttcgttttcatattttttttcggaatcggaatcgaaatcggaaaccccggaaacgaaaacggaaacgaatattatcgaaaccgaaaacggagcaaaaacgaaccggcgcggatacggtaacgaaaatttatcggaatacataaacccctcaaactgagcctcacagcaaaatatattcttctataacttcaaataatttgcataacaaatattctaaaagaatacagcaaaacagaatggtataagcctataaggtatacacaattcaggtgctatactgctatcagcctatcactccaggaaatgggtttgagaacaacaacagaacatcagtccatcaacacttagttcatcaatcatcacagaacagcaatagttcatcaatcatcacagaacagcaacgcacatcagtccatcagtgtttcagtacttagttcaatcacaaaacacatcaccctataaatacatagttcatcacaaaacatagttcaatcacaaaacacatcagtacatggttcaaacatatctcatccacttgtgcagcaggagtacactaatttgaaatggaaacttgaaattagatgtaacttgaaaattaaattgaccaacattttcttcaaacatccattggcgcaatgccatcctcattagaacattccgcttctactgtctctgtctcttgttccgttccattagccttcaaaaaaaatgatagagcattagtaaaagtgcaaagtcaatcactatatacacctgctgctgctggttgctcagatgctgccgctgggctgctggctgctgcgaggcgaggagccgtcggcgttggtggcagtgaggaagagactgcagtggtggtgtcgtcgtcgcctcgtcggtgtggtggttgttccgtcggcggcggcggtggtggcgacggtgaaacggcgagacgcggtgggacggcgccttgagatggcggggaccgagcaggccggcggaggtgcgagatggtggcggcggccggcggcgaaacgacgaagagcaagggcggcgcgagatggtgggggcgaggacggcgggggccagccggccaggcgaccagcagtgggcggtggggcgccggcgccacgggcggtgggcgtgagggcacgccggcgccgcgatgccgcgatctggacgccgcagccgccgctccgcctccaactcgcgagtcgcgtctgagttctgagtctgacggtctctctcctatagggttagccggttagggtagatgccgccgcgatttgggttgggctgggaagctagggataaattatggactattgaatctatgggatttttaacttcggaaattccgacaatttttccggaatgtttccgatcgtttccgggttccgacggaaactgcttttatcatattcgattccgtttccgagaaaatatttccgttttcgattccgattccgagaaattccgaaaaaattccgaccggccgattccgtttccgaaaacatgaccggaatccggaaaaattccgtactgttttcacccctagtacggtcccatcgttagcttattcgtggaataagccaaacgatatatttgtaaacgaaaaataatttatgaataaaatttttatatatgtgttcttagcaatctaaaaacaaagactgaaaaataaatttcgataaaaaaactcaaaattagcttcaaatttaatgtttatttaatgttaaaaatttaaattttagctactaaacataaacataaacgaaaagatgagacctgtagacacgtagtgcaatagcaagacctattgttgattatgtgttagcaataaaaaataatttaacgataatttttttatatatgttcttaggtatttaaaaataaatattttaagataaactatgattaaaaatcacaataatcaactagaaaatttacttttaaaatatatttattttattaaaaaataaatttaaatttagaattataagtataatcaaaacaacgagctgatactatagtagtagcatagcactagtaacatccgaagcacaacgagaaataatttaaaggggtagagataaatctggtgagagctcaaatcggcgtccccatttgacgcacagttaaaacgcacatgtttgaattcaacacttgccgagttgattcccctgcacatcacgtcatctcggcatcttctactgctacatggtgaacgaaagcgttgttgtccatgggccatggcacaggggcgtctgtgatatgggatatttcccccaggaaaaggtaccctgtacgaaatgaagacattggttttgtgacagtggtaacaagggtatgcttagtttcgtgctaaaataagtctaaccataatttaggagtggtatttaagtgtgaatggttctggagttactgaactttagaatggtcgaattgtttaagttttgtttagtttgttttagtatttactaagaagtttgatattaccgaaatttgataacgttacaagcttacaaatggcaatgaatcaaaggcgctattactatttttttatatatggcgtaggcttttgtacaattgtgcgggatactagttagctattcagtcatggcttatttttgagaaaatctaagttttggcatccacaagtgtcaacctcttctccttttttttttctattaacgagtgtaatatctacaaaagtacaaagtttgtctataaaatgccactaccgtcatatttgtcgtctttccatccatacttccatagcgttttattagcccatgtggaaagatcattttgcttttgtgcttggactcaccttgccactcggctttatggtggagctgtgcatccaacgattcgattgtgttgatcccatctagattcgcgcggtcatggtaactgagggcaacggaaaccttatggtttgtcgatatgcgaggacatataggcagctggtggcctaaggggaattgaaccagtggcaatgccttgggtaaggatgagccgattgcccaaggaggatgaggtggaggtgggagtgcgcattgaggataagccactgatgacgtcttatgcgaggttgagcttgtcgtggcggccagagaaaggacgcaacggaggtgtctggtgaaggaatcgaggacaagccggcggtgggcaaggagacgtggcaccactaaaataaaatcgtttgtataatggtatttggtaaaactcgatggtgaaatgtagaattagtagatgtttctggatagcaaaatgttacaggcttcaatgaaagagagacccaaaataagatcgggctagatttgtggtacaacgagaagtcccacaaagctgaattcatcaaggaatgggttggattttaaacagcaatattataggcttttggattgaaaatatttcttggattagcccaaacctaacaagcccaataaggctgtgggctagattttctatccaaacacatgggctagttttaagcatcgccattgctgtcctttcagttgtagaggctcgtgctccgcttgattcccccttcctctttccggccatcccactgccccttcccagcctcctcctctcgccgccggctagaagcgccgatagctgccgtcctccgtcacttcctgctccggtcgcgttcgtaccatcgtgttactcccgtgtatgcccgttccagccgttcgggacaccatgcgcaccacctgtttgcgggattgtctagccaagctgttgcgccgcgggggccagcgccagggccagagctgattctgctgccccacacagttatctttcgcgcgggggatgacgcggagccgcaacgtgaggcaacggagcaagaaaaagcgggtgcacgcgctcgaggtggccacggagcggtggaaggtgctcaccaaggtgctcgccgtcgtcgacgcgctcaagaaggaggaggagcacgtcaccccgctcaagcgcctcgagatcctgcgcccgcagcttgggctcaccaagcccaacaaggtcgcccacttcgtgagccgctcgccgcagctcttcgaggtctgccgcgacagccgcggcgtcatgtgggcgggcctctcgccgcaggccgaggcgctcatcgaggaggaggcgcgcctgctggaggatcactcgcgcacggccgctgagtacgtcaccaggctgctgatgatgtcggtggaccgtcgtctggctatcgacaagattgcacatttcaggcgcgacatggggcttcctcatgatttcaagacacgatgggttcacatgttccccgagcagttcagggtggtcaggttggaggatggcgattacctggagcttgtctcttggaacccaaactgggcagtcaccgagctcgagaaaaagacagcagcattgactggtgatgcaaatgctaacggcattggcagtccaccaggagagctctcactatcattccccatgaagttcccaccaaattttacaagttactacaaattctacggaaaagttcatcattatgtgaaaaaagggaataccgagcagtttcagaagacaacatacctatatccttattcagaggcaagaggattgactcctggctcgcctgaatttgataagagggcagttgctgtgatgcacgaggtactgaacttcacgttggaaaagaggctggtgattgatcacctcacatatttctgtcgtgagtttgttatgccgcagaagttgatgaggctgcttctgaagcattatggcatcttttatgtgtatgagagggggaagcggtttagcgtgttcttgacgaagtcttatgatgggacaaaattgatagagaagtgcccactggtgaggtggaaggaaaaagttcttcaacttaccagctatagagggaggatcaagaatcttggtaaatttgccgagttgtttgattcagaggactatttgtttggtaatgatgatagtagcagtgctactgattctatattggatgtcaaaagtgaagattcagatgatatcatggatgatggcgctcttgcagatgatactgagatggatgtaggggatctaagtgattgttgcatagagtgaataagtgacatccattaatttaaagagcagtttttgatatttgttccctaacaatcaagctccaaaagtaaattcttgtgatcctagggcaatggttatattctcttactccctcgctcatggcatatttggattctttatattaacccggggcttaaatagaaactcttgctgattggatatgtacttcttgcttattgctaaaaatataaaccatgcgtactttatgtttatgtagatcagttggttcttccttttttattcacagaagatgatatttgcaaaaaattgtgccaaagcattatatattgaagttatgaaacgtcaagcaagatttgttttaacagtaatcgctatgtctgaattcagttttctagccttccagttggtgatggattcaatattcagataagtacatcgctactatttgtcatcggctatttgaaagctttatttacacatagttaactgtgtgctgtaagaagggaatatttttgtttatggtgtcataataagacttccaaaagggttttgaagaagctgaacagccggccaacgtggaagtgtggaacttgaactctagtgctcggtaagaaattctgtttggataatttctagagactcaaaagagatcatactgtagtacggagtacataattttattgacagagattttgtagatgttgccactttttttaaaaaacttggtcaaactttaaaaagtttgactctaagataaaccaaaattgcgttataatatgaaatggagggagtagttactccagtaaattagttatttgctctaggtgctattaattttcgtatgtgctttattaagtgttctttgtggctgctgttttttttaagaaaagaacattccgtagcccattagatgtgtttcaggagtaactggattgtctatgtttgtcttgttcttttataaggtctaaggtttgtaccgaggtaaaaaaggataaagtacaagtcttcctgctgacataagtgataatacctgataatgctctgttttgtcttcctgctaacataatccattcttacattggccagcaattctactgatgactttaaaatagtgtcagaatttttaacgtactgtatgtctgtactgctcatttcttgccaaaaacttgaaaatctagcaacttgtgtatatgatgaaactaggtcccagttacattccttcatgtattatttggtggtggtggtgcttctgctgctgtatgcagtagaaaagaaatatactatctacctggtcgtcttttgataacaacattaaggaaggcgaataatattccttgcagcatgtactccatttttaatatgctattttagaagattttactagagggaatattgtttatttatcttaacactagcttcaagatgacaaattgctgtagaatgcattctgcttatttccactgatgatttacagatttaacattgaaaaattcattcctgttcacaaacagttacgccgtgtttagttccaaaataattcttcaaacttccaacttttccatcacatcaaaactttcctacacacacaaattttcaacttttccgtcacatcgttccaatttcaaccaaacttccaattttagtgtgaactaaacacaatcttaatatttcacttgagcgttcagtgaccaaaagtgaccagtctattgggagatccatcacctctgctacaaacaagctcacatggctatcagaggaagggcttaatgctaccacatgggggcatggtgtcacatttatttcctggatggttgcaaccatgaatgttcttactgcactagagatctcccatacagccaaccggccatacgagattctctctcattttttggtcgaaaaatatgggatgctcatttggacggag

SEQ ID NO: 6317 - DNA, 14946 bp, Oryza sativa
aaagtcaatggcgtcaaatattttaaaacggagggagtaatttatatcctatatatagttaatcatcagaatcttttttgttcggtaaacaatggaactctatatgcattggtgttgcatgcagaagacgtagctttcatggtctggaaaagtgtgaattgctggaaatacatttttttgctgagagagaagtccaaaatgttctaaacaacattgatatatatagagagaatgagagtttttttaaactaaatatatatagggtatctagcaatctttttattgtgtaggaagaagataattaacaaatatatatactagcactatacattatctatctagcaaattttgctgctggacactcaaaatttatttaatttgctgatagacattgaaaaacgtgtcatagctaaaagttatctttaaaagtggtaatttgctagatgatacttttagcttaattagagagagaaattatttaaaaatatgagaatgcacttagggtcaaaagcttctaactcttgaggctgtagtaaagtaggcatatttttttttgcatgtttgacatttagtatttttctcactactttttgtttcatgggttttgtgtcctagttagcaaatatgtgccacgccaagttgacaaacatattaactacttcctccgtttaacattacccatattcatatagatgttattgaatctatacatatgtatatgtgtctagattcattaacatcaaaatgaatatggataatgctaaaaagtcttacattgttaaacggagggagtataaaatttgttctaacgactttcccttgtaaaaaaatgtaggcatccaatggaaaaataaaatgcagaacagattgaaagcacttgtgatcaaatcaaaaccttgcaagaaaagctgcaggcttgccgctgctctgttcagtttgttgcttccatactgcggtgacagggaaagaatagtcagcgttaggcttccatagctgctactgctggtaatactgcctcccaaattaagatcgcaactgactcaacgtttaaccgtccatcttatttaaaaaaataattagtaattttattgttatataagatgataaaacataaatagtaatttatatgtgactaatttattttaatttttttcataaatccaccacacacttaaaataggacgtgctagtagacaacttgtccatggcagccaaaaggacaaaagacatagaaagctgtccgtttcacttgcaggagggtgacagggaagatatagccataggcatgcaaccaaatttgcccaagcacattgcatatatgcatgggtccctttcggtttattccggtccaaagctaccgatcgatctcttgctctctctctctctcttggcttggagacgagacgacgagacgttcaataattctcctgatcgagatgatcaacagatcgaataatggagagttctccccttgaacgagacaaggtcgtcgttcccgtgtctcgaatctgtacatgccgagaggaaaaccagtaaaaatctttgacgaccaagccccgggcgatccagatcgaccgaccgaccgaatgaaataacgaaagcgatacgagtaatttttactgtgtcgatcgtatgcgtatcgtaactgttctcttgatcgatcagctatattttacttgtcggaatttgttgaaagatccagcaatcgcgggcctttttcacgcttgccagattaatcctagctaaatatgtgtcaacaagattacagatcgattgttcctcactaacactttttcttcgttataatatagagttagtaatacatgtcattttggataatggtgagatcaaactttaattttttttaaatttggttagtaaaagtaatttctaaaattttatcttaaaaatgtacagaccatatgtatatattaaaaagtacttcaccaaaaatcatatgtttgttgatatttttatttatattataataaaaagtagtggtaaaagttatttttaagaccgcacctttattcaaaacgatgataatttatcaaacctggagggagtacaaggagtctgaggctttaaaatttatcatataataaggacttttatagctgatgcactctcccaagcatggattaattagtctgaaactaaccaacaactaatgaattagaagtagcttcctattaatgagggaaattatggacttttgccttttcctatttaatttgtaagctatataattttgaatggaaggagtaacatgattattttatttttttttcatgtttttaatcaaagagcaaacatatattaccttccgatattaattcatatttcctttgtttttaatatatgatggcatcgatttttatacatgtttaacaattacctaagtattccctccgtttctaaatatttgatactgttgactttttagcacatgtttgaccgttcgtcttattaaaaaaattgtgaaatatgtaaaactatatgtatacatgaaagtatatttaacaatgaatcaaatgatatgaaaagaattaataattacttgatttttttaataagacaaatggtcaaatatatttaaaaaagtcaacagcgtcaaatatttagaaacagatagagtatcatttattttgttgtgtcttttttttatttttaaaaggactttaaacatgaattatattctttatatttgtaaaaattaaagacgaatgattaaataaatgtatgttcaaaagttattggtactatacattaaaaaagggaatagtattttcctggtattcataccataaggacaacaaaacaactcccatgatattttcttttctcaaataactaacaaagcctcatgcctaatctctttatcataagctacctggatctaggtagtttctcttttcatgttattgggaatatttgaccgattttcttgatagctacttatggacatgtgctcaaaggatgtaataaatatgatttttttttaaaaaaaaaagatgaattcacagtaactatttctagtggcgtaaaaaaaagattttacttgcatgaaaagacatggtttgaagagagagctctggccatgcagcaaggacgagccaatcagccaatggtatatgctgcaaaaagtcaaacgcatgcatgggccccagttgtcagtggcatatgcatgacctctaatttatatggtttattttttccctcgtaatatttcccaacattttctgtgtcacgtaggggaagctgcttagccagcctcagctcacatgcttaaaccctcgcctcttctccctataaatacacaccctaaccttcttctccctcccacccacacatcattcttcatcccccaccctaaaactcaactactcatcctctagctctcagctgctacgatcgatcgccattgctagctagctctagctcagagcacgtagaaacacttgccatggcggcggcgcagcagcagcagcagaaggaggggggcgcgaggcgcacgagggaggaggtgccggcggtggggagggtggcgatcatcggcggcgggatcagcgggctggcggcggcgaagcagctggcggcgcacgacccggtggtgttcgaggcgacgccgcacatcggcggggtgtggaagcactgcgcgtaccggtcgacgcggctgcagacgccgcggccggactacgagttctccgacatggcgtggcccaaccgcgacgacccctcgttccccacccacgtcgagatcgtcgactacctcgaggactacgccgacaggttcggcctctggcgctacatcgcgctccgctccaaggtcgtcggcgtcaagttcctcggcggcccctccgccggattcaccgagctctggagcggctccggcgagcccctccagggcaagcccatgtgggagctcgccgtctcctccaccgacgaccccgactccgacgacgtccaggtaaattaacatactcctcccctaccataggccggtctggccgattgtattgtgtaacaaaaacgtaactctattactctaatatattgacgtgcaataattcttttgcacgttcgcgaaaaaacgtctaggtaaacataccatgttaattctcacacacctagagcttgatttccggtcatggtgatcgatggattgggtcgatatgatgcagttgtacaagttcgagttcgtggtgatgtgcacggggaagtacggcgacgtggcgaggatgccggtgttcccgccggggaagggaccggaggtgttcaaggggaaggtgatgcattcgctggactactgcaagctcaacgagcaggagaccgtcgagctcatgagaggcaagaaggtcgtcgtcgttggctacaagaagagtgctattgatctagcccttgaatgcgccgaggccaaccaaggtaaaaaaaaatttaaaaaaataatttactcaccatcgatcgttgaatattcgtctcagtaaaaagctcgatcaatatgcatggatgttctatgtatttaccgttgtagattaggtgcaaattctcacaaagacaaaaccatttttgttcttaataaatgactatgtatgtattgagtatctaggaaattaacatgcatgtataactagctaggcgcagtcagatgagctatcatgcatgcatgaacgcggagattaacaagtaaatcatagaaaaagaagattcatgcatgccaagttcacacataactaactccaaaggaattacatatttatatcgtggaaacgtccaatcatttgatgaacttgggacggaattaatattgtacacttgcatggtatagtagtagtattaatttgcatacccaatttggtgacatgcatgtaacgccgtgacagcaacctgtcctaacgaaattcaggagacccaatcttagttagctctgacaccctgtttcagaaaaggtcactcttgtcttgatccgtcgtacactccatctagaattttatttctttttatgccacatgtagccaagcctcctcttgctctatacaggttcaaagtacgctaaacacaacacatacgcatatatgctctgacttttcaagctgaagtgttttatatgctagctacgcgttccacttgtcaatctcttttttctactctgaaactgcgcagagatgatcactccaacattttgactgtgtacttgaccatatcaaagtgctagcttagtatattaattccttttgtttggccatcaagttagtaattaattccaagttgatcatgcagcaacaaaaactatctgtcattaattctgaagaattattaatcctttaatttcaagcttgttcagttctgattgattggtttggttgcaggtgagggagggcagccgtgcacgatgctggtgaggaccctgcattgggtggtgccatcctactcaatctggggcttgcccttcttcctcttctactccactcgcttctcccagctcttctacgagaggcccaaccagggcatcttcagatcactcctctgccgcctcatgaccccattggtatgtacatactcactcgatctactcatttcacgtgaacatcttatcagaaattaagttcagaatgtgcatgctcaagactttgacaatattattttgtttgtagtagctagctagcttgtcagcatcataatttaccatgtttttttttgggagagcagaaggctggggtgtccaagttcatcgagtcgtacctgtcatggaagcttccactgagcaggtacgggttgaggccggatcacccgttcgtggaggactacgcgagctgccagatggccatcctgccggacggcttcttcgacatggccgaccgcgacctgatccgtttccggcgctccgccggcggctggtgcttctccgagaacggcgtcgtcctcgacgacggcacccacgtcgacgccgacctcgtcttcctcgccaccggcttcgagggcaaggacaagctccgctccgtcctccccgagcccttccgcggcctcgtcgtcaacaaatcctccatgatgcccctctaccggtacccacatgttaaccaaccaattacaccgcagacgcacacgcacaattagctaatggatgagtgttttttttttgtgtgtgtagggggacgatacatccgctgataccgaacatggcgttcgtggggtacgtggagagcgtgtcgaacctgcacacgtcggagctgaggtgcaggtggctggcggggctgctgggggggaggttcgcgctgccggcggtggaggagatggtgaggcacgtcgacggcgagacggaggcgatgcggcggacgacgcggttctaccgccgccactgcatctccacctacagcatccacgacagcgacgccatgtgcgccgacctcggctcccgcgtccaccgcaagtccaacttcctcgccgagctcttcgccccctacaacaaccaggactacaaggaagagtagccaatcctggccgtccatccttcccgtacaccgaatcaagataccgttaattcagtcgtataaaatgatataataagattcgttatttgtttataaaagtaattaagttaattgattattaagggctgattaattaattgttagttaataataatggaggactagcttaggtcgtgttcatgtgtcatgtgaactggggaattgatttggtgaggactcgaactacgatctggtctcggccgcgaccgggagaggaatcaaatcatatccaagaacgggaccatgtaagttaggtccgtatgtacgatctgtacgatcgatgtgtgcatgatcaaaggtggtttttccaaacctcttaatttgtaatcattcttttttgtctgatgatgaaattcaataaaattcatttattgtctgaaatcgtatccgcctgtttcgatcgcttctgtacgtgtgaatttcatggatcagccatatactgttctgttttatatttcttacattggttaaattcaaggataaatttattagtttgttcaatatttatgaatgatctgggagtatgattggtttttaatcaaatgcaaatggcaaccaacagccaagaaaacaattcatggcattttgaacttttccacgggtcaagtcaatagcttctaagatgcatatatgatacctaaaatacaaaccaaccaagtcaaaatggtcaaacagtcgatactatgtatacaaactactagagtagcacttaactaagagttgaccacaataatgctagcttcaattagtcggtacttggtagttatatgtttttttttccttctgtaaatattttatagttctctccctttcgggttgttgcaccatagtcagatgttaaggaagttatatatatatatatatatatatatatatatatatcatctattctaggcaggtttcatgaatgtatatatacaccatgtttttcttttcttttttttttcaagttgcccgttcatgttgtggcgtcaatcggtcatgattttgaccaccaataatctgcatatgtagctatcagatggtaaatttttaggcagtttaattagtcgttttggcctctgaaaaggcaagcagctaagcttctcatcgtttactgtatggagataaaccgtaaaagaaaagtaactaaaaataatttatgagtacaccttttacatatgtgtttcttagtaatttaaaagtcaatactgaaaatgaactaagatgaaaaaactttaaaatgaactctaataccatgttttaaaatttaatttttggctgtgggagatgcatgcactgaacgaccgttccataattaatttacgcacataaccgaacacatcatcttgcaaacccattacttacattattccgtttatttttgttttttattgtcacaatcttgtctctggattgtgatttttcaggagttggattcttaaaatctgattgtgaattcagattttgaaacatgcgaaatgtgcaatttatataatacttctagtgatagttttagatcaacatcatcaccccacaaaagcagcttcattgctaacttttggtttttattagaaaccatgcctcgtttctacgaatctgctttcagaatcaagctatttgcttttgcttttgattgtcaagcggtgaaacaacaatatggtacgcccccggtgttttgccacgccttaattatgacaaaagtcacaaaacccttgtcacgtcagtcaagtcggcatgatgaaacaaaattaggcatgttgttttgttattctagcctagctgttgtggccaaaagattagttttggaagttttggtatatagtttattttaaaaaataaaaatttaaaaggttcaatagataaaaaaatataattatgggcattatatgtgtatttagacactcagaacatctacttaattccaatacaatgcatatttcctcttttttttccatgattaattaatgttgcgtacgtgtaaatagttacctttaactttgtacgtcaacaatatattgtggatacaactaagaggagaaactttgaacaggagccatatcattggagcctaccaccgttgctaagtcaaattcaagcaaatatttcgtgaaactcgttgcaagtgatgtggataccaagataattagtaaatcggttagccgataatggctaaacatatgagagcccaacaactaagtactccaatggttgtatatatatacacccccgttggtgtagaagccattcccattatccaaaaaaaaaacaagtaagtactccaacttatgaatgtcaaaatatttcctatctatcttatcctagcaacaggtgttatgctagagatctgaaaaaccgttttaattcatctaattgtacgataaatcttgagctttttgtttaatttctgaaatggaaataaaacgtgagttatagaaaaactatattttgtaggctagttgtaccgtttcatcagcaatgcatgcaattgacatttatagttccagtgatgaattaaactgcaacacctttgttttctaaatagatggcttcgttaatttttagattaatatttgactattcatattatttaaaagtttagtgcaaatataaaaactttttttataaatcatgcttaaagtttctataataataaagtaattagtgccaacaaaataaataagacctatataaatttattttaataagataagtgttgaaaccctatgctaaaaaccaacgataccatctaaaaaaaagaagtatgtactactatcctgtatttgtaaaatatatatttagctagctagggaatgagccctagaaataggatagaaactgcgtcgaaattaagatgcatgaatgccatcctacatttggaagaaatgatgaaatacgtacatgcgtacgacgtagccgtataaggtagtagaagttatagttaagctaaatgttgtttatttaaggtagttctgagaaaataatgtacgtaaaggaggaagatcgatgtaccttcgtagaaattttgcaacatgaatcctctaggtaggttagttaggtcgacgctggtggtacgtgaatttcctgcatatatattttcttccgttccattaatttcaaaactggtcctaataaattattgtttctatcttcaattcgatccatgttgcactcaaattaattaataaactgcaactttttccaaagcttggaattcaagatttgctcacgtcaaggattcaacacgcgaacgaaagaattaatgtttccattttcaaaacttgcacgaacgacgacgaaaccatatgcttgtatatacagctgaaacgcagtagctagtggcgtctggactttaatttgatcaaccgaaagaccaagactagtagtactattacgcacgagagagaactaacacaacacattatattaattaatccaatcgtatatatgcaacggccggttcgtcgtcgtctccgttgggtttatttgatttcaattcgtccgagaccgatcgatcgagccgctcccacggtacgtggtccggtcggtcgtccggtccaggttgagttttcactcctggtctggtccgtacgtgcgtgcgcatgtacgcgtttggtatgtcgcttttgaacactgtactagtgctatatatatatcctgcacgtgcctgatatatacatgggtcgcgcgcattaatgaacccgacgacacgcgcgcgcatcatctgtgacgtacgtgttcgtgtgaatagctcgctgttcgtggccaaggcgccaacaaccacacgtacgtcgacgtcggtcggcttaattcccaccagcagccgatcgtgcagtgcagagacgtacagcgcagtgtgacagtcgtagctagtagagaaggagaagaaaactgaaaacggccgagcgagcgaggcgagccatcgacgtctcgctgcatggtccctcgacgcgtaccggtgtaccacccacacacgccgcagcaaccaaatcggcctgggagttgagcagcgtacgtgtcctcccgcggatgtctacaccggccggccacgtacatcgccgtcgtcgctgcgcgaccgctcgctgggccgcgcgtccatatcatcccaccgcgacgggctccgatccacttccactccatctcccggctcgacatcctcctccgatccgacccgggcctcgcctcgcgcgcgaccccgcgattccgccgcttcgcgcgggccgttcgctaagttttcttcacacggcctgtacgtctcggggacgcgcaaaaggaaaaagtacaccgaaggtccctcaacttgtcctcgagatacaaaaccagatatcccacgtcccttaactaatcaaaaccggtcacaaaagtcactcggcggttttgaccccggttttatcctacgtggctgctgagtcagcgtgggacccacgtggaccccacatgtcagcttgggccacgtcagcctcctctatctttcccctattctctcccttccgcatctgtctcactcttcccttctcttcttaggtaagcagcgttgctggcactgccggggaggagaccgccggggcgaggcgggatcagccggaatgctgagctcgtccgcatccttgccaccgtcgccgccgggatcctcctcagcgccgcctcgatgctcgcgttctgaccgccggcaacgacgtcggtgtgggggatggacaccgaatagctccggtagtccgttccctcggcaggtgccaagtgtacttggtgtacgccgacgctgggtggaggaacaccgggatgtagccggcgagcatggagtcgaacgtcgacttgcgggtataggagtcgccacgcggctggatgcagaacacgcggaattgaggagctccatgatccgccccggcgagtttccgaagtgggtgcaggacggcgacgcgtgcactgctcgatgatctgggcgcgcacggtcttggtgctcccggggcgcggcgcgccggcgaacgcccagagccaccggcggtcgcgccgccgcatgcggtcctaccaccggagcacgtcggcgtctaacaaaagtttatctctaactctacaaaaacacgcacgtatgccttcacgcaaaacccatccaaccgcagcctgcggcgtgtatgggcctccatctgcctccatctccatcgtctcttcgcaaaccagtagctatagctagcaccacattgatttggttcttcgtgacaacaggctgtgccatctatgaagtaaagcaatgccttccctgcccaacgaggcaacgatacaccgccatgcatgcaaagcccacgtgtagtacctgttaactcagcacacaaattcccaataaagcaattaattaagtaaatcactaaccaatcagcaatttggcaaaccaaataacccaactatcctaattacagtgtcaacagaccggtgcccagccggcgggtgtacatgtacgagctccctccgcggttcaacgccgagatcgtccgcgactgccggctgtactcgaggtcgatggacgtgtgcaagctcgtcatgaacgacgggttcggccccgcggcgctccccagcggtggcgcgctgccggagcgggacgtgtacgacaccgaccagtacatgctggcgctgatctaccacgcgcggatgcggcggtatgagtgcctcaccggcgagagcatggcgaggaagaagacccgcgacgcccggagcaagctcgctccaccgccgccggacttgtcggacacgacgctcgccgccatcggagcggacgtgcgccctcgccttctcccgcatcgcagccgccgctgccgcttcctcccccacctcgccccgggggcctcctccccagcagcgccgcccggcttgcctgagaagagaagggaagagtgagagagaaatgagaaagggagagaatacgggagaaagagaggaggctaacgtggcccaagctgacatgtgggacccacgtgggtcccacgctgactcagcagccacgtaggataaaaccggggtcaaaaccgtcgagggaccttttgtgaccggttttaattagttaagggacgcgagatatctggttttatggtttgaggacgattttgtatctcgatgacaagttgagggaccttgggtgtacttttccccgcgcaaaaaccaactgggataagttcacttcagatctcttattttaacagagttcgaatttcatccctaaaccataatatcagatatgaagagtcctttgacttataaaaatcggtgcaccaaagattccaagacattatactctcatgttttagctaacgtgacgagctgacttcggtcaacccgactgatttagtatgggacacacatgtcataaaaaaaatcactacccttcttttcccctgtgtctctccggatccacccaccattgacgccgcgagttcccccacgaacatcattcgcttcccccgcatcgtccccatgaacaaccgcgcatcaaagctgctcgattcaatttgtgagcaaatcaatctaaagaaaatgcaaagatgttgatttagaaggaaggaatgcaaatgtgccttgcttggtgaggaaggtatagaaatcaatgttggggtagaggtagtcatcgatggagtactcaacgagggtgtggacgtccttgccatacctgaagagggcagggagaaagaaggcgacaacgagggtggtgactggggaagtggggagcgacatgctacggcaaggaaggagcagctagaggaggaagggagtgttggtcgtggattggtagggtggttgtggcgtcgtggagtaaggcggcgaccaaccagggggagggggtaggagcgacagttgacgggaaggcgcgcggcagggagaaagacggtcaccgacttgaagagaggcggtgggtgcagcagattgtaagggcaggcagctgaacgagctcccatgcttgcgtctgcacctcacgtctccccggtgcccacagcttgccacccatctccccctgcccgccactcgctgagcatgcccgcccacatcacagaggggaagggggcaatgctgctagctcatgccatcggcgtgatgcccaagccacaacaatcgcccccttccaccaccttgcctccaccaccactgccctccacttcagcccttgtcgccgcctcctcaaccaagccaacccgctttgtagggctcatgtgggtcctatttaccacattaaccaaacccggggagcatactatcttgagatttttggtatactggttttattggttgaggaattcttcatatctgatattgtggttcaacgatgaaattcgaactcgacgactttaagaagagggacctaaagtgaacttgttccaaaccaacgtctcatcgcggttgcggcccttgtcgcgcgcgtgtcgcgggcttgcaccttgcggtttcgcgcttgggcttttgcctgccggaccggcccagcggccagcggattccagtggataaacattgtagcgttcaccgttatcgcttcctgcaaagtggatggataggataaccatggcgtttttctcactttggtaaaggaaaaacccatcttgcagccgatgacgacctgacaggttgcagccgcagagcatggctacttacaacgctgattgagaagcaaaaaattttgttatccatcgagatcgatcgaagctttcattcatccatatcaagtcacgatcggttggttttatgttcttcctccgatccagcggcctgccaccatcaaattcatcacgatgtgttcgctcctgataaaaccacgaatggattggcacgggtcacacgagtggagctagaaacactaaaatttatactccctccatttcacaatgtaaatcattcctattcattaacatcaatataaatgagaaaaatgttaaaatggcttacattgtgaaaggaggaagtatttactaataatactatttttaatttattttttataaaagctacagtgtgtaattttacagaaattgagagaggccctaaatgataacatgaggaggagtatcatttatcacctattgactgcaaacctcatgttagttaacttaataatttcatcaatatggtaagcctgatctcacaagctgactttttgtacccatacctgcatgcttctgttgcaggctggtaggtagctaacgctaactgtttataataatccaggagcatcttaatgaaagcaaaattatgcgtataatctatcacacaagtgggcacgaactcatcaagttggatatataccacggtcagagctgggctcttctctttctctcttctggcgccaattcagaatgaatacagctaatccatccatgccaagtcagcaataataatccccaattctgttccaaggaaaacggattatattacctcaactagatgcatgacggggtgtttgaatcagaaa

SEQ ID NO: 6318 - DNA, 4414 bp, Oryza sativa
gcatcattagttgtatccatacattgagatagtgtgtcagcactataatattccttctcttgattaggtactaagctaagtatatagttgttcacttcatcaacaatctcattagttgtagctagaattgctctatttttcaaataatttggattaaagaaactatttttgaaatctgggtatgtaaactttaccaactcttctaatttgttttctcctgtgtttattaataaattttccggcacttgtataatggttgtatctgtgtcttcattttgagcagtactttgtttggtatttattttaccattgcctatatccagaatccaattattaaagtcattgatttctttatattctaaagtattagatttggttttttgtaatcgcatattttcaaatagaaatatttttttaacatacccccaaagatatgactttacgattgatgcattaataatttccagttttgatgcattttctataactggtaagatttgtttagggtctcctcctagaacaacaactttacctccaaatggtttatcgatagcattaatatatttttctgataatatatctcttaatgttctatcaagagcctcaaagcattggcgatttgtcattaatgcttcgtcccatattataagagaagtttctattagtaattcagctaattttgttccacgtttaatatcacataatgatagttcatctatatcaactggtattcgaaatcttgaatgggctgttcgaccatttggtagtaataatgatgctactccagacgatgcgactgttagacaatttcttttttagctctcaaaaatgatacaatagtattccatataatgttttgccagttcctccatggccagatacaaagaaaaaattactttctttatttattacactatttactataagatgaaatgctttcttttggtcatcgtttagctgtaagtacaatttgttagcttgctcttctaaatcatttgcattataatttaattcatcttgaattagtgtattagttgaatctaatttgtatcttactgtcatctgaggaagattaaatttatctatacttataccacttttggataataaatattctatttgttcaattagaatatcttttaattctatatcagtcgggttgtacttaattgggtgatattttgatattaattgaaattttatatcatctaccatttttgcccaatttgtctcaaaaaatttcctttcatcttctaaattgcaatacaatagtaggattataaataaagatcgtagttgtggagatgttgcccaacttgcagcttcgtcaaatgttttataccattcattatcatccattaataatccacgtgctgcacatgtttctttaaaagttttataaataataccattgtatgttctaatatcttcatagttttttgctcctttaactatcattaatagcatacgtagatagaaacgttctccttcagttggtttgacataatataaacgggctattttaaaaccatgttgtcgtttgacccatttcctttcttttttatcccatttccatttttgtgggaattcacagtatgtcaagtttcttgcttcttcatgtaactgatttgccataaaccattctgtaagcatcgttctttgattatctggattttctataatattttttagttttgtatccttagttaatttgaccaattcattaagggaagatgaacaggcattctttccactggtggccaatgataatgtatttcatatccaagtaatctccacataccatcttgatcacaaatatatctacattctaaatattctttatttcatctattttttctgtttgctcattttcagaatgatctattccttgtttgatacgttggaaaattattttagctttatcccctcctttgtttacatatttacataaatattttaacattctgctttgattaacaaactcaacatttaaatgggcttgatatctttttaataggaataaattgtgtggaacaacccatctattgtccaagttatggttatctttacgtatgtatatattagtatttctacgtttatattgtgcaaatccattttcagtaaaattagtttgatcattgaattctttagggtaaaattttgaacatttgccttttttcatgcatggacaattttcattcttggctccacatggtccatgcatcatatgttcagctataaggatgtatcctagaggatcttctctaggatctggtatttcagttgatatccatttttctatcatttcaatcgttatttcacttggctttttatctaaccaaactaagatatgtacatgtggtaaacctcttttttggaattctaccgagtataaaatagctgttgtaggtccaaatattgtgccggattgtatatcttctattaattgttctagctttatatgaaatactcgaactataatatcaggtctatcattgggttgttcgttttctaagattgtcatagtaatttcaggccacctaggattacatgtaaatgttataaataaatgtggaggtccatatacacgacatattgctatgccatcgtaatagttttgcattgtatatcgtttagaaccaacatggcttgatggtaatattattttttttcctatttggtttccttccgttaaacctttttgtactgcatcaaatattccttgtaaacattcagctcgtaatttgttttgatttttagcaataaacattagtctatcttcatcttctattgcacgggcatcaactattgcttgttttgataatctaccataacataaataaggatttggttgatttggtcgataatgcatatgatatttgtagtattcatgtactgtaattgttgatcttgtttttttactctttttatttgtattactattataatatggtatgccaagttgaaatcctctttctccataaggaaataataaagggtattgtaaagccatataggctggatggaatatagatatgcgttgtaatccattatttttattttgaacaataatatctcttttataattttctagatttaattctccaactattaaaattgctaaatcttctgtatgtggcatttcatattgtattggatcacctttatcagcccctattattcgaatactaaaatcaacacctttattttcttcaaatagatcgcgagcatagcgaaatgtttttaccaatggattatattcatcaaacattttttttaattgttcaactatatacggattgatatctgtacttcccatttcttctttatttaaagcatgtattctattttctatttcatttttagtatcaaaaatatatagttctgcaaactttggaatttcattaggcttaggtaggagacatccaatacgatgatgtatttgtccatttacacgaaacacatatggtccatcgccattatttatatttttatctattgtgccacccattgaagtaaaagaaaataaactattatattgtctaatcttctgcataaaatgttttgatagattatcttctttattattaagtaacctagcaagtgtttctggtgggttctggaatggtggtatttttattttgttatttttacagcaatttgatatataatttcaccttttcttttctttgtctctcttttatttctttcttcaaaccaaaatatagcattgcaatgtttacatttatactctggcatacctataaatgatttgttttcatatgattcttttagatatttaatgtattctggggtaaaggacaccatgccatgtgaagttgataaatatgaagatatatggtctatctctaaacatttcttttttgcaattttttctagataatctaaattatattgtatttttcttttatttttaatatttttttgcttttctgtatatattatatctcttatattactattttttgatgtttcttcttcatctttattacattttttattgttattatgcaccatatttttttcttcttctctttttcgctttttctctcttagaatttgtagtctgatatatcttcttttcttgcaatctgatttatcatattctgctatttttattggatcttgctttctctttgatggcatattaacacttctgattatataagcacaaaaaatagccaaagtcagaaatgaatataagcataaaattaaatatgaataattaaagatattggttgaatcaatacaaaacttaatcattcatttcaacagctatatataatctgaaaattacacatgaatagtaaaaaaagtgttagctaatacaaacacttcaatatttatgacgacaaagattaatatgagctacaattattgatcatacatacaa

SEQ ID NO: 6319 - DNA, 6317 bp, Oryza sativa
taaacatttactaatatcattgcagatgatcaatgtacaatgatgaaaaatactaaaaagaatagacaatgtttttttttctggtaaatatccatactacacgaaatgttattcacagctgattggttgtgctatagcttttctaaatagaaagtaaaatttgctgtaacttgctgcaaattatttagaggaaaagattagactttgtgactaattgatttacgggattgaagttagtataattacatgtaagtacctaggtttgtcaattaagggtttgtttggatcagaagtggaggctacagctacattgtatagtaccactatataaatcaatgtattttgaataacttttaaaaagtttaattgaaaacagttagtttggaatggtggtcatcgtaatatactatgagttaatttattaggagtacacgaaagcttgacttgttagcaaagatcaaacagaaatcaaaaggaacacatccatatgtcctctctactaagttgtcattggagatttaggtgacagaataagacgtggctggacgtaagatttctttccgattgcttccgttcccagtgacttatattataacaaatagtctaatactcctatatagtgtcagagaagtaacagatatagtatatcttgttgtccatcgtgcacatcattaggatcagggcaagttgcagtaggctggtgttgatgttctttgattcggtataaatcaatcaatcaaaatgcaaaatactactggatctgggctaatttgggggctttcgtgatcgtgcaaggtaatgcaggcgatcgtgtacctgacctcgtcctcgtgttcactaatacatgtgattcagttcactgacctcgtcctggtgtcgccggacctgctcgccgcagagctaccggccggaggccaccgcctcggaggctcctcctcgtcgttgtgttgtcgcgcacggcgcaggatgtgcttgccgcagaggtaccggctggaggtcgttgcttctttatccctcggtggatcagatgtattgccggtggatgttgatggtggtgtttggtgccggtgaatgtggatggtggaacggcaagaaggaatgtgagacaatgacgagaggaaagaggaatgatggagaatgaatatatatacagagaagaagaagagtcaatcaaggaagacgaagagtcgtggcccttccggagaaatcaggtggctttgcactttttcattatactccaacgtaagattgtcttttatatttagtccttttcgcgttttggagcgcacgcacgaaccacgctgtgccacgtggcatcgctaatcgctcgataacttgcacggatttcgatagtaagagataggaaggatggggccaattaaacttggacagactcgacggtgtaccgtaccatgttgacgacttgttcaattcaccgatcgatcgatctgcgggcggcgcgctcgcgaagacccatgcacgcaccggccaggaagatggacagctagctagctcgatcgatcgatcggcggattactgtacgagagatattagacagccgcgcgcgcgcatgcgccgccgatacggtgcatgcgcgttttcatgcaggcacagctagcgcgattccggacttcacttgtcggtgcggtgctgcatatgcatgcgccgtacgtacgtacgctcgccagatcagagctagtggtcgacggcagtatacaagcacagacaggggcggatccaacgtgataccccctaagcccccccttcaattttttcatcacattttagcatagtttaacactgagattatatgtttatatcggtgtactcagtatgttgagtcccccaactttttgtttctgatccgccacagagagatgcatggcatgcgtacgtcagggcccgcgcgcccgggtcagctgctggatgcattctgccgcgcgccaaacgtcaagttttccattttctatactaccttaatttggccaggccacgtactagctgtatttatcatgcatatgattaggggtgtcaatttcccggtgaggggcgtatatgttactgttcagttactacactaatatatatatacgtacatatactatgtgtacatacgggtaatatatattaatctatactccatctgtctcaaaatttaagcattttttttatctcgacacggtccttgagatgctacttggaccaacaatatctataaaagtaagatgtcgttttaaataaaaagagttgcatattatgatagtttgtttaataataaatccaataacatcaattttacatgattgatcttttttattttttctattaacagtcaaagtttaaaatgtttaacttgacactatgctaaaaatgcttatattttaggacggagaaagtatatactttgaatacgtacatgcatgtactggtagctgtcagagagaattgctagatttcagtcacctcaaaagaaatttttagtcatttaaaagaagggggtatttaactttttgtcatttttaagatgtggtaattaataatttgccacccgtaatctataacacgtgggccctcgtatgtctatggcatgtgggcttagtgataaatctttaattgtcacttgtaagagtggcaaatagttaattattcctctaaagatattgcacactctgcctaaatttgcagtgatgtgcaacaaacaattttcttttttactgcagtttgatgttatgtatggtttttctttattttttttctatgttggagtctttctcatttaattttgtaaatctttatgtgttataggtttacttcattttattatatatatatatatatatatatatatatatatatatatatatatatatatatgttttttaaaaaataatattgtacgattattgggcactggtaattaatactaattaagtaatatggaagtgatgagaatagtttatcatccgaagaatacgaaaagtagtgactgaaaattttaggcacctgaaatctagacagacactctcgtattaagatattaatcctggtcctatatatatcgcttatataccattcataatcagtactccttccgttttccgttttacgttataatatgttttgactttggtcaaattcaaacagctttaaatttgaccaagtttatagaaaaaataatattttcgattaagataaatttattataaaaatatatttaattattaatttaataaaactaatttggtgtaaaattactgtattaatatttgtctataaacttagtcaaactttaaacaaattgactttgactaaagttaaaacttcttataacctgaaatggagagggttattttttttagtgttgagcatgtagtatgatcatcgacctctcaccgtgtatgactaaattgactacacatgcattgatacgtatgtatcgtgcatatatgctccatactcgtctgagtcgtttgatcatgtagttattgacatggtctggtctggttacgtctactggtctgttgctttagtaaagtcccagattaagtcgatcctacatttcataccggccggtccacaagtcaagcacatggctaaccgtgcatacataccacttccatcatgtagtatgcaacaatcatggagtataatatttcatcccaaactatgcaagtgtatgttaattagtatatattaaccaccaaaagcaatcattaatttataattaattagtttcggaagacctagctatgatctctagccacaagccccacaaggcaatgaacggacactggacttaattagcacccaaattaaataatattgtcatcgtcttggtcaagccatcctaacgctgatacagcttgaccacctcaaaggctcaaaaccttgtgcgcttgcaagagcaatctagctagctgttttcagtattagtctcttgacagaaagggaacacctaattaattattttatcactgccatggaaggtcttttaagctagctattagctgctacttgcaaacttctacatattactgtctagttcgatctctttctgcagaatctaattgaatattggagcagtatgcttgatctgcttgtgtatagttaattaatacgttaaatcattggagagaaattaattaattgcaatattagagtacgtatatatggtatatatagtatacatgcatatggtcttcagacaaatgaagaagaaatactaggaaaggacgggaaaatatgaacaagcatattagtcagctgaaagtacttttacttaattatctgtcttcgcgttcccttcagttatacggtcaagtagttggtctccaacaattcaaagttttctaccacattcgttaattcgtattaatattcaaatgtcccaagttgaaaaatcatgagctggctagctatctcccattctcccttgaatcttgacgagtgatgactgaagagtatatatgcacacactgagcattattttttctttgatttgttatgtctcatacgtacaagaaatgtaagcgaaatttgccacaaacttagtggcaatttctatagcattaactagtgcgtgcatccttgctcaaatactccacttaattattttgttatgtttacatagcgcgagtattatcacagccaaatactccctccgtattttaatgtatgacgccattgactttttagccaacatttaaccattcgttttattcaaaaattttgtgcaaatatgaaaatatttatatcatgcttaaagaacatttgatgatgaatcaaggcacaataaaatgaatgataattacataaattttttgaataagatgaatggtcaaacgttgtacaaaaagtcaacgacgtcatacattgaaatatggaggtagtataacggtagtgaatcgtctagctagctacctctagatcgatcatccggccgcgcatgggtatcagtgtgtatatatatatatatatgcgcttgattttatatttctatcatagcacttaattactttatttgttgttgaaaactcaaggtcaaaatgagtttcaatcaggtcgtcattgctaatttgtctagaactcctttgaataaatgcaggtaatatatagttaatttattattttctatcaagttctattgcaacgtttgttaatttgtgtctttgggaataaaagaaagttagctatatatatagacatatagtcaataaaaccatacgtgtgcatgcatgtttctttagtttattttcacattccaaaaatggaccagtaactaaactacgttcacatgctaatatatcatgtcgcaaaagtcaaaagcattactagtacagtagagtagtaaaagcagctgaccattttctccgacatttctgagtgcatcaattattttcaatcttacatttgcaactctacgtgctgatcgatataatgtgccatgcatccatatactcagcctaattactttgcagtttcttacttttcccgtttaggactcctagcacatgtcgaaattaaactgatcaaattttaccattttcactagcacacgtacgtacatataaatatgtttatccacattttatatgtatattatttaatatgcaattcatctccatatgagaaagtgccaagaaaattagatcaaacttcgtggtaaatgtaaggaataatcaagagctagctagcttgcgtatgcaggatggatagctagctaaatttgtggtacctgtacaatcatcagtaccaaatacactcaattaattaatatattgctaaatattattgaacaactagaccaatggaatcagatccatgtggaggatgttggttaatctgcgccatgtggcgcagaataatcgatcatatatactttgttataatgcatcgatctaattaagagatgtgcttagtattttttttctagttaagagatctagctacttagttttttttcgaacaaaaaaaaatgggtccacacagaggtcaaagctaatatccattataatctgggtcttcagaggaagttcagatgaaaaatacacttgctatgtttgttgatgctgatgatcaacctaattattcttggtttttggtacggcgagtgcatgttcaaggtcagccttcttccaagcagctacctagtcttggtttcttgagttcatagtgcacacacatacacattgtgtactactccagttcgatacagtggtctaattaattattaacaaattaattaagtattcgcaaaaagaaaaattgagctggtactgttttatactccatccgtttcgaaatgtttgacgccattg

SEQ ID NO: 6320 - DNA, 31017 bp, Oryza sativa
tcttaatgtatactatatttttctctatatactatataaacacaaacacagtactaacattttccattgcttataatttgcagatgaatatcactccaattgcagagctgcgcccagggcgatatgactacatgatatgcgtccgaatatccaggatatgggaatttagaggaactaatgaagatgataacatcaaacatttagatctggttttacttgatcaaaaggtaatactatatcctttatttatattttctcctaacatatatttatcattaaatatatattattttattaaaattgcatggccattgcagggagatgctatctatgctgagatcccacctgatgctatacctttattgaaccaatatttacaggaaggaaatatcgtctacatcagcaagataacagttaacaatgctaagcccagttatagagcagttggtaatccatatatgatcaaactaaacaaaagaacttgtatcattgaagccaaagatcaacctatggattttccaaagtatacatttgatttggtgtcatttgataaacttcatgatttcacaagcaagactgatcgttttctaggtactaaattaacttttatttcattacacgtaaccataatattctatatgcaatgttataatcaaatactttattctatctttgcagatgttattggaaaaatcattgctgtttctaatgcagcaatgatttctacaagttcatcagattataggatgagaagaatagtcaaactacaagatttaaggtaatttatgccaatatcagctatatttccccatctgaacactaacactaatctgaaactacttgatactgactttattgtttcttcaaagtggaaaaaccatcgacctctcattatcaggaaaaagagctgttgagtttgatggagagacaatactggaagttggtcaaaataaccatataatagcaatatttgttggtacatcaatgaaaatccttaagggaacatatgaatttctaagtggaacaacagcttgtcgttggtatatcaacgaaaatgacatccctgaaatcaagatgtttcaaaaatggtaagtacaatttaatcccctgcatatcttcttttactttatggaatttcctatttctaacatcttatatatgcagccttccaccacatgctgatcctatacaaaagctatacttgcaaagtgatgaagatatgcaacggagcattgaacacaaaacacttgcagaattgaaggaaattgatccttttgttgacaaggttagacttatgtacctaaattaatatactattaaattctttcattgaactacaacttaaacctttcatttatacatttacataggatgaaaaataccagtgcactgctactatcattggaattcaggaaagaaaaacttggtgttatcaagcctgtaaattgtgcaattgcaagatgatatgggatggttctatattaaaatgcaagaaagagaactgcccatgtaggcagtatgagtacaagtgagtatttctttttccaatcatactattaagtgtgaatatatataactataattttcaaataactctgcacttgaacaggtacaaaataccattcattgcaaatgatggcacagctagccttgaacttgtgctatttgaaaagaaaggtacagaacttattggtaggactgctgaaactatgaaaaggcaatatgatatcaatcaaacacctccagaaataaaagcatggataggacataaattcacattcatagtgaaggttttgctgaacataactatcaacgctgatgaaccttcatttgaggtgctgacaattaaagaaagatttggaaggcaacattccagccaaggctttaaggcaactaagaatcttcccatcagttcaagttcatctcaacaactacataatttacctccactggtgcctatactatccaagaaaatacaacatgaggtaaaagagtagtactctttcttttattcatttttgtcggtgctacataatctcttactatttcctttcttttctttcttatttactgctcatcatcccagatagaaccaccccaagatattcaaagcatggaagttgaaccatataatttagaaacaagcactttgtcaggaaaaagagcttatgaagatccaaacagtacagatcaggtaaacaactgatcatatttaaattcatttgtttttcattcttcaatcatacaattaacctactaactgtactgtgcacaagcttggcaccatttcaatcaagtgtatttttttagataatggaatgaaatattcaagcaagtgtataccctgtggtcaacaactattctctatttacatgtactattcacatatatggctgacactaggggtctcatacttgccaaacctactgcctgcattgtgctaagtattgcatgagaaagaattgctggttccttagtaatatactttgataaggattctgtttttcttttttaggaaaatgatgaagaagaaagcactgactatggcttcattcagacaaagggcaaaaagaagcgttctacctgataacttctccaatcaagacagcctacttttgctatctatagtccaagatggacacttttgttatcctctcatctactagccaaattacttttggtgtatctagctctgactaagaacctagactgatctactagccagttactctaatacaaagttgacatggagctttattaaaatctttcattatttaagctctagatcaacatctagaggatgatgacgatgacgatgggttgcttggttccggcaaacgattacgaggacgtcggccgggttctcgagaatcctgtcgtcgtctcccgttgttgaagataatatgtcaatactcttcaaatgtctgtcacaaatagccactgtgttttgttcagattatacagtctatatcacactatatgtcacaaaaatcttctaaattttgtagtctactacagcaatcatgattgtgcactgtagtatcatgctataacttgcgtttttttttttgagataatacttgcattgttgttaaactgattattctgtctcattagggtcaaatagcatggcccatccagtattgcacgcggcaaagccgcgtgtttttttctagtgtgtcacgatattgttgcatataggagattcaggcacgcggttggccatgtgaccgtatcctcctttttttttttccgcttttgttactgcacgtgcacgcacaccggccagctgggccaggcccttgtctctccgagccccgcctttcgggctgaattctaagccaaaatggaccaggccgtacctggcctccatgctgatgggccggcctctccagctcggaggcccatatttgttctgccgtcgccgcgtcgtgcggcccgggtctcgatcgctttcgtgcgtgcattcctcggcgagatacacgcgcagcggccactggcttagctttcacagctcgaaagcagcttcccccccggagctttccagctgcacacacatcaggatgtcactgctgcatccatccgatccgagcccaccatctctgtgctttgcaagctcacgcggtggtccgtccagccgaaagcttcatcgacaaaaaaggtctggatgtcacgcaggaccaaagaacagcctccacctaattacctctgttaagtttctgcactcttgctaaactgtcgttatgttatactgttattgaccatgagcacggatactcctctcaaatatgtcacccgttctgacaaacttgcatacaacataatacggatcaagtgacgctgacagcaaaagggaggctgatatgttctgcaaacccagcatgacttgataccaacacacacagtttatccattttgatgcaaggtgaaaattgcaaagctttcagatttgtacttcgtattgagcaaacatgaagagtatcggagatttgccaacacgcaacagcaacatgaccactgcccaaaatgaataaattaatgcataacttaaaatggacacacacacacacacagcggctatttacacctcaatcactccctacgtcatcttgtacaagtggaataaataacttagatgatcgattccttcactctccttggcatcaggatcgatcatattgtgtgttgcagttctgttacagcagagtactcccttcagctggttccaagccaaaaaataaacacaaccagccctgagctcctgtgacagcatctacctggcttcaagtgctgatgccgcagtctcgacagtcccaagtaagcaggtgtacaccttctgcttcagctgctcaatggtttcaaccaaagcatcttgagatttatcaacctcactatgcaactggtcgagccagttactcgtctccttcagttgcgacaaccgaaccgcgatttgcccgtctccgcccttggagtgccctcttactcgttctctggtgttcttgttttggccctcgaacttgaatccagcttcaagagcatcttccaagaaactgagaaaccatgactgtgattctttctttagaataatccatgatctggagatctccttgaaaccatcctctctggcccagtcaatcttttcacttgtgtaagcatcgtcagagttctttgccgtactacctgcaacagctttgttctgagatgcagaggctttccttgatggcttttccttctctggccgagattctttgacaggctctgatgagtaatctttccaaaaaacactttgctgaatgataagccggtttagctgaaaaaacttggtaattgcagcatgtggatcctcctcagcggactttctgatctcagcgaatattctgaaaaacagacacagacattagttcttacgttcagtagcaagagtacagtatatagtttcaagtaaaaggtgtttgacactttggaaaggatttgcacaaaaagggaacagggggacaccaactacaccagctggaatagctgtaaaagaaacacctgagctaacagaaattcagcatagaactacttacccaaggcctttaagaagtgaggccgctgcagtagcctccctttgagcctcagctgctactacaagagcaatagtcttcctccttgcaacaacctattcacacaaaagaaatgtatgcagcatggattagaacttcgtgaagcctcttttcgtatttacatggaatggttcaaataatagtttgcagttcatggcttcatgcatgcccatgtaatacagtcatgtagacggtatataatcaagtcatgatttatgctcgattttttaaacgaagatgacctaaaaaatataatgggttaatatacctttactgacttgattagacttgttggaagagagtcccaggagacagtttcagtaactcttcgtttaacagtcggcgtagaagtaactgtaccggaagtaccattaggctttgctgccaaattgagctttggtggtgaagtcattgcaggcggtggtggtgttggtgttggtgttggtggtgaagtcttataaagctttggtggtgagtttttttcagatgcagactcctttttgctgtcctttgacatttgcttcttcactacagctgagccattctgactgggtgaagaagcgctagtcttgcgtgtgtccttgttaatttcttgttttgcagaaactatcttagcaggactgcgagatggagtatttggccgttcctgcaatattagcagcaaatgaaatcagtaaccatcctagagatgcttttgtgcttcctatctttgttcattttagaataaaagaactcgaatatagcagatgtcattcaaataccattagtacaattttgctcatctcaaagacccatagtaaatggaatgattcatcactatggaaatgcacggggattgtcaaagacaatatatagtaaaggccatgttttggctgatagtagcatcttagttcaaatgtaaattaaacctacgcacttaaacgtacctgaggttttgattcttgtttgaattttgtcggagctgacttctgatttgcagaacatatgctacttcctccattacttttgtcactatctatgctggagtttagattggtaattttgctattgttgctagatatcccaagcatgtaacgtgaagctacaactgccttctgctctttgatgactaccttcctctgagagttctccttttcactttcagacagttcagctgactttgtagccttccgttgatgagccaatgcttctgaaatcccagtgggagttgacatctgcatcaaatcctttggatttccaatgcaagggttccttcctggaacaggtcgaaccccaacaagaactgggacagggatactagattggaccttttcaacatatatgaactgtccaagttgaagtttgtttgataagatgagttcattatcctccttcgataaagaaacatacgttgagtgcgacgagtctgaaacttttataaagaaaccatggtctggccaaagttctgaaccagtgattgcaggaactatgctaataacttggagaagaatggaccgatattctccacatactttcacatcagaatttatattttttagtacttttaacagtacccctggagtaagagatgccatatcttcaagccagcttattcttcttcttttttctgaaaaaaggtaccgaataataaatcacatatgttaaaaaagggaaaaaaaacatgtaatactgcttaacaacacagtttgaccactcacaaagcatcagaactacgaaaggaaaccatacagatatttattattttgaaaaaagttagcgaataataaatcacatatgttaaaagaggccgagaaacatgtaatctactgcttaacaacacagtttgaccactctaaaggaaaaaggaaaagaaacaaaatagtctttgacaaagcatcagaaccacgaaaggacaccgtacagagatatactctagaccagaattctagagtcccaagacaagaacatttgcaatctagatttcgccacatgtctgaagatgaacgcaacaagacaaacaccaaaaggacacgtagaacccaaatcacaaggaggcctgaagcaaagtttgttctttttggtgatgtactccatattcaattagaaatcccacacatgtccttccgaacagtcgcctgcaacagcagcatatccaactagagaagtccaatcacatatcttccaatgcacatcacagagagaccttaactgaacaagcgaaagcattagaagaaaagaaattgactttatgaatgtttcttagctttccagcaaagctttgtagggcccatcaactaaaaacgcaactaataattcttatgaagctcttcatggccaggtacgtggacacctaaaaggccaaaagctaccaactttcccatttcccatgcctcaattccttagggagaggctgtgagaaatgcactgcctaattcatggaagaagacaccatcctatatgggtttcttcatttcttgacttaatggctactaggaaaggagagacctaacaagccaagaaacggcaattcttgggagggatgagcattttggtcagaatacaactcctaaatctacaacgcccaacatttgtagaggggctcttaaaccaacttctgttagttatttggcacagaaacgatatttaatgtctcatacagtcacttgcacgaaaatttccatgagaaaaaaattctccagcaaaattgtccttgtcggaggtctttggtctccaaactaagtgaaggcgttgattgacatagtaccttgaggttaccaagaaggaaagcaatcctagtacgcgaaacaagaaaccgaaaaaaaagcaaaggactaagttacacctccttgttgaggaaagaatttcttaaccgaaggattatcccagaaaagaaaaattacgaaagcaagacgcaagagaacttaaaataatctatccacagccttctctaagaacttccatttacccaatccgcgtggttttccgccctttggtccgagaacaagaaccagggcgcaccaacagaaccatcaagaaacagcctaataatccctcaattgaacaagaacacttctttctcggccacaggaggagaaacccggcatcaaattcgtgcagcgaaaatcgaaacagggaggcagctgttttggctgcggcattccatcgaacaggtggtggggtggggaggggaggagggagacgattagtatacctttcggccgcgcggagtcggatgctcggagcagaggagaggtcgagaggagacgagaggaggacggagtcggcaagcggcggttgtgctctcccgaggaggaataaaaagggggcgacgaggtagtagacgacacgaggcgaccaactgcccgtataactgtctctgacacctcgggtcagatcccccggctctccgcgtggcggccgcacgttgctgctagctcgcactgacgcgcgggcccgactttgtgctggtcactcacacgtggaccccacggaccctcgggcccacatgtcagtggggacaacgtgtggggtgggagggaggtcccgatccccggggcgagctcggaaccaaacgcagaaccggtgcggcgtccgcgtcgcagccgatgggcggtcagcccgccaccgcgcgcgccacgccaatgccatccctcgccgcggccggcggcagaggcagaggcagccagttattaggccataccgccgcgcgcgtcaaggctcgcatgcgtccacggccgcttcgccttcgcgcccgcgcgtgcccacttccaccgtcttccgcgaggtcgcgtgcacgcgcgcgcgcatatccgattgcgtttgcgtgtgcccccccaagcgcgcgcggggctgcgcggtcgacaggttgacccgggctcggctcgggttgggttggttggtgggtggctgcgacgacgcgagttcatccgcgcatgttcgcggcgcgctttcttctaccgatcgtttcgctttgttttagtggaggccacggggggttttcatggcgatcgacgtgacgggaaaagatttttcagtgcaaaagctcgtgccggacagctgcttgaattttgcaacgagattaagggagtaaagtaatcactccagaacccagtagtagcagtagtagtagtagtagtagtagtagtagtagtagtaggagtagtaccgaactgccgataattgggtatacaaacatctgttctactaccgaaatagtaactaccgtctaccagttgttgggttggtacttaggccgttaggcgtagggagcatttggtagataataaatggagatggtactgtatactatatatttgtccatcatgccgtagcaggttaggataagtgtttaacggcatcactccattaacggcttcaccaagaattatgagctgtaggtgcttatattcagcctaaagctgaagaaattggaccctgcaataaggggcaattggcttcaccaagaattatgggctgtacttatattcaggctaaagctgaagaaattggaccctggcaccctgcaataaggggcaattattttcacggataaacgaggacctaaacctctgacctcacaaaattgagaggcccagaggggttgaatcagcaatcgtgctgtgacgaaatgtcagcctctagagaaaacgacactttattccctactctcatttctgcagcggacgaacaggttgcttgtttaagggttaaaccgttttgttacagcattagtcagcttggagataatatcacatatatattgtataatctacagatttatatatgctattaaagacagttggtactccatatatttctagttaaaatggattgcatcagacaattaattaatgcaataatctcctttggacctcaacaagtactactagcagcatgaaccccacttcaaatgaaatatcataatctctgttcaagacaaagacatttttatcgtgcttgtgcaagatgtttgttgaattggctaatgcaatctgcttttggttcctcataatgctaagcactaccgtgaaatttttttaaaaaaatactgtgagtgtgagcaaaccacccaattattggaacagctccaccatccagtcatccacaacccaggttgctcaacaaatccatctcaaggtgatggcatgaccaaatcaattcgcttaactaatgccatcaaaaaagcagctcgcaggtcttatcagagaggatttctcatcttacttcgctgcaatctctccccctcataatattttctccccattttgccgcatcattgtcaggtatcgagagttcatatatggtcaacatggacattccatctaattcgtatacttctgcatatttttattaatgtcgtggtcttggtaacatcaccggaaaaattatatattgacacacatatagtggaacaatcatcacttaatcagcatatcccaagcaacctaattaagaaatcattccaaaaaaatacggcataatatccgtcatttatatattgacacatatagtggaacaatcatcacttaatcagcatatcccaagtcactaattaaaaccaaaaaaatatgtcatagtatccaaattacttagcacactgcaaacattggggctttactgttttgacatttcgagtggatgataaatggacccatctgtatctatgaaatatgggtctagtatcattataacaaagattaatatttgcagtgttataattgcaaatcccccagcaacgagataaccttttttttttttttacttgaacgcttgtgcctccgtctccgccttcaccatggcagcgtagaggccgtcgccgtggccggcgaggagggcgtcatggccgccgaactcgacgaccctgccggcgctgacgacggcgatgcggtcggcgtcgcgcacggtggagaggcggtgcgccacggtgatcgccgtggcgcgccgcgaggccctcctcagggcctcctgcacgtgccgctcggactccaggtccagcgcgctgctcgcctcgtccagcagcagtatcctcgcctgcttcacgatcgcccgcgcgatcgcgatcctctgcttctgcccacctgacaactgcaccccactctccccaacctaagcaaaacaaagaaattttagttcaacaattcaactgaaattcacccaataatcatttcaaaatggtagtttagagtaaattttacaaaccacacgtattatggtccaaattacacaaaacttcatagattttggcatatggcatagaacttcacgtatcatgattaagtttcacaaaaccacactatttaattctacaatcacatatcaattttataaggattctatccatcatataaatgttacacctgcattttaaaattttgatataggattgtatcagaaatggttaacggtgtggttttatcaaatattagtaccatagtatttagggttatgtgtcacgtgtcaaaatatttacggttttatataacttggataatttatttttttacgtaacttggatgttttatggaatgtactctataatttatgaagatatttgaatgcttagatttgaaatttttagtagttaacctgggtttcgtagccttgggggagggcggagatgaacttgtggatgttggcctccttggcggcctcctcgatttcggcccacgaggcctttgggttgccgaacccgatgttgtctcggatggacccgctgaagagggccggctcctggcccaccatggcgcactcgccgcggagccacttgaggtcaagctcccgcgcgtccacgccgccgaccaccaccttcccgtcgcccgggtcgtagaaccgctgcaccagccacaccaccgtcgacttcccgctcccgctcgcgccgaccaccgccaccgtcgtgccggccttcacccgcagcgagaagccgctcagcaccgtcacctccggccgcgacgggtacgcgaacgtcaccttccggagctccacgtcgatgggcttcccgtccttgatcgtgatccttcgcttggtggagtctccggtgatcgccggacgtcgcttgaggatggttagtatgccggcgatggccgccggggcgccggaggtgtcaggggcgaggccggcgagctggccgacggagaaggagctgaggacgaggatgaggaagatcttggacacgtcgccgaaggtggacacgccattgttgatgaagtgggcgccggcgcagagcgtcgccgtgtaggcgccgtacatggcgccctgggagagcccgaggatgacgcccatgagctgcgatctccggctggccttggccgccggcccgtccagcgcgcggttgaacgtgccgacgacgctgccctgggcgcagagcgccgcgacggtgcgcacgttcgacacggcgccggcggcgatgccgctggcgcgggcgtacgcgccgtcgtcggacctggcgcccacgttgatgagcaggttgaggtagctggcgccgagcgtcagcggcgtgcacgccgtggccaccagcgtgagccgccagtccagcccgaagcaaatgccgagccccacgccggccgagccgacggccatgagcagcacggcgtagcggtcgccgaacatggagcggaacgcgacggcgtcccgcgcgagccgcgtcaccaggacgcccatcgcgttgtcctcctcgtcgaaccacgcgggctcctgccgcatgatggcgcggaagaggcggtcccggacgcgcatggtgagccgggcgcccgcccagccgcacagcccctgctgccccgtcatggtcaggatgcaggccacgccgaggccgaccaccgccatggccaggtactccacctgccgcttcatcctcgccgtgtcggcgtcgaagtacacctccaccgcctggcccagcagcagcgggaacaccgagaacaccgcgccggcgtgtatgcccatcaagaaccccaaaatcagcaatggaccttcccgccgctgcagcctccatatctcggagaccctcaccttggcgtcctgcgaatccttcttctcctcctcttctcgaatcgtctggaagccgtacctcgacttggacaccgacacgtcgtaccccgactcgtcggtgaagctggtgtacgccgctgcagcgccggcgaggtctggcctggcgccgccgctgtcggaggcgaggctgaccagcgcggagtagggcccgcggcgggccatgaggtcggcgtggcggccggactcgacgacggcgccgcggtcgagcaccgcgatggtgtcggcgttgcggacggtggcgaggcggtgcgcgatgacgacgacggtgcggccggcggcgaggcggtcgatggactgctgcaccacggcctccgactgggtgtccagcgcgctggttggctcgtccagcagcaggatgcgcgggtcgcggatgatggcgcgcgccagcgcgatccgctgcttctgtccccccgacagctgggccccacggtccccaacctaattaacacacatattatattatctatgattaattaacagataatccgtgagattaatggttgattagtttgtgtgtgtcagtgtgacctgagtgtcgtagccgtcggggagggcgaggacgaaggtgtggacgttggccatggcgcacgccgagatggcgtcgtggcgcgtggcgttctccttccccatcatgacgttctcgatgatggaggtggagaagaggacgggctcctgcccgacgagcccgatctgcgaccggagccaccggaggttcagcgacgcgaggtcatggccgtccaacgtgatcgaccctgcacaccccacggacgcaaaagcttcgtcatcgatcaccgacgatctcgccatggtcgtgctctgcgtgcgcgtcaatggccattccctctcacctcgagtcgggtcgtagaagcgctcgatgagcgcgaacatggtggacttgccgccgccgctgacgccgacgagcgccagcgtcttggcggcggggatgaccaggttgaggttgtacagcaccatggcgtccggccgcgacgggtacgcgaactccacgtccttgaactccatccgccccttcaccgccggcagcgcccgcccgccggcgccgtacgcgtcgatctccggcacccggtcgatgacctcgaacacccgccccgccgccaccgtgccctgcgcgaactgcgccatgtacgacagcgtcagcgccaagcccctgcacacacacacaaccattccgagatcagagatcaccaccacaccaaccacgaaactccggcgaccggcgccattgacgacaacaagaagcggtgcgaggaggttgatgtgcgtgccttcctccgaccatgacgccgaagaagcaggcgatggcgtcgccgcccttgatctcgccgttggcgacgagcctggagccgtaccagagcgccagcgcccactgggagtaggtcaccaggtagatcacccccatgccggcgcccttggcgaaccccatcttgacgccgatcggcgccgccttgtccagccactcggcgtactcgccggcgagccgctcctccatgacgaacgacatcaccgtcctgatcgagctgatcgcctgctgcgccacgtcgccggcacgctggtacgatgcctaccaaattccatcaaattggtttcaaactttcaattcatcaaatttggtttcagtataagagcgagagagtgagtggccggctgctaaacctcttccttggcggtgaggccgccatagatggccttgtaggccatgccgcacgccatcatggcaggcgtgacggcgaagacggcgagagcgatcctccacgatttggcgaagccgaccacgtagccgaagacgaaggtgaagacgtggtgcacgaatcctggaatctttacaaaatgtgcacaagattttagtcatgtgtcagcttttgaacatatgtgtttgggggtaaattttgtgtgtgcgctctaccttctctcccatgacttcttggatttgggcgacatcgccggagatgctgtgcatcacctcgccggtgctcacctccgtgtcgaagaatccgatctcctgcctcagcaccgccttcaggtactctcgccgcatccgcagcgccgacctctcgccgatgatcctccagcaggtgatctctgatcgcacataattagaaactcataattcgattcaagagattcccaggaattgaactttttcatgattaatttgcaaaaatgctcaccaagataggctcctacgacgacaactgcagcaaggaacgccatgtacacactaatctggcatcgaacaagaaacgaagatgagaagatcggatttgaatcgaagctgagaaatcgaagaaatgatcatggcgatgcacgcggcgagacctgcttgacgtccttcatcatctgcgtcttgtcgacgttgacgatcttgttgacgaagttaccgaacaggtaggagtaccatggcagcgagccgccgttgatcatggcgccgacgcacccgagcacgaggaggacgatgtccatggccgtcgagtacttgaaaagccccgcgacgccgacgggcttcccgaccctcacgtcgatctcgtcgtcgtcgtcgtcgtagtcgccgacggcgtcctcgtaccggctctggccgctgaaggacgcgacgctgatgtcgtagccgaagctgggcgggtcacgccgcgccgcggagacgtagagctggtcgtggttgtcgcgcgagaaggagacctcgcgggaggcggcggcggcggcgttggtgtcgctgtacctcaccatggctcgtcctcctcggccggcgtcatggccgggcgcggagtagacggcggagtcggcgacgacgacgctgtcgtcgttgctggcgaaggaggtgttcggcaccacgacgatggcgcggctcgcgtcggtcaccacgctctgcagctccagccgcctgccgccaccgccgccggcgcggcggcgacgggcctgtgcgccgacgaggagacgtcgcggtagcgcgggcgggcggaccgcctcgacacgtagtactccctcgccgtccgccggaacagcgcggggccacggcggccggcgctccccatcctggcgggcgcccagggcccgacggcggcgccgaggccgtggggctgcgcccacgacgtgtccggctgccaggacactgagctctgccacgacatgtcgtcgacgaccacatcccggcgccgcgggccgccgcgcggggagggggggagcccggcggcgaaggaggtggagctgtccgggacagagtaggggctacctcgccggcggtggcggccgccgccttgcgggccggagtgggagaaggagaagtcgtccatgcacgcacggtggcgagcacctggtgggcgtggtgttcgataaaaaagggtgtagcttctgatgcgcgcggctttggacggcaccggcgggaggcggccctcggattcgacactgcgcgctgtttcgttggatcgtttcgcgcgagatagccagcccgaccgtgtccgggcgagctctgagcctctcgactttgtgaagatttttttatgatggattcctagtacttctttcaggttttaatatgtgacgttgctaattttttttatacatttgatcattcgtcttattttaaaaaatagattaaatttcagaaaactacaattttagttacaaaactatcgatttgctacaataataacgtaagaacttatcacaatactacaatgtttacattatatgctactacagtatatataggtgacaactgtagcaaataacgtaaaagtttcagttttgtgataatttcacacactgttgttgtagcaaactaaaaaatatcgttaatgttatagcaaaccgatagttttatcactaaagttgtagtattctgaaatttattaaaaaaatatttaattattatttattttgtggtgaattgatttatcatcaaatattatttaagcgtgacttaaatacttttatatttgcatggaaattttgaataagacaaatgaccaaatgtttgtcaagaaagttaatgacgttatatattaaatctgacaatctgctcgtgtctttgaggtataaatctgacattgctttcagaggaaaaaaaaacttgatttgattattcactcttcttttttttctgaactgataattatgtgctgtactctctttacagttcatctctgcaggagtaaatctatggcaatttttgagtcattgcatacctagtctaaactaaatatacacagagaaagaacgacaccttcgacaaatggaggtagaaacttgttaggcttcatgtatttggtttggaggtagcgtttgtgtatttttgtgatgtggattcatcagtaaacatgtagagtctggaagggatgaaatggtattttgatgtgaccaaagctgtcaacgccaacgaattaacagcttattaaggccatcttttccatcggctgcaatttgtttgattgtctcaggaacagcgatcatcaaattcgtcagaaacacccatgacagaccaggagagcaatccaagaacatccttcagagcttcaccgaagaactgaacaacacatcattttcttatcttattcctatcttttgttcccattttgacgccgtctcatttcttgatctctaccgcgtactgtagatcgtgtgtgtgtgtgtgtgtgtgtgatagtgcgtaatacgatgatttggacaggagaagtagaagtatttgctagtacctgtacttcaaatttcagttttgtttcgtcaggtggttgtggttgtgcttctctttttcatattatgtttttgcagacgtggagtaattcagacaatggtacgctcgtcaacgctgaaacctgactgcaaaatagtttgattgtcttctgtactgaacttgttccaaatggcaaggagacaacatagttcatcagcagtgggaaatcgtcttcctttgagtaatgcaggcacatggatttgattatctggttaggtaatcagtaaccacagacgtcagtcaggttgtggaaatatggctatccaaaacatgtagcattctgaaagtacctttttctttaagaaaacattttctagcagtggtactactatgagagtaatagaagatcctaataaggaaattcaaataatccaccacgccaacactgaaaattggaaacagtgagagcattagattaaaagagtgcatggttgaagtggccatttggcagcgaagcaattgaaagcttctgcaaaatcaccagaactacgaactgtatgtctgtatatactacatcacatatgctaataatacaaccttattttaggccaataatcagacttatgtcttagcgggtacttcctccaaggtccaacagcgtttaaactctgaacgtagtttcctgaaaactattgagcttgtatatttgtgatgctacgaaatatgaattagaatttacaagggagatgtaaaggtagagactagagactgtttcgatgtcttgtgtcattgtctttggaataacagagcaaaaaagtttttggaagacaagaacagggcaaaagcgccagttctgtttttcataagaaacctgtttcatggttcaggcgaaaatttccaataaactgctgctgctgaatccctgctaagggagcataaccctgtaaaacaaccaaaagtcagaaaggcaaattaaaaaaatcttccatataatcatgagtctaatttacttatattgagtgttccaattaatagatacttcctccgttccacaatgtaagtcattctagcatttcccacatacatattgatattaatgaatctagatagatatatatgtctagattcattaacatcaatatgaatgtgggaaatgctagaatgacttacattgtgaaacggagggagtactaatcttctgtatatctaaaagccagaaatgcacaaaaagatgtgagcgtattcttttgtcaccagtggtctcaaatcgtatacaaccatggaatgtggcgatcttgagaatatttttctaacaaaatttgagtgcatacaaacttaatggattgcttgcctcagaaggcggtgcatacaaaatactatgagaagagcaaaagcaccaatattgcttttagaaattaagtattgcacaagtgagttcagttctaccaaggggtcttacctgacttccctgtgcacctccatgaagggcctgctggtgggagttagaaacagaagtgtcctgtagttgatcacgcatattgaacctcaacctttactaaggataaaaaataaacttaatgaatagttatatttgatcaacttacatggttaagctcgttatttgattgcacatgttgtggatctataaatggcacgggaacattcaaataagagctgggaatttgtgaaactcctccattcagaagttcttgattgcctgtacttgcagacttgacatccttcttccatcttttcatgaaatatttttgtggtaactcctttatatttctgaaatctagaactttcaacacatggcaacactggatacccattgcttcaaattttttacaactgcatacaacagataagtcgccagagtcaaacctaacatagtgttccccaggcctatctgttactgctactctatattcgaatgcatttccatcctctccacagctataaatcacggaatcgacaaacatctcaaactccctgcgaaaaatttcaaagaccactggtgtgtacatgttagcagcctgtctcagcattttggatggaggaattctagggaagctttggcttgcatgaaaatcagcttgtaactctgcataacgaaactcatcaagcattctttcatagtgcttaaagaaagataacaggtcaaattgtggactcaaggacttcttcaaggcatttctaacactttccgactgcaaagaactttttatatctgcagtgaatacatggcgattgtatactggagaccatttatcacgatcatcaaatatttttttaatccactcattgtttcgtagatcatacttctctagcatagtattccatccaagcaagaagttctcttcatcatcgtagtcataaacgcattttccgaaatcctttgcaaatgttttggagccttgaaagatgtgattaaggtgcttgacagagttttggtacacttgccatggacaaaggcgatgaactgttccaggccatgctgctgttatcgcagaagccgtagttgctgccatagaccaatctgtcaagattgtttttggttgctttccatttgcagcaatcttgaatgtatcaaatagccacttgaaagactcttctgattcatcataaagcaaggcagcaccaaatatggagatttgcttgtggtggttcactccaaggaatagtgttaatggtctgctatgttcatttatcttgtaggttgtgtccaaacaaaccacgtcactgtagtagctgaagtcggttctagatttggaatcggcccagaaaatgtttgtcagtttgtcatcctcatcaagctggacagcataaaagaaagaagggttgcttagctgcatgctttgcaggtactttacagttactcctgcatcaccaggttgcatatttttcttgcgctttgaacaaagagagcacctgtattctgcagggagaaaattggtatgtctaattacttctgcttgcttcaccaaagagcaactagaaaaccttgatggtgtcgctgattcttctgaggagtctgcttcagttgtttgcagctcagtgagtactctctgagacctcagcatatgcatggttgatgggggtgctggctgatggttatgatctggtacgaattcagatatacgatatttaccatcagatgtaatcttaattgacattcgtgcaggacaccctattcttgtttctggccgtggtcttttaacttccttagctcctttcttgtccttacgaaaaccttctctcgagcatacaaaggttcttgaccttgtgatgttttcagctgatttgtccgatgaacttttacgaacactgaatcccacatgtccagcgtacctgttgtagaactcatatgctttatcttcgtcatcgaattccatgctaagttctggaaccatttgtgcaaacatggcattatccatgggggtatcagaatcaataacttttcgcacttttccctgcatgtagaaaaccaaaacgacttacatttggaattggagcgagtataaacaagaagtggtggagaacaattagaatacctttgcccatgctataccacaagcattgcataaagttctccgtccctctggtccacggcgcatatgaggcgtcgcatttgcactgatgccacaacgtagacatctgaaaaactataacataaaagttaggaatcgtctcactaccatgaataattgagtccttgattcaagagaaaatgatctgtatcaatttccagcatgctgctgaatgttgatagtactgagtagtatagtagtcaccaacctgctaagtagtcagtgtgcaatactaacattccaccatatgcatggaccgacagacagcctttgataattttattgctttcataacccgatctgagaaaaggcattgatgatcagctactactccctccggacggaaatatatgatgtttcaggtagtggaattgatttgcacttagtagtatttccctgtctgaaacgacaagtaatactgacttgaggaagtgttactcttctaaatttgaatccggtctcgcttaaccataactacagaagactagaattgggaaaagaaaagaactgcaaaagggtactaaatagtactaacatccagagctctcttctctcgtgatatctcgtactccctccgtctaataatatagcaacttagtactggatgagacatttcaatatttcatagtacaataaatctagacaagagcatgttagatttattgtactatgaaatgtctcgtccgttactaggtcactatattatggagggacggtttcaaaaaaaaaaaactatattatggagggtaggccctagctacagttataactagcttggcacgttagcttttcacccaaacattgcacatatgaaatctcgatgctgaactgctgaatgtaggatacggtaaaaataaaaaagaaagaaaaattcttcacctggtaagctcatccactgtgaccctgccaccatcttcaccctcaccggcaccaacatgaacatctcccccgtcctcgaactgcatcgcttacaaaccacaacgaaccaggaaataccaagctttcttcaaaactccgcgcgggattctgcgagcaaatcttctagcgctgagcaaacccgaagcaaagcaatcacgacagaaagatcaaacaccgtccgaatcccttctccccgagatgagctcaactccagccacatcgaatcccaaatccacccagcacaaaaccttactccagaaggatcagatcgttgctcagacagagattccttccataacctttgcccccaccgaaatcgacgggctccattgcagaagtcgaaatctgccaggtttttttctaaaagagcgccgcccaggagcagatcctggcacgaggtgcgcgaaatggcgggaatcggcgcggggattggttggattcgggggtttaaagctagggtttagcgtgggggatccggattgggatttggtgcgggaggttggataccggaggcggaggagatgcgagtgacgaacgctctctgcttgccacgagagccgcctcccctcgttgtggggcgaggcagcttggtgggccgcttgggctcaactcgggtagttgggccgtaaagagcaaaagctgtctatgccgtccaagagggattatgggccggaaagccgttggtgggcttatgggtctgatgagctggcggataaagtctaagtttctagtccgatctcaactgtcagtatcatgtactttcaaaatatataatcctttaaacatttgtactttttttagaaaaaaatgcttagagtttaaatatgaatatttacagtgacagatattttaaaatggagacggagtgagtggattgtgtgtgcgattttctttggaggaaaattcggattgtgtgccaaggcaaattacctgtaaaaatagccgaaaacttagtaaagttggtgatgcaacgttgtctttcttttattgcgtggtaacgtatatacacacgtcactgcatacgtaacatcgtactcatacacccatgttcaatgaagcagaaactagcgagacatcctaaaattttattaaaacttgaaagtccatcagtttcaaaaatattttggggttggaacggaaatatgctagggccatatggtattatggcaagtcgtctcgtttccattttaacatttttagcttacttttaattcttataggcatatgggacaaggagctataaacttgtaacttggacgtttatagcttgatcataacattggtgctaagaattttaactataaacattatagttttatgataattttattgttaaatatgtggttttgtaatacttaatcttaaatcaatagttttgtgacaaattcagtgttaaatctataatttaataatacaacatcttaaatgtgaagttttgtgatagtttgataaaaatatattaagttttgtaaaaattactctattaaaaaaaggaaatgtgtgctatgctccctatcttgctagtccagggaccaaataaaacacatatacttgaacaactatcagtccattgcagcaacacttaataaacagccaccaggttaattcaagtagcatatgacagtataaataatagaatcaaacgtagataagttcacatatcaccgaactcgcgtacactggttcagtacacatgtctcgcacaacttttatggtagtctatggctcataaaccgacttgctaatacaccaacacaaattaatcaagcttgaaccttaaccggcatcgcatgccgatcccgtcttttgacgttgcagtaattttccgttcattagcctctgcatacttaccactgcagcttaagcgttcatgcgagccgggtactgctcgacgcagtccagccacgggctgcgcgccgggcggcgcacgcggcggacggcgcgccacacggcgctgttgcacttgaacccggagccgaaggcgagctgccacacgcggtcgccgcggcggacgcggcccttggcctccaggtacgccagctcgtaccagatgctgctgctcgacgtgttgccgaagcggtggagcgcggcgcgcgacgcctccaggtcgccgtcgcggaggcccaggttgccctgcaggtgctccagcacgtcgcggctcgccgcgtgcatgcagaagtgctcgaacgcgcgcttgaagtccgggatgtagggagcggcggcggaggcgtcgccgtcggcggacggcggcggcggggcggaggtcttggacgggaacaggtggcggaagagcacgccggcgaagaagaggatctgctccgagaacggaagcacgagcgggcccagggtggtgatgttggtcttgagcgcgtggccgccgacctccacgaggtcgcggctgatggacaggcccttgatccgctgctcgtcctcctcctggtacaccgaccggaagctgcggtcgtcggcgcccttgtgggtgcgcacgatgtgctcgagctggtacttggcgcggtggaagtccctgcggcggttggagagcagcacggcggcgcagccggcgcggaagaaggcgttggggatgagcatggagcggcgcttcccggcgtaccaggtgaaggagacggcctccgtgctgacgacgacggcgagccccgcgccgctggcctggagcatgtcgcgggcgaggtccaccgcgatgacgccggcgctgcaccccatgccgccgaggttgtagctgaggatgttcccgcgcatcttgtagtggttgacgatcatggcggacagcgacggcgtcgggttgaagaggctgcagttgacgacgagcacgccgacgtccttggggcggacgcggcacttgtcgaacagctcgtccagcgcggcgaacatggcggcggacgcctcggcgcggccttccttcatggtggcgcagttggtgcccggctcgaacacgcagcgcggcatgtaggactcgtcgccgatgccagacttggccagcagccgcgactggaacgccaggctatcctcgtcgaacttgcccgacttcctcgccagatcgatgaactccgccttcgacacctgcaagcaattgtccatgcaaaatcacatccttgcttacaaatcaccagctagtaccataatgcatcaaactgattacaaactgtaagtaacaagtgaaatcgaagaaatttcatgcatgcgaaccgggtaaacttggttgtttgactcaaatccatcgtgcgtgcaaggatagtgcaggttgtggtttgtgtgctcacgcaaaacatttttcgaaaagaaaatgtgtgctcacgcaaaacatttacggtttaataatacggttcggctcattgaatgtgtgtgcccaatcgcccaaccgtatttgatgacacgagcaagtgagagcgatcgactgatcgagtcaccggctggcctggccataaccgaaagcatcctaccagctcgtcataacttcgaccctgccctgcccattcacttccaaggactggggcccaaccaaaggtgcctcctaacttgcattcaagactccaacaaaataatggtagccaacaaactgttttccaaaacttagtgatgtgtagcatataagggcctgtttagttcgtgaaaagaaaatttttatatgtcacatcagatattttaccggatgtcgaaagaggttttcagatacgaatgaaaaaactaatttcataacgcggtttcgtgaaaagaaattttttatatgtcatatcagatatttcaccggatgtcgaaggggttttcggatacgaatgaaaaaataatttcataactcgtttggaaaccgcgagacaaatcttttgagcctaattaatctgtcattagcacatgtggattactgtagcacatatggctaattatggactaattaggctcaaaagattcgtctcgtgatttcccccctaactgtgcaattagtttttgtaatttatatttaatgctccatgcatgtgttcaaagattcgatgttatgttttagggaaaaaaaattggagaactaaaccaggcctaagtctgcaaagatataactagagtttcttttggagtatctactaaggaggagcttcttatcaattttggatctaatatatcatgtaaatactttataatattcagttaatattttattaccattcctttagtcaacatagagtaatcagggaaaaaagcagtggtcaaagactttacttgagaatgatggcagtatttatactaaaagtaacatacagtacaagataacagaggcactcgggcacaaggaaaagcatctatctagtgtaaacttattaggtgtagaatcaatatatgataaatgaatttgattcatacaaaatagcactacctccgttcttttttttttgtgcaatttctaagatattgctttgaccattgcacattttacaacgttgtgttaggatataatccctccgtttcatgttataagatgttttgactttggtcaaagtcaaactgcttcaaatttaactaagtttatagacaaatatgaaaaatatggtaatatttaaattagcaaattagttttattaaattaataattaaatatatttttataataaatttatcttcggtcgaaaatattactatttttttatataaacttggtcaaacttgaaagtttgactttgaccaaagtcaaaatattttataacctgaaatggagggagtaataacaagcgtatactaagtatggaagtattttttttatgatggatctaatgatataatttctaaaaatttaattcaagatgatttcaaatatgccaatgtggtgaaatctcaaggaaaaaaaaaagacgaatcacaccggttctatctagggctgtcaagtaaaatggaggtggtaatcgtatgagcgtggctcgggtatttcagtcagtgccgggcagatttgtcagtgctcaaatagtgaatgtgtgctacattaaaagcatttgagctggtagtagctggcaaggattatgaccgtattaaaggaccatgcggagtagtactagctatagacaccactataccaatagttattcacaactaaaagcccaactgatgatgagtttttttttttttgttgttgtcaatgcaagttcatccagcagttaatactaaaccctcctccaacaaaggtaagtcagctagctcataaatctccacatcagcttttgtatgatgtggaagagagagaagataaggaaagagaatgcactatctcttctttaagagctaagctactaaagaaattgtgaaacctaaagcattttatacaatgtgctatgagacaatctatgggagaggtagactttttactatctcttatatgaggtggacaagcatgagctagctcaaccattaaaggaggcccaaggcttacacgttccaagagttttctcttcacacctcaccttgaatagctttcacagttttgagatttcagctactacgtccggtaaatccaaaagtatatttgcagttttaatttgcgttgtttgattcgtctcaaaaaaaaaaaaagaatggcgctgtttgaaaaacagttggctagatcactgaaggaccatgtggattccatgaatcatgaaattcgatcctatgctagctccatatgagaccttcatttagtccttgagcactttgtataacgtcaatatatatgttttatccgatctatccttttgcaccagaaatatgcttttattgtttcagaataaaaccttggccgattcaatttacgtgagatctgaaatgttagaacgaacaagtttcttgcgcagtaacaaatcatagatcctaggagcttcacacattggcataatatgctttcatttaaacataatactagtaatataatactaatctactccgatgaactaccgaatatgtgtatacgtgattaagcatggaattaagtagtattaccttgagttcgtcggctggtttgtagcaggcgaagtcgatgaggtagacgggcctaggcctggacatgatgtagacggagatggtgaaggcgaggacggcgaggaaggcgaggacggtggcgaggtcgtaggtggcctcgccccagaccttgcgccacagctcgtctcggctgaggctgccgacctcggcgccgcagacgagcacgatgaccgggatggtggccaggtacacgccgtggctgatgaggtagtggtacccgagccgcacgtacttgaggttcaccgactggaggaagtccggcagccgccgccgcacccgcaccgagaacgtcggcgacccggcgtccggccccgacggctccacgccgcggttcacgatctccgtcaacagcagcgcctgctccctcgccatggccgcctcctccttcaccttcaccttctgcagtaaatgagaaggcagtgaagtgatgagatgatctcggagactttagatatagggagagcagtgcaggggttgggggaggagatggtggtgggtgggtgggtcgctagatggcagttaatgccatttagagagcaagccaggaaaggtctgcctcaatgcatggtgttcttgcatatacatgcatctgtttgctgtgagcctgtgcaccatgttgtaactgcaagtactggaatcatactgctagcatagcaaattcatggccacagctttggcttaactgatcactgactttgtagcagtaataactactcctacagaacatgtgcaaacaccagcattgtctataaagaaaaaatgtgcatggatatgctgtactctctctgttcttttcagcctattcactgaattattaaaatgaattctttaactccacatttaaaaaaaaagttcactgaaaacaaatattgtattatttagaccacttattttaattcatttgttaaatctattactcaaaacatttgattatccctataatcaaatcgatgatctactcaataatagaatcaaacagagctcaaagattcaactccatatgcttattttgacattaaacccgtttattattgagatgtactacacatgtggaatcaatcctgttactgctacaaagctgtgaatcaataactgtgttgatgggaggaggatgtacatgtacagagtgctgcacctgcactgctgcttggacactgatctggcattcttgatcaactagctggcccttattgattgaccgcgcagtggtagaaggaagaggcggaggagatttcatggagggcctctttattaggtagcggcgaaaacctgttcagctttcatgctgttctctgcttaaaaaaaaaaaactctggtgacttggtgccagtcctgcaactgtaagagtcttagggtgggtttagttcatgctaaaattgaaagtttggttgaaattagaacgatgtgacgaaaaagctgaaagtttatatgtgtaggaaagttttgatgtgatggaaaaattgtaagtttgaagaaaaaatttataactaaacaagggcttaattaaccattcgatgagatcagtgctgcagcaagctgcaaaggaaaaaggatccaaaaatatccccagcacttactgttcggtttagcatgaggcccttttcggttagttctccccaagccaatggacatgcagttcatctgtacgactgtacaatccagaattcgtcatatcatccatccatcggttcaactgctaaccagtaaccaccagctgcgccgatagtagcacttgactgattgaatacacggtccgccatgtgatgttacttcctgctaacacaattcatttcttcaccgggctgctgctttgtttcttcagacttcagagttttgccttgtatagaacacagttttacacatgaatttcctcaaagctggtgagttctagaggaatctgtagtagtaaaattaccataggcaccttgaaggaacttttggttaaaacctcctgagcgtgaaagcaaccctgagagccacttccctgactaaagaagacaaccgtcaataggtcctcaagaagaaaaattccagatacacaatgatctaagcatccaacacgaatacacgatcaagaccttcagctcatatattcgaagcaacagcgacatggattaatctacaagcacatttatttatggtggtgcatatgtgcagttgggagttctaacttaaccatcacccactagagaccggattgatctgcatttcgttacaggtatgtaccacactcttcaagaaacattggtcacgatcagcaggatagcgatcatatagtggcaccaacaatagtcagccaatgggtctttttgggttggtcagatgcatatataacactagtgcgacttgcttatgataacgagaatgatacagacaaaattaatggtttgatcagcaatttctggcaatggccttcaactacttccagcctgctttaaattggcgcagcaaatgttaagccatgatggccgtgctgtcacacagtctctacggagagaagaattgacttgatgatagatcaaaaggctaaggttgcggcattaagcaaaagccaaatgctaagctaagaaaatggtttgaaaaataaatgccaaacctgatatttgttttaatgaaaaagaatactggaccttttggcctgtatgcacgaggatgcagaaactagagatataaaacacttcttcatcatcttgat

SEQ ID NO: 6321 - DNA, 51881 bp, Oryza sativa
cattagctcagctttggaaatgaggccttctagtgaagcctactcaatgggatgtgttgttcttacccttgattgtatgatgtaaattcgagttaagtttgattatttcaacgaaattatttttttaaagaaaacaaaaccatagtaaacaaaaagaacacaggattatgaaacaagtaaaatgtagaggctgtgagggctacctcaaatcctactaattgaagaaaagccacatgagtgactatttggataaagcacacgaaaacagacacaaactatagagagataggcagggggtttttttttcaagacgttaggtattatgttaaattttttcccaaatacctatgtatttactatttcttcgatgaaagggccttagtggaaagctttccatatgattgaatttcttcaaaatttttaaaaccctttgttccaaaggagcccgaggtgtctttattatttattaggaaaagaaaaacactgtaatgacaaaccagtctacctaacctaccccagaaggccaggagagttgcagcctgctgacagctcgccaacaggctccgctccgccatctaggaccttctggaagattctgcggttctgcccatggtgccaaggaaagatatttctttggtttcaaggtcctacttaaatttcaagtggctgtccatgttctcataaatctaatcagacaagttgcaagaggggctctatcaatgcagctcaacctgatacataaacaccaacgcaagctgctttcttctcctggcaaagaaaagaacacttgtgatcactgacaaactgccttctcctttttgcacataattaatcctctcatgtttttggaacatacctctccaaaaaaataaggttatatgccatgtcacagcacatccatatgattaatacagttattattagaaatgggagtgtgtggtttcaattatgagttatcatattcaattcttaacatgtttataatttcttcttaaaaaatgtttggagggatatctcttccttcaaatcttttttttaatacagggctgatttggtttgaggtctaaattaggcttaccaatatttgtcaatttcaatagtgtttagtgtctatttggtttgaagacaaattttggcatgcataagaaaataggccgtttcaatagtgaacttagactattttggcttcaatccaaatataactttaccttaccaaaattagtcatgccaaaatttggcattgacaaaatttggtaaggtctatttagatcacaaaccaaaccaacccacagttattatcaggtaattttgccaaagtgtccaacgcggccgacgcattagctcacgctctgatgaataatttaggtaacaaagccgtcaaaaggtgaggagatccatcatgaggagcacaacgcgaatatgccaggaacactatgcaagagcagggaagaatctgggcatgataagatcgatcgaaagctacacaaaaaaaatggtttttaatccagcgtggtccagcttcctgatggaaatggcgctataaattattatcaggtcaagaacaaaaacatgtacgggaaaggcattgtaaattcggggttggattaaaaagttcagaaaaagaaatagtgggaaatttcggccggccatatcatgaatgaactccaccaagtatacacttgtgtagtgcttgacaaagaagcgatgatgattggtactgcaacgagtcgatctcatgtcagtaattcgtgataaatcacacttgtaagttgtaactgaactaattacagtggatttgtgcaatttactttagttgaaaggtttaaactgttttcagattttcgtagacttgatgagcagcaaattgtagagctacatatatgccgactaaacagtggcttagtacatcgtattattcatatccgacagtttatcaacactcaattgcatgcatgtgcgtgtgatggtgacttctttgattatgagaccaaaccaaacccctcaaacactcactaaaatcacagaatttgattcctcgtgtcggctaagtgacgattttttaaaaacaaaattatggggggagaaatcatggagcgttgattagggatggttttgaggttcattttggagcatgtgaagatcagcatcacgactgggctgattatcgctccatccaaccccaccaaaccttggaagatttggcatctgttccagccaatcagcgaccctggaatcaacatcagacgcccttaaaaaatttcaagttgcaattaatgaacggcgtttccaatccattgcaagcttgatcctcatgtttttataataaaaagggtcattcttgagttcattttcatttcaagcaaaagttgactttgctagtttaaacctctttctgtattcaggctgaagaaatgatagaggaacatggctctggtttcccctgcaggccaacagataagaacaaatcttgcttgaaattgaatcactagtgtaggatatatttttgtattctgtaacttgcctcggttttcagcctttcaggttggttttggtattggtcttttgctttgcttcactgctcaaacacctgcaagttgaattttttgcactaatgatattctgtatggtgaaaaacttattatatatccaacctgcacctaactgtataattgggcaaaggttctactcgtgcgatgtgatgtgaaaaatgtgcaaaatacagcgtaaaagctcgtaaaaggtgagaatatatagctagtgttaagatgctccagctagagcagcttgcttctgagtcacattatgcttgaatttgacagagctccaacaattatgtctcagagtccaaccaaaaccaagaaactgtacaatgtgctcagttcttttatgcttcctatcttagccgaaatggacagaatctttgatctcccaatgctcttgtcatggcaagcataagcataacacaaagatgaaaaaaaaatgtcaaaattggattgagcagcatgaacagagaaaaatggaattcttttttccaccttagctctcaatctctcattgtcctccagaatgttgtttcccattccttcacagttacacaaagctggagaacttgcaggattttgcgtacaaattgagcacgtaattattgcgagctaaatataatcaagctaggaaaattaagcagcaattaaggtagagagattcaaattaaaagagaaagaggctaggactagctatagctagcgccatgggagagcaacagatcttcgatctgtcgtctcaggcgtcatggaactccagcaccaccacggccttggccttctccttcctgccgccctcgccggcgccgcggagcagccgccgcaccgccgcgatgagccgctccgccgcggcgggggacctgcagccgagcgcgcggcagaaggcggcgtgcctcgcgatcgccgcctccacctccaccaccaccgacccgtcgtccccggcgccgcccccggcagcggcgagctcctcccccaccgcctcgccgcacaggccgcacagccaccgcccgccgtaccgcgcccgcacgcccgccgcgtacgtcggcgtgcactcctccctcagcccgcagcacgcgcactccgcccattccacctccaccaccgccgccaccacaacgcccggattaacctcctgcccagccgccgccgccgccgccgccgacatatcccaaaaaaacttccgatcgatccctatatccagcgaaagaagctgcaacccgtagaacacaccaccagatgatcggatcggatataccgccggtgctattcgccggcggcgaggaggagaggtggctcgtccatggatgaggaggaggaggtggtggtggtggttcttgggcaagcgaggcccggttggtgcagcggctggtagtgcgaggcgcgcgcgtcttttgtatgcgacgaggaggaggaggaggaggagcaatgcgtgcgagtgtgggcaacaatggcgggagaggaggtggtggggtggggcccacgagcaaattaatcattgaggttgggattttcatctttgattaatggtttgatgtggtaagcttgacactttggcttttgctgagctggcagtgactcagtgactcgcccagtgagctgccagtgacgtcgacgttgtagtgatggcacgatcttgatcttgcgagctttgtgattgtgtttagctaagcagatcggtttgtggttttaaaacaaccgctaattccacgggtttaagtgagctactactcgtactacttgctagctggaaaagggctcaaaattgtgggctgcagctgcaaggatgttacgaacagcagtattactgttgtaagagtactggagtactatgttgtttcgaactgtttataactgttgtactatcaccaatttgcagcattatcattcgtcatatgatatcgaaattatgcgttctggattttactgcgtgtggtgccatgtcaggggatacaatcatacaagctggcaactgatgccagcaatgcgaacagggtactccagtacagagtcatgcacagcttggacagcttttgcttaaacttgctcttttggacagctcgcttactgctctcattatgcggtcccaacccaaaattttttaccctgccacatcgaacgtttgaataacttcgtgaaatattaaatatagattaaaaaataattaattacacagattacgactaatttgctagacgaatcttttaagcttaattgctctatgatttgacaatgtgatgccacagtaaacattttctaataacggattaattaggtttaataattcatcccgctgtttactgacggattctgtaattagttttttaattattgtccaaacactccatacacatcaaaacgacgctctatataataataatatgacataccaaagctttacggcatgatctgaacaccgtatcgtgctcgtgatgctttctgaagtggagtactctactagcttttggatgcctttgccacgctaaaaaactgcagattacggcgcgtccaatcgaaattcgccaggtaatgtgaaccgcgctatggtcgctttttgtgcgtgtgtgaggtgtccgaagtactaagagctgcaaagtcagtttaactgcttctgtactagcggcaaatttccaatttgccaattcgattgtgtttgtccagaattggttgctaacaatttccggtgactctaccggtcagaaacaatttactggtaattctctgaagtttctgaagtctgaaccatctcttttcggacggggacactttctgttcaggaaagctctgtctcttttttcctggcttcaggacatttacatcaacaaaaacaacttgatccacaatctcgatttttaccgagttttcgcatcccctcctgaattgaatggttctagaacaaaataatgtgatccaatgaagaatagatgcgccagcaatatcttagtgcatccacaatgattatctataagctctctacaagagatctatgtcagtatattttcttatttggaagagattaaatgaagagagagaacaaaactatctactaacctggagatagtctatagagaaaaacgaggcaatgaattagagagctatagatacccatgtagacatactattgagatggtttactattaatctagtttattgctgagatatacatgttttatagagagcaccttactttaccattgcgggtgctcttatgcctaccctttattaagacaggcatgaacagaaggccagccaatagaaatctgagttgccagttgccacacagatgttggcaagctcatacaggtggttctcagcctctgattgttgccaaacccctggttcagaattcagagttcatcagagcctcagaaatggtaaaccttcggagttcagatggacctcaacaaaacaatactaggttgttctgtcgccaaattgttctgtaaattctacacatacttgtcgtaaatttgcgtgctgattgaccatgatgctgcagcaaatctgcaaatgcaagtgtaaccaaagagcgtataggttgttctgtacttttctgataagaaatcgcatctgaaaggagaaggaaataattaaaaaaaaaaacagtttggctgtttgtttgtcctcacctagagagacgcaccgaggaccacaaaatcccatgcaaccaaagaatcattcgccacaaagtattcgctcctccacctcgcaccctcgaacagcgcgcacgatgctaacccgaacacaaaaaaaaaaaatcacaaaagtacaacacctaccatgacatgtgggtcccactacacgtggggccccacggatcagtcgcacggctcacgtacaggccggtacagcgcccccgcgcgggccccagcgcatagacaggtggggcccacggcttccctcacgggacaaacaaacacgccacaggagtcgccatttcacgtgcgggccccacatgtcagccgccgcggggttcggtttggctccagaggtagtacgctttagccggggcgaccgacggccggatgcgcgcgcaggggccgatcggacggccgggaggcgcccgtgggatcctatcgcgtccacgaataatataaggctacgagtcaacacagcgaacaagaagtgatagagagagcgagctaaaaaaaatcgccgcagaaaaggagagaagagaaaaaaaactttgggcgagaggagaggaggaggaggaggaggaagaaggcgcaggtgagatctccgatccttctagaagcttctggaatcgcgcggtccaggtagaattatacacttgagggggctgatgcgtggtggtgcgccgccggagtggtaggtggcggtcggggggagtgggagcttctagaagggcgtgtcgtacgtgtgcgagtgggttgggagtcctctggatttatcggttcgtcgatctcgcgggaggtgagggcgccgatggttctagatcgctgtagatgatttgtcgatgcattgaattgggctttggtgcgcttggtctgcgcgcatgggggtttttgtggattgattttgataagagttgctgaatttagctagtttttgcggttgatttcgttgggctccaagttgccaaatgctgcttacgcatcgctctaggtggtttttcgttggatcaaactggtattttggtggttagattcggggcgtgtgagtggtcaccatttttggactaacgaggtctccccaattcagtaatttatgttcttactgcttagtgttactgttacgttcgattgacttcttcatggaaggactgtacaagctcgatcaatatcgttcggatgtggcttgagtgtgaaaactaatgccttgtgtcttttttagcttagtagtagatgtctctggatgcatgcgttggtggataatagtttgatggggtcatctccgcgttggatagcaattaaggttactgttttttttttggctattcttctgtcagttctgttgattacaacagtttttagctattttgcttgagtcatcgtctgttgacagtgatgacagtaatgtggttctcttgcaacgatgatgaacttataatgggcactctttttctttctcaaagattgttccatgataaaggaaagtacatacttttagctatgccatgcttaaagtcaccagtatttttccatttatcggataccccatgtaacaatgctacaattagttgtcgtgatctatgtttttgggctgaaatgtaagctggaaaccccagtgtgactctttaaaacctgctttcagaaaagcagggccatctggcttatcatctaaaagaaacaatgctacaattagtagcttttgcccatagttggatctcccataagacaatgctttttgctctggtactttttgcattcaaaagtatcaaatggacagacattcagtttatttcgtcttgaatgcatcttgaccgacaagggatgatcagagatggccagcttggcgactgtagtttctgtctgtaggcaactgatttgtttttgcgtcttctcaagtgcaatcctggtgtgtcaacttatttgtgttctgatgtgaacttctaagattaatttgcaggtttccgtctccatttttagctggcagaaaaatgggaaagagtttatttctgtgtgacttggggcttacttttacatgtccaattctctttcttgcattctcttttggtatgtttgacttgcagcttataggatggatattttctttaacttgcaatagactgatagtatgattctgataatcacgtgcagtcttcatggccatatataaatgttcaatatcttgattcttccataccatatgggatttccaatttgtctgatgtattcaccatttatcaacttgaactatgtaataagaactttagagcatatattttgcaccgaatgcaatccaccattcatctagttggataattcaacaggttctatgccaaaccagacttaaaaatgttatggtcctgttttttcttcaatatcattggggataagttgagttccacataaatgtagttgttaggtttctttgaatctttgtttctagcaaaaccatcagctgtttctaggaatctaagactgccttgcacaattctatatgataggaataggaagaatatctccagcaagactttcatctgcttatcatcagtatgtccatcgaagagagaacattaagtttgataaacaagaccactgcgttaaatccaaatgcacaagaatttgtaccttcatccctcagatctatcaatgatgtttcaaatagatcagacacatccaggatttctgtatcaggatcctccaaagacactattgcagatcaacaagatcctgttataccaagtaaccctgatgaagaagcacatcggtactggcaagaacagcttccagatgatattacccctgatttcaaagttctgggacaagatgagatgcctggacctgataatatttcactcactggcttgtcaataaatgatagcattggtgcttcactattttctccaaaccagacatcgaatttgcaacaccgtgcttctccttttattagggacactctgagcacacgatcaaagatcgagtttcctagcccaacttatgtagaagaacagtcaagagctactattatgagtccaactgcaagcgctatgagtccaactgcggctccgtgggtaaaaacagtaagaaatggtgtgcaatacaatgcaaacagaagggatgccagccattacaatggagattctagcattggtatagtgttgatttcatgggtgtaattttattcactgaaggtagtagtatgaaccctaacctttagaattttcaggagctccagtgcaaaaccttactgatgcatacttcggaagcaggcgcagctttagctcaactatggatatcatgagtcagctggaggtctgtttttcttctgatattcatctcaattttaaatctaccaattttttctctctccaactgtgccttggggcttggacagttgaactacatatgaatcataactggcatgctcatcatatattacagaaaatttcataacaagcaaaatgcttcatagttcttttgttttttttttaaaaaaaaaccatcaaactactttcactatatggttttacatcaactccagacaagttgtaacctgagcaaagatgtctgacaaaacaatactttgaacatttggcaatagtccttgattgaatgaatgctagactattgagtggatcttgcttcctgtcacccaattcatacaagtatacagcattataacactttttagttccagattattaacattgtagtatgatactgatctataaataatgagaccccatttaatgatccaccgatatgtttttcttcaatcaactgaagtttgcacgttcaatactgaatattccatgtcatttttggcatctgggctgtattattgtttttttactctttataatcaggaacatatgttcagtttgatttttaaactggtggcactctgtaatgacctcatgtgtttgtccgagacttaatgaatgaaatagatatttgaaatttgtgactttgaagtatatttgtttgagtcaatctgatgttaatataaggaaaagcttggtggacttctagtgactgaaaactatttgaacccactgattctcctaatctacaacctattaattatttcttctcataaaagtcactcaggcaactgatttagaacattatattgttgttggacagcttaaactgtccatgctaattatgattctactggggctgtttactttcttgccaaaattaaccctaccaaattttggcaaagcaaggtaacaattcaacattgacataaattgcctcaactaccaaagttggtaattctagaatcttcctcacaaaaacttggcaaaggtagcaaaccaaatacaacttttacacatctcaaccaatttggtaaggttgattttgagattgaagtgaacagccctgaaatggcattatgttctcaaaattatcacttgcattcaactttgaatacgactatagtctagaaactaggtgggattctatatgtagatgactatgatgagcgaggattatttcttgagcccattcattatagaaactgatataacaacaatgccactgttggttctctgttttagataccacatagaagtggttgaatcatcaacatagtgtccgagacttaatcagtctcattcattctggatcagattagtctcttagcgaaactcccctacttttttactataagttcaagaaatatttgcttggaaataccatgtcgcggccatgtctgttgacgattttcttccatttggccatgcttgatgggaatgactaagatatgattacatgcatgatgtctgcttcaagcatttatttaatattatcatatgttcattagcagaataaagttgatggacgattcaatcagaatctgaggtcactgtcgtttggacattcaagtcctccatcaccagcatcatatggtcaaaatggtcttgcaaactataacaaagaagcttttggtctggcaaacaatacatatagatcccactcagctgtactcgcagatgatatactttccccttcagctggtcgggaacatatttctctggatgctcctagggggaggtacaatacaactaatttgcctgtttctggtcttggttcaagcagaggctctcagttcatggcaagctcattcaatggcaatcatgacatagtctcaaacaacaccctgcaaaatatagctggagttcaaacaggacctgcttggcttgaagctgatactgcaggtagtgttgaattataatgcatgttttttcatggacctatcacagcatacatgcctatttaccttatggttgaacttgtctgtgatgacagcaaacatgtttttggaatcaaaggatgaagctcatgattttgcaagcctacggcatgcgcttctggaacaggtgcatatgctctacttttcgatactaaattattgttacatattttaaaaccaaattattgtgcatgtgagcatgttgttaaataaatattgacagtattattattctattttaatgggactaaggttgtaagtatcgacaatattagtaatcatcaagccctaaaaagttgtaattgagttacatggttggtaacataaaaatactagcaagaaaactacttcatatcttgtcaatgtgacaaaaaagtgctctgtatcaaatatttcacagaatgagttcttttggtgatgtggtaggcttatatgttatatgactagttttcaaatccaatttggtatgacttttttttttttttggggggggggtgatggtggcacaagattattcattggattttattgacaatacatgaatattagatatggttttggaattgttgtttatagtactcaaatattatgcctcaggaagataccttgaattatgtaaacaacttactttttcttggttcttttaatgtattcgctcacagtccgctgctatgcattcaaacttttgacaggataggcaggttcttttaactggtgccaatcctttagcaaaggaactaaacatcaaggagctttacaatttgcaaagcagactagctcaggaaaaggctagagatgtatatcgccaaaggttagacgctaatctcattgacatcatcacctattaatagaattatcgtttatataaattcttactccctccattccacaaacctaggactggatatgacatatcttagttcagattcattgtactaggatatgtcacatccagtcctaggtttgttttttgtgggatggagggagtatatgttgatataatgtgtatcatgagacatcaacacacctgctcatgaaaatgattctgattgcatttgtcaatccttttcaatgagagaatttaaaacaatgcatacacttgcattttttgccttgttgagaacttgtattactatttggactttcgaataacactaggacatgaaaattacctagataatgtcataacaggtcgtacaggtagcatgaattcaggttactactaagaggtttttaattctgattcaacaataactagccaggcctttgcactactagtgtaatatattatttccttttgaactactaaggtaggtttgcataccgagcaagttgcttgagtttgcaagcgtgcactccttgtctgaatacggtgtagtagttcctacaacatgctctatctgtttaagattctatctttctgtttcttaccatatgatgaaagttctaatccattccatggctttaccagatttcaaatgccagaatttcaaggcctggttcaggagcaaaataccccaattgacctgtgtggtcttcacgtaagcgaggcgatacacgccctgaactatgagctcaacaaccggcggaagattgctcgatccacaggccgtcgtctccaggtgatcataatatcaagcacacgtactccggcgaggctgaccgccgccgtcgagcagtacctcctggagcacggcattcagtatacgcaggcacagccgggccttttccgtgtcctgttacagtgaagtaacaggatggtaggctcatcatgtttgtgtacacctttgaaagaagaagaaaaaaaagaggaggaacaaaaaagaattgacccctgtactactgtatatggcagagatgagtagtactagcagaatagaaatttgaaatagctgttgtaatattcgtatagcaaggcttttttttttgtcagcaaaaaacgttgtaaaatttgcggaattaggcgatatgttctttcaatgtggcgtccctagctgctcgttccaatctaacacgcatgcgatgcaggatgctatttggactggaatcagctgatttgcgtgcagatttgcgaaagtaatacatgacgcgacacaccatgattgaatcttcgtttaaaatcaaaatggttgacaactttctttgcaagatttttctttttagtgcgtatagcactgttcaaccggttcgtgcatttcttttttgttgctagcaactttagcaaagatgagaaagggcaaaatggcgaatagctcaaggtcgcaacaaatgcaagcagcatacaagtaaatcgtagtaaattcaaccacaacgatagaggatgatccaacaagtaaagctgatgactgttttttggagttacatgaaatggttcactgaatgtttcttggctgaacatgaaataaaatgacactgctgaaagactagagtgcagtgtgaagcagtaacatgtccaacttcattgtagctcagtcgcgctcacttatggctgttaggtgctgatcgatctcctctgtcgtgagtgctctgaaaacacgatcatctttcctcacaacaccgacctgccaaacgatagtttatctgataagcacagcgaagcagaactaaaaaaactttcagaaaagacttgcgtataaacaacagcatacctcaatctcggtggccttgaaatcttcctgaagaactgattgcaatgcagaaattgcaatctgggatcataggacaaaattagcaaataataatccagtaagaacaaaagtaaatgactggaaaaagacctcgcaatgtttacctggacagtttcctcgtaggagaactgtgggtcatccttcattttcttctccagaaaatttattgcttcctgctccttaagaccggcgctagttgcctgagaatagaataccaggtgttaaaggaaacaaatttctaatcgtccaacaaaagacagaaggctcaacattcgttcagctgataagtgaactacagaatgaaaaaggaaatatagtttaacactctaatgaagcatacagaaactgtgtataccttatgtccaaagaagtgacctgccgggtcacatttgaatagttgagcgtttttctcttcgtcatagcccaagaccatagcaactgtggaatataccaaaagaaaatgaatatggagggcaaataagatccaagctgattggtttaacattaactatagaacagaagccaatggaacaataggtcacttgatgatacgaacctactccaaggggcctcatgtaggcatgctgcgtgtagacttgtgctttgtctgctatcctgaaacataaaccagaaaagttagctatcactttgttataagaaatgcaaagatcatatattcaaccacaaccctattttcacaaatagagaacttaaggatgagacatgataccattttgctaatacgtctacgggcatctcgtagccccatttgaaacggaattcagctgcctcattccttgcttggtagactaaggaccttgcatcagctgaaaaacagaaaaaggaaaacaaagtttatgatcaatgaagaatgaaggtattcaggaaaaacaaaataagaaaatatggtctcaatgccaaattatcactagcagaacaaattatgtggaacctaatgctacaacatatatactactagaaagcaagagccttcataaggaaactgatggcaaatatgaaagagcttaattaatatggtatgcttgcatttgatccaaattttgtggtgttttcgcagtccccaaaagaaaaagggcagtgctttctaccattgccctaagagttaaaacaaacagagctaaacatactgatataccatccagtgcctcatgtacaacccaaaacaaccaggagaaccatgccctatataaagctctagcatcatcgcaaaattaaccggcaaaatcactgtgggtggtctatttccacagcatctatctcaaaattgatatctggaataacttaatcttaaacctaagacacacacaaaaaaaaaacaactttttcttcatcatcaacacgcacaaaaacataacactagttatatacagtgaagcaaagctgcagagcaaacaaacctgtgaggccagtggcgagcagaccgatgtacttggtgatcgggaacaagtgcgtgacgctcgtatggtccagcaacttgtcctgcaaaatcagaatcacatcacaaggagcaagacaaatcagtctcctctcctggtctctaatcgccgtataaacagcataaagccgcgatctttttagatcgaagcgaagagaactcaccggcactttcttctgtgtgacgacgcagacggagtccttgccgcggacgccgatcgacgtcacccccgccgacttcaccgccttgaacgcgtactctgcacaacaccaaaacaccagatcaaaccagatcagatcagcctcccaacatcacaaaaaaagcagatctaacctcgagcggggaaaaacgagggcgggcgaggctagggttttagtaaggggggagaccacgcaccgacttggtagaggcggccctccggggagaagatggtgatgtggcggtcgtagccggcgcccgtgccgcggctcatcgtcgccggatttctcgccgccgcgggtggggtttcgcgttcgctttgctccgagagaatacggcgaggcttgtgtttgtgcttggttggggaggcaaaataaaccaaaaatagaaaatagacgcacgcgacggcggcttcttcttattgcgcaagaagaagagtggagggggtccgggtcggagtctcgctgcagtttcggtcgagccggactcgagggtccgactcgggctatgggagtgggacggggggttgtggccgcatcgcagtgctggtcgcttcatagccgtcagatcatgcgaagtcaatctcctaatagcctgtgtagtttgcgaaaacgtcggatgtttgaccggatgttggaaggtattttcgaacacgaataaaaaaaactaatttcataacttgcctggaaaccacgagacgaatcttttgagcctaattaatccatcattagcacaggtgggttacggtagcacttatggctaatcatggactaattaggctcaaaagattcgtctcgcgatttcccccttaaccgtgcaattagtttttcattttatctatactagaaaaaaaatgcccgtgcgttgcaacgggtaattaaagacgtttttatcactgtgcattatacttcttcgttggttctgggccgaaaatccatccctttcttccttttcagttttagctctggttgttgtctctttccgctcggccagcctctctttggcctagcttataagtgtagctgtaaacccagctcgcacaatcaaatgcaatcttcaacctccgaaagacggtatcatgcctatagatgccgaaggcatcctacccatcaaatacagccgagtctttgtcgacctcccaaacttggctcacacaatcaaatgtgatctttaaccttcgtaagatggcctgtactccacattctggagccatcagaattgattgagggttttaaaacagcttggaaaactcgttggccagccatcatcagtaattgttaaatggagactaaatctgacgaattaaagcctacttggaactgaaaatcatggcaaaaatgataaggcagaaggggaaaaaggcatattgacgtggtggggcagattgatgtgggactatgctagggttctgccagatgacaaaaaaaaataaaccaggtggataaaagctcggaagccttacacatgcgcaatagaaaaaccgtggcagaaaagatatccaaattgacaaaaaaaaagcaacgatggaaaaaaaggaaaaaaacggatctaagatattcggattgaaaaaaaaaagaaaaaaaacgtgtgcaacaggcgatggaaaaaacggatctaaaagtcacgaccaaaaaagatcgggcggaaaaaaaccggagaaaaaaaccacgtgtgaaaaaaaaattggacggaacgcgcgagggagaaaaatcaggcgagtgacgtacgaaattttctggacaaaaacatcttaaacttttataataggtaaagatttaatactccatgcatttgtccaaatattcgatatgatatttttgagaaaaaaaatttaggaactaagcaaggcctaatatttgacatatttttcttcgttggagtggataatctggcctttgcttcggtttttgtttgaggaggggggggggtgtaggttaattagcgtctcaagcttgtcaggcataattgttatgttgttacatttcctatgggatgttattttgttttcagtagcaggatcagacgtatatgtggggtgtagtatttttttccataaatatagtttcccaggtcttgtattttttttctgctatataaataaaaatatcatactatcttgtatgggttgtttaaaaaaatacagttgatactttttgagttttttatattaactttaaagccgctggtaatataaatacaaaagttttattcatgaattatatttggttgcttcgtttattactctgtcacagaatataaagactttttttagagttgctcctttattagttttttttttgggctcattatctgtagctcaaacagtcaaagccacacataagaacaacggtggagttagaaatctaaatatttatttactaaggggagtcagtacttgatggtactaattatgtttaaaattcaatcaagatatagttattgtcattgaaaatctaaaatcatgtgggaggccttcgctgactcgagaagttgagatgattaatcctcaaaaaatcaccaataaatctacataacgccagttcggtcaggattttgcacatcctcgggaattggcagtaatttgaaccatcccaaacaagatctagggctcctttaaggcaaaggaaaactagagaaactagccgggacccgcgcgttgccgcgggtgaaatggtgggcataagagcaaagtattgacatctcatgtagctcctcagagctctacctaattatgtcaagtattagcattaccgttacagtcaaccacaaaatcgaagagtacctcagtaatagaacagttaaatcgaagagtgtacttcagtaatagaactggcttcttttgcccaaaaagtactgcaaggtatacatgctttagctatgttattattgctgaaacatctttgcttgtcacaccaccggttactaatcagtttatatgtcacaccgctttgattgctcctttgggaaaaccagtttgccaagtgctaatttacacctaaagtttagtatctactacgtatgttctaagattaatattttacacttagattggtatctatgtgttaagtgttaacggtgtcaacactatgatatgctctagtttacaactaaagattagcgcctatgtaaattaccagaaggctatatatcaagctatatgaatctgaagcaccacataacaaagacatatgccattaattttgtcaaatgttgctggaatatatggtccagtagaaatagaacaataagttagataatggagatatgtttcactggactaacagttatccgatgcattttgagctttaaagagaatataagatggatggtattagtagtttactaacaaattgtgcttctatcatcttgtttcggcgcaaaaggaacagtacatgcagttggctacaatgagggcatgatgtgacaaacagttaatttgaggttccaaatatgaagatatcgatagttcagaaataattataagtatgtgctagaagagatcatgaacatgatatatgctattcttgccaaattcctatgcttcatctttcatagagctgcagagaccaaggcagtttgctcaaaagtaaaataaataatttaagatgcacaaggtttgtagatcaaacctttagtttttaaactgtattacaccaacagtgacaattaatccctatacacagatatgtacagttgtacactccgatatagagagatggggaagcaagttggttgaactgcacatatggttgtgttcttaacaaaacctagctataagaatgcatcatttcaactgcataaaggaggaagatgcacgtatctttttaattcaatgttgttgcccagttgacatattaacctgaaaaaaaaaactgaaataggaatcccacacccatggtaccatttgtttgacccatccaaacacatggacctgcttaccatgcataagaatgctgaggacaataaaaatgtatgcattatagaatcctaacatatatagcattagctggtagcctggtacctccaacaacctagctcttttgagtcaaataagtttccttcttcatgctaaatcagtacatctcatgacatgacattttattaaccattcgatattcaatattgagatttgtaggtagtttttttaaaaaaataacataaccgagtaatttccagatatctcaatgtaacttagcacataatataagaaatattaaataagtggagataaccatcttgtacatggattgaaatacctgattataaattatagcttgttttactaacttgctgcagccatacatcaagaaatcaaatagtagtacattgcaaactctgagaaatcaccatgtgggtgctcaccggcactgagatggtcctggctcatgccacgctttatggtagaatttggttgaagatagcaaacccaatgctgggaggtactgttggcgatgccggattcaggactaatgaattaagttaggaatgatgaccaaatcaatgaagaacaggttacttaagccccatctatcagccattgctattaattccattgaacaactgtgcaaaaaaaaaaagaggccatttttggttcacgaagatccaaataaatcaactaagtatttaggtataaaaagtatacggtacaactacaacagttacaacctatgctcaacatccaagttgttatttgcttgccatagtggtactgcaagccctgaaagccacaggatggtcaactcatgccaaaaacatgctgaaagctgaaaaatttgcagaatgacaacatagaaaagaaggatatcactatacatgagaatttgtagaacaattctatggttaagagtttttcatgtaggtccaattacagcaagtattcaaaaagacaaagtcataggcaaaatttagagcaaaccttgtggtggcataactttatattttgcatgtcccattagtatttcatcactggccaagtttactctcgcaaaatttactccaaggtttagtaatatgcagcctgttactacccaatagtaacttgcaaaagacataccaactattgggcattgagcacgaaagtaagaaagaaatataggaaccccattgcaacgaattcagatcctctgcaacaggcagtcttggatgatattgcacttctgcagaagaggaacaactaaataaaaaataatgtacagagaagattgcatgtaaatttaataataataacaatttggtgatttcctattttcatggcccacacaagaactgaatagtagctcctgaaaatattttgtagaaggaaaaaaataacctgtgcacgaaaggtcatgataggcatccatgcttaactatctgttctttatttgagaagttgtcaaccatctgtcctaaaagtgtggtggttggaaatgtatggatggcagcccatagtcaatgaacgatgtttttaatatcctgcagtggttcactgcgcaatattgtcaatataactatagaagaatcaacttggatgtccctagatgaaattgtgaacatgagatccaaatcctcctaagcaaataaaagattgaaactgatagcaagaaagaaggggaagcacctaagagaattcatcaggagcagctgacgagatcatgggacctgcatgaagacctatcaatcaaatcaggaaaattggacacgaactggaacaaagaatcattaaatctataacctctcattgagaactgacgcgacgaaaagacggcggcaacggcgctggcctgtgcttccccgagaagcggcagtgccgaccagctctgcgaggaggcggcacaagccgttggctccgcctgaaggcagcggtggccggcttcggaagaggagggcggcggccggttgtggcgcttgcccgatggctccgtgagaaagcagccagcgccggctagatctgtcgcggcgctggtccttcgctcgctcgacaagaacctggcggcaccagcgagggcggcgaagccagcgccgtgatttccctcgctccgcaagaacgcagcggcgccggctagggcggcgaaccaggggaggatttggggatgagaaaaggaatcagggaggatgattcacgaattaacttgagaacctgggtaaggggacagagaggtagatcaggatagcggtggtggcgccatgcttcgtagccaccacagtcgccgaggtccggcggcgacgggccgaaggaatcaatccgcaaaaggcggcgacggcggtgacggtcgggcgtcgcgggaggaagatggcgcggcggtgacagccgggcgccgcgggaggaagacggcgccagccgagcatcgcaggaggaagacagcgctgcggcatggtgggaggaagacagcgcggcggcggcgccgagaagacgaggatttggggatttttggcaaggaggcggcgaggatgtctaggcggtggctggtgtggtgattgagtggactgaggggatggagggatgagcgatgaccatgtggacggctggatggaatcaccagttggacatctgacggcgcatgcatggcgagggactgtagtactgtagcagcatttctctggcctgagatgaatcgcaacactgttgctagtgggtcacgaaaactaaagatttgatatgatatgatttgggaggattaaatttgtatggcaaaaaaaaaatcctatatggttctttggaacaaaggaatggttcttctcaattcctttaaaattcttatggaacgggccatttcgagctcttttgaaatccaaaagtccatagaagtgctggaggaagagtagcatgcatttctgtcccatgttttttttcttcccgtgacataaagttctagtatttttttcctgtgttatccaaacggcaatttttaaaatttcccaaggtttttaattcctgtaggaattgaataggcatggcactttattgctatgcttttcctcttactgcgtttccacaatcctgtgttccaaaagagccctagtcatcctttggaatggaacaatgctggaggatttctcaaaaattgaactagtttccgcggaaatcctgcaaaattcttccaaaaggagaccctaagctgtactgtttagtgatactcaaacaaattctgcagttctctatgtcatagttgtcttcttttttttttgaagaacatttttactaccatcaaaacaaacacttatagtagaaatggcaagagtcacaaggcagagtgatccaagcaaattgtccgagttgaaatgactcgtgtacgatctctcactctcctgaagtcctgattgttagaagtataatatgttagttagatataagagtcaaatacaaatatagagataagatatatcctagagataaaattctagagataagatagagtcctagagatagaatcctagagataaatctactcttacttgtattgtactccaagtctctatcctctatgtactcctatatatatcccatgagagggtcgatccaatatatcagaaaacatcagaatacaacatattagattttctacatggtatcagagccatatactagcgtcaaccgatcctttgatacaatccatccatccttcggcgctgccccagggagacgagatgaatctgtaagctctccctggggcaacacaagctagctagcctctcctgtatcatctacagattagattagccaaagatcattagatgtgttttccattaattatcattagattaggggaatgttaaaagtataatatgttagttagagataagagtcaaatacaaatatagagataagatatatcctagagatagagtcctagagataagatagagtactagagatagaatcctagagataaatctactcttacttgtattgtactccaaagtctctatcccctatgtactcctatatataccccatgagagagtcgatgtaatagattagaaaacaacaaaatacaacagtttagatttttccacatggtatcagagccaaagaccaacgttgcttgatccgtttctaccttccgctcgcgccgccccggggagatgagataatcgccatatcctccctggggcgccacatctacaatcctcgggagaagagaaggagcggaagccacgccagtatgaacaggagaaaaaggaagcaatgcatgaatcaatcccatctagcagatcaagaaagaacaaaaggaggaaaaggagatcggtccaagcaatcatgccgtacgatggaaaatcaatctcgccgaagcatgctctgacagattaatctgcaagacgcttcatcaacgatatcgaccgcgtcctctacgacggcaacgaccgcgacaccgacgacggcatcgatcacgtcatctacgacgacaacgactgcatcaatccagcatcaccattgtgatgaccgctacacggcgcagaaggaccaaccaaagtggtggcctcatcgccaacgacatcctctgatatatgcaagacgtccccaacggcatcatctgacatctacaagatgcaagatgctaacaattgcagtttttgtcttcacaccatggcgtaaatattttttttcgccttcggctatttgcggctacatcaactaccacgaccacggctacttcatgatcggctacatcgacgaacatctacaacaaaaatcattgatggaaactccagtcaaaagcgtccgtgtcatcgctatcatccatgacactcccgctatgactgcgggagggaatagaggagagtcaagggacgacacagaaggggacgcaggcaccaggtggaggaacgaccatcagagatgcaatcgatgatgatgactcaaagagatgaagaaatagaagatttcaaatccagtcgcaatcgttagctttgctcccgttacgactgagggggaatgttagaagtataatatgttagttagagataagagtcaaatacaaatatagagataagatatatcctagagataagatagagtcctagagatagaatcctagactccaagtctctatcccctatgtactcctatatataccccatgagagggtcgatccaatatatcagaaaacatcagaatacaacatattagattttccacactgatcgccgaaaaaagtacacaagaactcccactatcctgcttacttgcttcctgatttgagtatgaaaccgtcaatttcagaacacagcaaacacatgatatggcaacaaacacttgaaaatttatgtggctaagtttgtcacacggcaatgcttcttggaagcaccatactgcgatctatcttaatgtttcttttctcggctctcggtgcaatttccccctctagtactgactttcccttttcatctcagctgcaatcaagaattttgttcatcggtactgggtcctgcttccaatcaagctcaactgggaatgtgtacagctcaagatatataaaattgcatcctagtttgctggacatggcagtggccatgagcctatcctaagataagatatcaaccaaatctcctgagtaatttggtcacatggaatatctgttcatctctcctcaactaggccagatccctatttggaatgttaaggagtaccaagctgccattcatctttgagctctgcatttctgccataattcctgtgagatgtgacagtaatcaccttgacactgtagtagtcagagagaaattcttcattctccaatcctgcatacgcatgcttctgtaaagttgcaacaagatcagagtttacccctatatatagtgaacttggagtcttggatcatcatccatcttcttcttcccattgagtccattcatccacatttttcttctgaactcgcacacaagaggtcacgagaactgctcatgagggtacacactcgattctctggttcttctgaacttttttacatcgaatgacaaatgctaattcagcaatcgttgctgctgctggttctacttcggtttcaggctctgaactgggtgcagacaaggctccacgggacgaggaaacaagatcacactgcagtgtcatctcgacgtaagtgacgatggttttttttttctcctttcagaattcccagcgtttcagagtttcagtcacgtaattgttgctgaatctttgatctcttgcaggcgctcatacctccggtgatctccaccggaacggcgacgagctcgacgacggctgggcggcggcgatgctgtccataggcacgttagggggaccgaagggccgtcatggttctggcacgccgtggacgacggcggcggcgggcgccgacgagctcgacaggctgcaggaggagctcaggctgctggttcgagctcaggcggtggtgaccggaggcgaggacgacgacggcggcggcggcggcggcaggcaacgcaggtcactgagccgcacgtcgagctccacgaatggcagagaggtggtggccaagctgaagcagagatcgatcaggaagatcatggccgctgctctcggtggcctcctgcaccggccgagctgcagggagacgatgcctgaagcgactgtcagtgaggtagtaggagtaggactactccaatataaagagcatatttgttcattcgattttcagaaatcagaaggaaattcgtattggttcttgtgatttcatgctgatatgtttcgcagattatatggtcattgttgcacaagaacacgcatcctgaaaaaccggcgttgccacatactgtgatgaaaggtgatccaacggttccgacgccacagaaggataaacaagagggcaccaaatggatcagaacagattcagagtgtaagttcatgttcgtctgacagaaaatgagaatagtatattgtagcggttcttgcaggctaacatatatagaatctgatgttttacatccttgaattcattccccagacattgtgttggatctggagatatagacacccccggtggcagtaaagaggcaacaagaacaatttcctggatttttttttcttttcttgagagaggagactagcgtttcttttttgtacgaccgtacttcagtacatgtacatgtctgtttacaaaacgtgttgtcaacttctattacaaaaaagggtttcccttttgcttaccaaataaaatatcaaaggagattcgagtcaggtcctatatcaaactaaagggtcagttctagttgtcatacatcctgccttggtgtaagcaaacaaaaatatgatatggtctctccccaaccttcaaatgtacatatgccatatgctcactcaagtgcacagtgcgcctataatctctggaatgaacagatgttcaagcaagctgtaacaaatacatgatttgcctacctgtcgaatgttatcatgcatttcaacctatgacctgcaatttgagaaagggaaggtaaggcttataatctatggaatgctgtcatgcatttcaacctatgacctgcaactgcaaatttccttacgaaagaaattggtaaggcatactcaggtgactgtaatgaccatatttagtcatttaggttcaagatccgacctggttcaccaaggggagtgcataacgttcccattctgtcgaccatttggaagatgacccagtattcaaggcaccaaccttgagggatttcaagtcatcgcattcttccggaaaccccttaaagagcatctgcatggatttgcgattgcaacaattaaaatctagacacagcactttcaacaagtatttaaaaaaaagatatgaacataaaatatggaaataaataattaaaagtgatcatcaccataagttcatcggcaagctcagaagatgttgaaaaaagaagtccattattatttatttttacaagctcatcaatgctgcacatacgaaaaaaaaattaggacatacttttaattcaaacgacatgaaggtcaaagcccaaatgtaacaaatcaaacatacgggaaacatggattaccaggagaatgaagcagcacaaactggtaatccacaaccgaacatatcaaccacctaaaagcaaaatcgtcaagttacacgcaacagataaaaaatgcctattttttcaacagagcggatgcttatgagttataccttcataggtaggtctagccctgaagaggaagtatgcaatgatacacctagatcagccgatcctgtaattattcaaagaatcagcatttatgctacaacatggaattcttttggcaatcaactagtttaccaagcaaaagagggtagtcctctgatgcaagccacatagtccggaaggcaacacgcctcagtttcaacctctttatttgctcctcatacttcatcctatcaggtcctttgccttcaaaattgatattcatggatatcataacaatactcaaaaactggttactggagctaattagcagaatgcacaaaccagtgataatgaatagcagtcttgggtagacaaattgcttcccgttcttgatatcaatccaaagctttccctcgtccattgaatcatcttctcctaaagttgcagcaacacgtctatcgtacataagtgctgcttccagaagtatgctgaaatcttcatctggtgtcctgaaatatgtggcaaaggaaaagattcttaattttactttcattttaaccacatgtgctgagtataaataatgatacaactaggatcacccagatcaagagaacagaccagcttgtgctgctgacaacaagagctggtctattaggcttcaagaaaatttcaccatcgacccagcttgtaaatacagtagtgttcctgtcttccacttctttctctgtgttgtaagagcaaacagtagaaactatatcaaagtgaaattttcttacagcaatcaaatatttagagtggctggagaacataccaacagaaatgcaatcgtcattgcccatagcactacaaatggaattccccaacctgctaaacaactatttcatctaatggtcagataggcagtacagcaaagatgaggaaataaatgaaaacagatgctcacctcatgtttctctgtcaatgaagcaggatggaaaaattcaggagattgatcgtaaagaactgttgcgctgaaatccaaccagttaagttaatataaactgtagctagcgacttcaaaaataaaagtagttgtgtgctaacacaacagccttaaacatgaaaagtgcctgaaagtttgatcttacttgattccccatttttgatcaagctcgtgtttcattgcttttgtaacacagaaggcaccatcagccatccgtccaaaatgcttctcgaacctagaatgcaaagaacacaccactatattaacacacacaatcagtatgctacatctagcagataaacaaacaggacaggaattaccagaagtagattttaacaatgatatggcttctgccatgagacaacccaagcagtgtatatccaaagttatgccagtccacaataaacttagcacctcttagccagctagccagttttacagcagccaatgttggaacagagggtggattctgttggacagaagatgatcgaataaaagaatcagttccatgctagtgtgtgagattttcgaattaacaaataaattgtaagtatcaaatagaaggatttctaggtaataaaagtctatgtcagttagtaaggccaaaagatactatacaaaatgacaaaacttcgcctaagtaaaggctgcacttatcatagctgaaattttgaattgaaaatggtgtaatgaataggtactgcataagtataagtctacagcatgacttgctaattaagctgtgcaatactttggtaagaccatggatttactagcgtgattgatagatgatgaactatagaagaattccacactattgactgatagtaattgcagaaaactataaattgtccatgtaattctgaaccatgcatgcgactaaagaagctcaatgcaattttgtgaaaactgacctgaacaatgaagacatcagggcgaggaatcttgaaacaaaggtaccaaatcaatatgataaactggatggcagctttaagtagcagtgtcagggcaccggatatctttaatattcctgttaactgcactgatttctagaaggtacaattcaaaagttaatagtacacaaaattagagaacagcgtaatgctttcaaacaatcagtaccatttcatggatgtgaattgatggattttctctcaataatagatgcgggtcacttcctgctcatttacccaaagcagaacataggtcaaatttcaacaaaagacgcaacagaaggtcgaaagttgttggaaactcagcctgtatgatgtgcactaagtggaaggtataaatgaataaaatccaaaagtacaatgaaactgcaaaaagaataatacctccatttgcaacaatgtccacttccataccagcctgtcaagaaaaataaagaatgactaattaactaaaacatagagacatatgcacatagagttggttcttcccaacacatagcatgtcccaatatcacaatttttttgccacttgaagaaaatatatatgcttagtaaatgcaaggcaattttcttctcttcatttcaaaacctgtcttatctaacaggactaatatttgcacgtgtaatcacactttcagggagaaaaaaaagacacatttttaagggagaaccaaaaatcaagggcattaatcaacccgaagctatgtccgctcacgctttcagggggtgcaaatgaccaccactgcattagttacttcatctgtgcaatcgcacaactgacacacaccacatctcctttctttactagttattaccctgctatctaaccgaggaccatatgctacactagagaagtgatgaattaagtgcaaaattcatgaaggaatattaactatcacagcacatcgaaatacacctacagctagctggagggactaagctttcccaatcaaaacaaaacagaactaatatgagatgatgggtttgggaaggggatcaatacctggttggcgagggagagggagtggtactgcatgcgcgggctgcgcccaatgtctcccagaactaccaccgccgctcgcttcctcctccctgcctctagtgccacggccattgcctactagccttccgagtttggaaatttcagattcaaccgccaccaagaagtgaggttcctgaaaaggcatttaatttagctaggtattagctccaaacatccaggaagggaggagtagataaaaaatggacaacggttctcttggttatttttctgttcaccgcatttatgctcaattagagaatacgtctgtactattttacatcaatacaacaatgttctgttgacggaacaagaatgtagggatgcaatatatgctagtgagtttatactcatgtaaattaattcgttgtttcgcatattgttgaacgcaactggagattcattagtttgtacgaatgattggcaaccaacactcggatagtatcggtactgtgtattccacagttctacaagtagcaaaggggactagtcctaatcatcagcaatcgcttaggaacatacatgaatttcattgtcctaaagtcaagtcaggttgttctgacattgatctggaatgggcaaaatcgagcggaagaggggcgagtttctagggttggggtgggtgggcatacctgctccgccgccgcacttcgggtgcgtgggggagagcggcgccgcctgcttccccacccgtgcgctggatccgatcgccgtgcgaggggagggggatacagggggggacgccggacgacgggacgattcctccggctgcctccgacgggcgacggctcgtcttcttgctcctccccgaggagtccaaccaccgcgactctcgtccttgtttggcaggccagaattccggcccattcattgtaagtgggctgggattttaactaaaggaaatcccgtcctatatatgcacgtggacgggctgggattgaggcccattcagaaatggcctttgctgtatttttacttttttagtcaacatggatggtctggcgtcctggcgatatcatcagaactttgtcgcattctttgcactgtaactccctgacgaacacaccttccatccatgggaagtacttgggatttgggaacaggcgaacgctggcagcagtctgaccttggggcaacgggttgcacagcagataactgtgcagaatctcatgtaatcgtggctatgtgacgggctgtgatcgccagagtttttatcacgcttattgtattgtttccgcaaccgctagcagtagatgcggcagccagttgtctggccggctacccaacgcttcaagccgaagacggtggcctgaacctccctcggggaccgatggcagccggaagatggcaggaaatacgacgacgagacgcatctcgtgcccgcgatcaattggatgccggaacgcgtgttcgcgaccacagctgggtctctccaagtccacgggaaccatggggggctagcttatagctctcgagtcacgagtccagactcgatcatccacaaccgagtatggaatagtaggtagcagagctgtccagaaaaacgggagcacatgaacgtcgacgcctcctgtttgggcctcacaagtcgcgtcacgttcgttgggctctcaggtttttggtaagacgggacaaacgttccgcgagacacacagctaggtacacacgtactacgtacgtagcgtcgtcacacgcagcacggctcctatttatgtacgtaccagccgcacggccgtacaatacggatcacaggatgtttgcctcgtactaatgtactccgtactgttcttcggaggtgctaccgttcataaggaaaaaaaatggagaaaaaattatgcaacttgcggtagaacccagtcagtgtctcatactttccctcgcgaagagggaaatgagaaccgtactcatttgcgaattgcgatgcggattcaactagctgacagtgacaatgaacacgtactcaacgcaccaccgcccaccggcagcatatcgagcaacacatttttcttcgccccctcctactactacccatcagctcgctcgctcgctcgcgcggtcacacgaaccttgcgttgcaacaaactccggcattagaggggacacgctttctccccccgatcctgcaggaggcaaacgcatccatgcatggtaaaacgaactagcccctcctctcacctttattccggccgcgtccgcgtccccgtccaccaccccaaattcgctcccacccgcgcaaccgcgtggagctggaggccgcctctatcggtctcggcacaccgttaaaaatccgcttactagttttatttcccatatggtaatataaaatttagaagaaaaaataataaattaaaaatgagataaacaggctaaaaaaaattcgtttgcccgtcccgtttgcatccctacgcgtgggtcggtctctcacgggaaacgcgccgcgcgagctaaaacccctcgatctgccgcgtgatcgatgagcgagatcgacggccgggtcgcgtactcgcgtcgcgcacgcgggccatgtgtgtgtggatgcgatcgcgcgcgcgcgcgcgcgcgtcgtcgtctcctcccgtgtgcggtgcggtgccgggttgttaggcagctgcacggtggcttggccgcgtcgacgtcgcggccggacgcgggtcgcggggcgagagatgcccaacaattaggcgctcgcgtgacggaaaggcagggctggcacgggaggatgccatatgcagatatgctagctgcgcgatgattattgatgagtgttgagtggtacgcccagctggtgcatatctgctttgtcgcatgggaaacaaaatctagcaccgatgggaactcgagagaggtgccggccggccggccgcgcgcacatgtaacatgttgcccatgatttcgccagttgattaagttattaattaacttcccccttgttgatggattattgattggtcccgtacgtcaagttgggcagagaaaattagcgagcaatacacactgtctagcgcatggggcacttccaggagtaaggctaactgctacaattaagtgttaacaatgcaggagtatgtatgattgtttggtattagcatctgttgccggcaatggtcactagcaataatatcaatatagcagaacaactatgaagtagttttgctcaactgattaggtttttttgggtaaaacgtatccaactataggaaactatttcaatccctcgagggatgccctctcatttgtctaaaaaccattcaaaccgttataaaaatttcttgaaaaatatgacaacacttatacaacatatatatatcactccacaaaattttaactcaaaactcaactcacacatcaatatataataaggacaaattcagcgcacgaataatattcacgtccgaatttgtcttttttgcctcaatgtgtaggtcgaattttaacttgatttttagtggagcggtaaatatcactatgctctatattatcattattttttcaaaaaaaaaatacaactatttatattgaatttgaaagcaaaatttatgcaacagaacatccactcgagttattagaatccattccccattcaattgggcttaagttatagatttggaatgaggctcacatttaatatttgctataaaattcagtagctatcaagtactgtacgttttacctatcaatgtcttggaggtctctagtgctggctcaatctcttgagatgtgcgtttgtgcgctttacggtccttcaagcaaaatttatactatactataaaagtcggtatctatcaagaacggtaaattcacctttttcttttcgcgtacactaaaagaaaaaagttagtttaaactcacctttttcagaaacatatagtatctctaacctttaaactatgtttatttacttattactactatgttgttttaaaggaaaatccacaaagctcattcgtattttctttgcggggcattcatatgactatatgagaaaccgatcatacattcatacctagcagcagaagaattatagtgctctataaatcatagaacaaatcaccaagcgtaacgcagatctatttcacacgagtgctctataaatcgtggatcaaattaccatgtgtaaagcagaatttctcaggagtgctatgtaaaggttgtgtttagttcctgaaaaaagttgaaagtttggggaaagttggaagtttgaaaaaaaaagttagaagattatgtgtgtaggaaagttttggatgtgatgtgatgcgatggaaagttggaagtttgggatagttggaggtgaactaaacacggctaaaatcacagaacaaaatcaccatgtgtaaatgcaagaatttcagaacagtcgaaggaattttatatcattaatcaattcagtccccataggaatcgaaaaaaaattcaaacgggatacaatatactacagtacttgtcagatccatacacccctctctagtcctgatctaccgactcaaggccattgcgcttcagtgaccgtgcttaattatacgccgcgataactagggtaactgctaatcacgaaatcttcatacttccatggtaatcaactcaaggtcaggctcggcgaaatcaactcaaggccgttaatgcgacgagaaccatcttccaactcgaccggccttgcagcatcggctaccgggtgaccacatggcgatcaatcgatcgagctctcaattctcaaatcgcagacgtgacgtcgtggcgatgatcatcagcgcgagtgcatgtgtccaaggcttcccagcgcgagccaatcctcgcgcctctccacggccgccttcgctttcttcgccggcggctgctcctcctccgccgccgcagcacggacgacgtacgacgaccgcgcggaggcgggggtggccttgcgcttcgccaggaaccgcttcagcgacgccttcctcgcgatcggcatgtccaccagcgcgggcggcgcctctggcgcgccgccgccgccctgcgccgccgacgcgaaccgcatcagctcggccgccatggccggcgtgcagcggtcgatcaccaccaccttcccggcgtagaagatcgtgaactgctgccccccgccgtccacctcgcatccgggttcctggaccacaggcgccgcggcggcggcggcggcggcggccatgaggccactcacaccttgagccaccggcgccgccgtcgacggctgcgaggagttggccttgacgtactggctgagcacgccgcacgcgacggcgaagcggcgggtcatgggatccgtcgacgccattgccgtcttctagcacggacaactaagcacaagcacaaagagagacgagaagtctaactttattgcgaacgatctgtactgtacgtcgctgatcacatatggttggttgcgaggttggctcaaccgctctatatagagggcatgcggggcgaaacgtgtggtcgattgattagtggaggttgcgcgcgcgcgcgagcgtgaggaaaacgtggccgggcgcgcatgacgcgacgaagacgcgcgcgcgaggccaaccgccatgcaaacccaaccccctcctgattcggtttgaaatggtctttcctccgtttcgcgtcgacgtacgggtaaccgcctcctcgttccggggagaaacacgtactacgtacgtacactctcttgcttttggttgttacatcgatcgataagatcgacggccagcccaccgttagatatctgtcaactcgcccgacaggttcggaccatatctgttaactcgatcgatctgcatgattcagatgacaacgaatatttctttttagattcacaacggattaatcaatcaatcaatcaattaattaataatctgttgaaaatcgaaatgagccacttctatatactccacatgcgcaaaagaatttttgcgcaactcgcacggtgccattctattcgaggaacccaggaggcctaaaaccaagccgaacacggcctaacctgcacaacccagcacacggcctaactagatgaggctactactagctactagtagctacgttacctgccgctcgcggcccgtccattcatccgagcctataaaagaaaaaaaaaactttgccggaagcagcaatgcacgttgttcccgtttggttcgtacgccgcgccttgccgttcgttctgtcgatcggccggggaggatgaatggacggacgagttggggaaaaaacgcctacccggcaaagcagaacacagctgcgcgatggcgacacgcaacgccgggtcgtgagggcctaaccggctaaattctctgttacgtacgtacgagaacggatgggtcgttcacgcggcaaaagcggtagaaacccaaccactcgatgcctacgatacgacgtccctcgcttaatctaatgacgttttttttttatctaggactcgcttaatcaaactgatcctcccctgcgccgctggccgatagcttaacatactaatggggacaaaccgatcgctcgtaaactatgcttagcgtgtgatcagcttgcagcgagttgtttgttgttgcaagatgctacaggccggtgcatgcgcgacgtgtacgcactcactagcttaagctcgtttaattagtttttcttctctgtgtttctttctagcagccgaaagcgagagctgggggctgcacgccaacgcgacgaaacgtcgtctcgtcctagctagcaaggaactttcttgcccggttcgattgttgccgtcatgtggtcgttgatcgataatactatgctagagaactatggtgcgcactggtgcgccatggccccacatgtaagcgactgcggcgcccgggacgatcgccatgtgggccccacatttcgtacgctgctgtctgtaaccgcgacgactctgaaaattgaacgaccggattttgtgacatgtgtgccctttggagcgtgtcgtcttcggtagtgtcgagttttcttcttcaaagtacacagttgagtgctggctaattaagcctcgggtgcagtggccgagtggcgccaccacctctgcacgtctcgtgcatggcattggccttcatgctgttttccttttcgatttctaatcgatcgtcacttgctttttcagagactttatttctttgatttaccctaatatacatcattctgagaattttctgttgttaattagttgaagtattttattaagagaacgtgcactttgcaaccttgcaagtacaaaatattcatcgagacggctggtcgtgcactcatgcatttcctagaagctttacgtcgggccagttctcgtcgaaaaataatccttcgcatgcatagactctctgagaaattataacagtttgccagttctcgtcaaaccttggaaaaaatggagtacaactatcaaataatttctttttattctaaaaacatgacgcatagcttaactgtttttcctaaggcaacgagacaactctatattatgcatgtatgacggaattggattttttttttcattttttagtgtctctgaaccatggatttgcttggttgcgtaggctgttttttttaacggctcacatcaaacagtgcaaagtttatattgatagagtagaaaaaattataagattacaatcataggaggtcataaccagaaaaaaaataaagaaaagaatcgttcattgtaaacattccatcaatgcacctaggtgccacatgcacagtaacacatgttatatataagttggtttgatgccaagaaaaaatatactacaatcgattaaaatgccatcttcaaccaatcttcacgttttagtcacagtcaatattgtttagacgaaagaaaaggagggtttcctgtagaaaaacggatagtcaaaagaaaatctttttcacccccacctaattttggatcgtgcacagcctccagcctcagactcaacgtgcacacgggcgcacttgcttgacacgtttctttacacacgatggagcatacatgagggcccaaacggtgcccaaacctaaccaccatgtgcgtgcgtgcgtgcgtacgtactgtacatgccccgctagccgtagccggccagagtaaaccaaaaattaggccatgtgtagttttaggggtgaaaaattttcacgagtcacatcggatatacatacacatatttaaaagcgtagactaataacaaaaacaaattacatattccgcttgtaaagtgctagacaaatttattaagtataattaatccgtcattaataaatatttactgtagtacaatattatcaaatcatatagcaattatgcttaaaagatttgtctcgtaatttacacgtaatctgtgtaattttttttatttaatactctatacatgtgactaaacatttaacgtgacaaggtgaaaagtttttacgtgggaactagatagggcctttaaccgataagagcaagattaataatacagccaacttactggctataaggttctttatagtattctctcagcgtacctttataatatagttagctttttatcattaatattgggtacacttgcctctctcacagagtttcttggttcttatgtccaaaccggctgttaagtttacagctcgcttctcctctctctcctctcttctctcctccaccttatcatttagcaggcttactattatatttgctctaacccaaaaccaaccagaccattttcccagcgttgtcatttgccccattcgcacgccaccaccaccggtggatttacaccgcatcgctggcgcggccgcacgacgcacgtgatcccccccacgcagccacgctgcggaggcagaggtagcgcgcgccgccgccgaaacaacccaacccaacccaacgtcccgacccgatcgaacaaccaccgcgaaaacagcgagagacgtgcggcgcgtgcccgcaatttctcgtctttttttccgcgcgggcgccgcgcttccctccgctcgcgtttcacgtgccgctttcctacccgagaaacaaagattatactaggcgtttaggcctcgtcttccttccttccacatgtacacctagtatataacaagagggagacaggctacagattcacgggaaggtttcgtcctcgtttcgtttcttgcagcaggaagccaaagtgtatttcccgagctttgatgtgagctagctgattttgctagagctacaacatggccggtagtagcgagcagcagctggtcgccaacgcggcggcgacgacggtggccgggaacgggagcaggttcgcggtgacgtgtggcttgctcaggcagtacatgaaggagcacagtggaagcaacggcggcggtggcttcttgccggcggtgacggccatgagcctcatgaccggcggcgctgatgcggaggaggaggcgccggaggtgaggaagaccatggagctcttccctcagcaggctgggacgctgaaagacacgcaagaaaggtacgagcaaacaggccggaatactggcacctagtacgcgagagttcatcgacgaaactagtagctggttcgatgctaaagctgcaagtgtttttttcttctttgttaggaaggagatcaccgagaaggcgcagctgaccatcttctacggcgggagcgtggtggtgttcgacgatttccccgccgagaaggccggcgagctgatgaaactcgccggctcccgcgacagcacggcggcggcggccgtctcagacgccggcgccgcagcggggcagccttgcctaccaggtaggactagtactccaaacacacacgtacacatgcatgcaccgggcaaagttcactgacgacccgatccacactgatcacctcaccaaccaactgacgtgtctacgtttctgcagacatgcccatcgcgaggaaggtgtcgctgcagaggttcctggagaagaggaagaacaggatcgtcgtggcggagccactgccggagtcggagaagaaggaggcggagtcgagcaagcgtgccaagaaagacgatggcggcgcgtcgtggctccaggtgaaccccactctcagcctgtgagccgaagaaactgaagatagctggatcaaacaaggaaaaattaattactactactagtagtactgtattgatttaccatttgatttccacgtgtctgtggaaagtgtggaaccgtgtattattgatcgtttttccccatttcttactattttgcaacagttgttggtttcttccgggggaattagtagctaggtagcagctatgattggttaaattaatctgtcagcttatctgtttgtttgagaattctttgattatttgaagaattctttcatgcatgctgatcttatatgtaaggatccatgcacacggattgatgcctgtcggacctatggcttgtaaatccaaataaaatggtcaacaaatggtattatcctcttctgatggttcatgttctcatgccatgttttcaatatgatcaatctcgacggctgcatttggctccgcatttatagcttaggtagctagagtgtagatgtagttgtggttttcgtctttttttttaattaaccgtgtaatttaagatttggtctcgttttccttttaaaatgagacatccttttctttatataaaacgttggcaacggtctaactgttcggaaaaaaaaagatataagcagcatgatatatattccagatgagataatgtgatattgggatgcatggtatttgaattgtgatgcgaatacgtgggaaaaataggattataatattgaaaattgatatgaatttagggtgtaatataaaaaaataactgttaatcaatcacataaatgccggggccttgatggaaagtaggttcatacgtgtaaagtttcatgtgccgaggagtaggaagtaggaacgagtaagaaagaggagacgtgcatgaatgtgtattatttgtagtcgttacacgtcgtcttccccgagacttggcgtgcgtctacatgtttaccatttcaaagctccgactaagctaattaagaaacatgcgtcgtgtttaattacgacaccgaacatcgggtcagtgtagcgtgcgtgtgcttgtagtcaagagtgagggggagtaaactaaacgggagttgatcacaatggagagccaagttcaaccagccttctctggttctccaaaaaaaaaaaaaaaacagccttctcttgccacgatattccatattgcgcgtttgcagattctgctgaatattcgaaagtttcagaggaaaatgtacactaagaatctttcctttatcgctgatgtaccagcatattacatcgttagcgtttggaatatataccactccgatatatagtttgcatttttgaaaatgcatcattaattttgcaccgtatagtgtagtataaaaggtggagaggtataaaaaattgcattataatatatattaccttgatacctctttaaatagttttttaaatgcacttgatagtatagtggcaaggggtatgtggtttcaactataagatcccgtattcaatgtccaacatacttacaatttcttctttaaaaattgtttggagcaacgcttctttctccttgcatcattttttatactctttaggcagtatcaaattcatgatgaaaaaaggattgactatagcatccccaaatatttccaactcaaagaggaattttacaaatacctctttaaatagtgtcaagttcatcaatgaaaaaggattgaccatagcatcccccaaatatttctaattcaaagaggaattttacaaagaggtaacgatcaagtatttctaactccaacaattaagtctttctagagtccccaaatggcagccaccttaatcctccaccagtcatgtatcagcttcccccctgtttcctcctctgcaaccagctgttgtcatgacttatgttcagaatatcggtttcgtaaaacatatcgttatcttgcgaatgttcaaacctatttttaaaattttaaaatgttttttaaccaacagtaaccgattggttgccagtatacgagtagtactaattgggtgtgttcggctggtatctttcaactgtggctgcagctgcagtagttaagaattgctgcagcttgcagcaaatttctgatgtagcagccgcagcagcttgtatggctgccgaatagagccattgtcgttatttagccagaagaaaattttgggaaagactaaaatataattttcatacatctaatatacatatccaatatactaagagtatggtactttttaccggcatatatatttaaccagatatatgcagtcattttaatttgaaaactttgtccctcaaataaccaaatctaaaattcacttatatagatatttgaactcaaaacattaggatcctactcgggtcactacaaccagagtatcagagtgttcttccgcacccaatatgcttagtaatggatcacgatagtttgaaaatttgacgtgtctctattttccttccgctgactccaaaaagaaaaagaaaatcattatgtggatatgcaccatttctgtctgcaaattagaaacatgggtgctgctgaatgagcgacctgtatagctcaacaaatacgaccacgggcttagaaaagaaaaacaattgagcgaaaaatttgtctgactagttcaataatgatctactccacgtctctaccactacctactgctgactggttcgtagctgcgctcctggaatcatggaggcccttgcgtggtgatgatcgatcatcactgcaattaacatgcgtggttgactccaattattcccatttacttatacttttctatcacaacaataatacgctcatccaatgtactagtagtactggtatctgcaaaattttcaacacaaaagtactacgaagtcatgtagcagacggctgcgctcgacggatcaaaccaaaataaaaaagaacaaatcaattacggccctaccacgcctccacagccgaaagaatcaatccaacatcgtgtgcgctagctggtgcgagaaagctaaacttgctcaatctgtctgcctcttttcccttttcattttccctattaatgcaacaaattgcttaattatttacgactaatgtttttaataagtttgatcatttatacagtttattaaaaacatacgtatgaatgttatttattttattgtgactcgttttatcaattaaaaatattttaaccattacttatactactaacttataacttgtagtatttgttgcacatctaccctaaacttttaaatgagaagaatcatcaaacggtatatccaaaaaccagcaacatcgtctataaaagagaataaagggagtaatttaaaaattattataataaaattccacgcacgttgctaaacacgtgactaatttaatccggcagcatgacgccgacctcacgcggcaacttaattattttctcccctctcccttttttcttctcttctctgcaagttgggctacgagtcgctgtccctgttccccgtttcgatgaaattaagccaaatgtgcgaacacatgaccccgtacaagcaagcagtataccaccgctccaaattaaattaaattagataagttaacacggcttaatttaccaatcaattaggccggatatgattattgttagtataattaattagatatattcgatcccagttcgatcgctatcaaattaatcgttcacgtacttgagttccctcgtgattcataagtcgaggccgtggagtacgtgtacagtgtacaagagggggtagcgagaataaagggattgaaacggactttgatgggatgagatttatcccgtgattcatgagcaaaagattaaagattcatgagcaaagatttaagattaagccatacacatggacaagttgggggagaaaaatgtgaagggtttgtacggttttcacttgattttcgtttgggatcttgactaaagcatatgcgctacgtccacgttaattacggagtgcgacgccactgtgtgcgcgctagctagtaggagtaattgccaagacatacataacgcatgcaatggtgtgtgcaaacataagaaaagagaaagaaataaagagaaaatagatggaccactatccgcgaccaacctcgtgataaaaattagaaaagaaaatgatgaattgaagaagaaaaaaaatcatgtactcctacatgcggttgttagggcagtcccagcccataacactagacatggtttctataaactccacatcatcaagaaactagtactagacactactattccaatgcaaacaccactatttcatacttcaatttaatgctacttatatcacatgatatcttggatgttgtgtagaaaccatatctcatacaagacatggtttccttctctttcctcatttattcacttgccacatcattttttattctaggtggtaacttatttaatgctatggacaccatcctagtcattgggttgggaacgcccttgtgctcgccgtttagtttttcttaacttttggttaattactccctttttttctctggacatttcttaaggggcgcacttatggcgcatgcgtactatagaatgacgtgtgcatgcttgtgcgtcatttatgtaattgcaaaaatcatgtgcacatatcagataatgttatttttcaccattcgcattgtatacatcacgctctgatgtatagaaaattttatgtgtactatcgacattttttcctcaaatcctagaccggccgctctatccctaattctctattgatgttgtatatttccacaaggttcacctgttggtggagatcacaattatatctctatttatctttttcagctttaattaatttatatctccataaataatacatatattggtaggttaagactgtttgccattgaggtggattgcgataatttgtacaacttcttatgatattttggcttatccacacaatattttttttatatcttagatataaccaacaatattattgcatatattttgaaacaattggaagggcatgatagatgaataaaatatttggtctaaaattaatatgatttgtaatacaaaccataattatatgtttcatctctacataaaattaaaaatataactgtcgtgcctgtgtccgacttatactcaataaaacccccctatgtgaaaaaatatagatgcatttcagtttgaataagtttttagatgttgttcataaaaatagattttcttacaatatatggagccaacatttttacaaaccgatatatatttttgattgatataattgttatatactaaatatacttataatttgattaagattaattgttgatgaaaatctataccttttccaaaatataacatacttcataatatatttctatggaggaagtacaactcaacacaagtacacaactataaattaatcctatgtgtaacctaatccgtgatcattcattcatcaaaaaatagatatttcatgtgggattgagggcatcgttttggagagctcaagtgagacatgccaatcacattttagagtcttgtaccatgtgacacggtcaacgtttcataataaacggcacaagttccttttttaccatctctcttttccattgttctctccaatattatctaaacatatgtgacgtaactttttcatggaggaagtatgcacaactcaacacaaactataaactgctcctaattatgacttaacccatgatccattcatcaaaaatagatatctcatgttggattgaggatatcgtactaaaaacccaatcaagacatgccgatcacattttacattttacagtgatatcgatgtaccgtttaacacagtcaatattccataataaatgccacgagttcctctcttaccaccccctcgtttttctactgttctcctctccaacattggcgtagtggtaaacaaaatcgttctcctcaatgcaattgcagcacagaaaaaaaaaggcggttaaaccatattcttagtcttataaaagaaattgaagaggccgtaacattttacacgaggtgcgaattaaaagagaggcaaaccagggaccgtgaagtcgtgcatgtgtgccttgcaccacagtacacatataatttgatttattttttgttcaaagaatatttttcccaaatataaaatacatcgtatttttttatggaggaattacagctcaacattatcctacacgtaacctaatccgtggtcattcgttcatcttaaaaatagataccttatgtgggatcaagttcatctttctagaaagccaaaatgagacatgccaatcgcattttacagtctcgtaccatgcgaaacggtcgacatttgtagcgcccgttccgtcgtggcgcctagcgggaaaactatctcttaaaaactctatttgtgaaatctgtttctttgcttgttgtctagtgtccgtgccatctcagatctcaaatccccgatctatcgccgagttcaatcccgaatccaaatccttcccaaatcaattcctccgcaaaagtctaatttgcctccccgggttcgatgggccgaatctctctcggcccatctccccctccctccccggcgccctctctctctctttctctccctccccctccgctccgcccgcgcgccgcgcgcgcgtgcgcgagagccgcgccgagcgctcccccctccgctctgcccgcgcgcgtgcgcgtgagccgctcgcgccgagcgccctcccttcccctcgctctccttctccccgcctccatccctggagagctccccgcccgcggaatcggccccgcgcgttgttgttcgcgcgtgcgtccacgtggtcgtcgcccgcgtcgcgcctgcgccgtctgcgccgcccggccccgctgccctgccgctcctgcagccgcgcagccgctcggccccgcaagccagcgcgcgtgcccgagctgtgccgctcaaaccgccgcgcctcccgttgcaaccgcgcgcgcgtgccgtggtggccgaccgcctggtcgccgccgccgtcagcctctgccgtgcctgcccgcgcctgccgcccgtgtcgtcgccccgctccaaaccgccccgccgtcatcgccgtcgtcatcgcccggcccccgccactccgcgcgcaagctgccaagggacggaggcagagctcctcctccctctgccgagtcgcccccgctccctcctccttttcccaaagaggcaaggggacaagcccccttttatctccctcttttcccctttttcctcccgccggcgtcatcctcctccctcctccctgtcgccgctttggccgcgaccgccgaacgctagccctctcctttgaccgccctaagtcggttcccaaactgacattgccatcctataaacccaagcttccctcttttcctttcctctcccattcgcctccacgccattgccgccgcctcccgtgctctgttcgccgtcgccgttcgtcgttgcgcgtgtcggaggagccggcacgagcaaggacgcggaaggggactccgagcgcgccctctccttcctcttccccggcccgaggccggagagattactcccgcgccgtcggcctctcgtcactgcgcccgcccgcacggtagtgcatctccccgttctccctcctcgctccatctcctccccttagactcgggtagtagcacgagtagcctccccgtagctagccggcgtcaccccgaccgttgccgccgctcgccgtgtgctcgccgtcgtcgtcgcccgagctcggaagcgccgctcgtcgccggcctcgctcggcgcagctccgcccaatccaacgctagcatcagattcccgtagccgcgtagataatctcgccgccgggaattggcccctcgtgacctcgtcgccgtttcccccttctcccgccgccggttgccgccgccgcaattcgccgccgtcgggcatcctctggcgaatccgagccgttggctcgtctcccctcgtcctatgcaaccacccggtgtgctcgctttcgcctgtatcgccatggttcgctccgccgctcgccgctgtcgtccgccgtccgttccggccggcgtcgtcgtcgacctcccgccggcccgcgtggcagccacgtaggcgccacgtcggcgccagctcggccaaaaccgggtcgagtcgaccccggttagccgctccctccccgtgcgcgcggtccaccgcgaaccgtgaggctgcgcgtgggcccaccgcatccgcgtcctccacgaaccgcgcgcgtgcaccgcgtctctcccccatcctagcgccgcgccgcgtgctctctccgcacggtgagccgagccgctgacaagcgggtcccactcgggaccacgcgaggtgagcccggtccaccggctctctctctcctcccctcccgcgcgcgcgtgccttgggccggccggcccatttagctcggccgagccgccccttttctctcgggccgcgccctagccgcccgagggaagtctaatttccctccctcttttcttttcttttctttttcaaaaaggatttaattaagtccttttcctgtagaccaaaaatccaataatcttagaaattcaatatcttcccaaccgtaaatccgtttgactccgttcaacttccaaaatccctcaaatctcgagatctatctaatggcacgcttagaggtcattaatagggctttattttcgccgtttgttgagttgtcccgttttgcgcgtagtttcggagcccgaagacccgcagtgcgaggatttcgaggatcaagctccagatctcgagcaaggcaagccacctttgaacatcttgagcttatatttgaatttaattatgttgcttgaaaaatattatgcattgataggatcgcacttaatctgtttgtcccgtctgcaaggcagattggcggacctacctagtttgttgcatttgatccttcctttgttaattgttataccatgttcccttgtaaccacccagttgcgcctcggaaatcgtgcactctgcacgagtatcgacggtcgccttcaaacttaaaatctgaaaaacttcttaggtaaaacttgggttttacaaaagacttggaaaacccgacacctgggtcggtgcttgcgaactaaatgaattttccaaaaccgcggaccggggaacgtaccgggtgtacggtttcccgctcttgcacttaaggaccgttttcttggaatttcatccaaacataagacaagtacgaccacatgggtggaatgggacacccctggctgagtaactagcttatcaggggagccttgatgccgagagacatgtggattcgccggggtggtgtcggggaggacccctgggtttcctggcacagtatggtctgggacctaacctgttgttggtctgggacccctctcgtcggcatatggtaaacctgtgtcggctttggaaatgccttgtcatgaaagcttggaggtctcccgacgtggctgatccccacgggctgggtgatccgggttagtaatgtcgtgtggataaagtgtaccccctctgcagaggttaacaaactgttcgaacagccgtgcccacggtcatgggtggatgtgaggtgattcctagcgtagttttgtttgactactgcttgtgaaattgctgttgtggaaaggggttcgatgtttgaaaaatctgcagctgatgggatcagctaggcccgggtggccatttgaaagttgttggcccgggtggccgtttgaaagttgttggtcgggtgccaatcttgatcaattctaaagactgatacatttgcacatactccgaccggacaagacgcactgtctcatccatgtcgtttgagaagcactcacttagttgctttcagaaaagagttcaaataaaatcaattgcaaaaacaacagcctttccttgaagcctgcattaaacacttatttcccatggcttgctgagtactcccgtactcacccttgctctatataaataatctcccccccagttgctgaagaagatgaagcggatcccgctgacgaggagttctttcaggagcaagccggctacgatgagttttagggtttcggcctagttcccaagtcgcgcctgtgttgtttggtccaagtcctggcttccgcttcccttttgtaatgcagttgtgagctcgggatctgtccgcagcccgacttgattgtactcctactctataataaagagacctctattgctgtgatattctgtcttcctgtgataccagcactgtttcctgggactggtatcgattaataggttaatttggagcgtcacgggctagttccggtcggtactagttctgggcgtgacaacattccataatagatgacacgagttcatcttttaccatctatctttttcagtgttctccttttccggtatttatctaaacgtgcatcataactttttcatagaggaagcacacacaactcaacaaaagctataaattgctcctaagcataatttaacacacgatcaattcatccaaaaatagatctcacactggattgagaacatcgttcaaaaaaaaaactcaaccaagacacaccaatcatattttacagggttgtaccgtttgatacgatcgtcgttccataataaacggcatcagtttctctcttaccacacctcgtttgagtttatctcttaccaccccctcgttttttttcactgttctcctctccaacaatggaataacggtgaaacaaaaccgctctctgcatttctgcaaacagtacaattgcttaacccgtggtaccagccgttttttagtcttgttacaaaaattcaaaagaagccgtaacgttttacatgaggcgcgaattgaaagaggcgcaaaccaggggccgtgctgccgtgcgtgcgtgcgtgccctgccccccaacttgacaagtggatggagggaagggggacaaccccggtcgacatgcgagcggatggggaaagcgggccgcaccaccccccaccacccgatccatgggcagacgcagcaaaaaaaacatcacgaattcacgcacgcacacgcatccacagctcgaccgttctcccagtcccctcccccacc

SEQ ID NO: 6322 - DNA, 3167 bp, Oryza sativa
acatttatattgatgttaatgaatctagacatatatatctatctagattcattaacatcaatatgtatgcgggaaatgctagaatgacttacattgtgaaacggaggaagcacttttttttttgaaactgaactcagtacttgatgctgaaagggttggtctcgttgcaacgtgtgctttaatttgtttgcagtggcattcctggcttggtagttggtagcgaccgtttttttgacaaattgacccttttggaaaacttacttcgaaactaacccctgccaaaaacttcaaccaaaaataggccgtcgcctcagcgccaaacacattggcgctgacgttggtcgtgtcagcgccaacgggactggcgctgacattgtgccaccgtggcggccgggccgatcccctagctgacgtggcagctacatcagcgccaaccgcttcggcgcggaggtgcccaacctcagcgccaaccggactggcgctgaggtgggacttggccgcaacccccaggcccagaccagcaagcctcctggatggcttgcgggctgggatctcagcgccagccataatggcgctgactgtgggaaactcagcgccagtccacctggcgctgaggtgggacttggccgtttcggccgtggcccagcccagcaagccttctggatggcttgcgggctaggacctcagcgccagccataatggcgctgactgtgggaaactcagcgccagtccatctggcgctgaggtgggacttggccgtttcggccgtggcccagcccagcaagccttctggatggcttgcgggctaggacctcagcgccagccataatggcgctgactgtgggaaactcagcgccagccaacctggcgctgaggtggaacttggccgtttcggccttggcccagcccagcaagccttttggatggcttgcgggctaggacctcagcgccagccataatggcgctgactgtgggaaactcagcgccagtccatctggcgctgaggtgggacttggccgtttcggccgtggcccagcccagcaagccttttggatggctgggctgggacctcagcgccaggtgcactggcgctgagtttggacatgtcagcgccatttagcatggcgctgacgtcccagccctgctaaaacttcagcaaaactttgcacacaacacaggcaaacatcaaatgacagaaatttacaggcagtaatatatccagagacccttacaaaacatacatccatccatcaatcccaacatcattccatacatccatagaatccatcaatacatccatatatgaagtccatacatataagaaataaaaacatcccatcgatcctcgtctatacatccagtcgagtccatacatccagtccatacatccatcgaaccatgcatcaagtccatccatctatccatccatccattgaaccatgcactcacctcctcctacctctagtgcgaggacgaggcacgtcgggggtgtacctccagtcctgcgaaggagcccgccggcgtcgtggtcgagacgggccgggctgcgagatatccggctgtgacgactctggtgcgtcctctagctgcgagggaccgagctcatccgcctcctcttctctgtcctcatcccttcttcctcctcatctccttcctccgcctctttgtcttgctcgccctcctcgtcacccacctccccttcttcatccccctcttggtgggcatgagcatgttcgaccacatcagtcgacctgcagccgagccttgctgccaacttccgacatcgctgccgtagtctctgcataaaaaataagccatgttaagttatcgcttttggaagaaaacaccgtagtttcatctctttccaacgattacctgtagggcgttgcggagggtgccgccctctccttcggagccaggagccgtgcctagcgccactcccgcgtcgttgacggtccgcaagagctctcgagcctgtaggattgaaatgaagtaagtcacaacatatatggcattgaaattgaaataatatacaacattaatgctagaaacgaaccactctgtcgcgaacaggtcccgtctcgaccgtggtacctagacgggtacgagtatcgtactcgttctgctcctcaacatcctcggggtcatccgctatgtcggctagtgtccaagccggacgtaggacaagacagtaggtccaacatgttagcaagaaattgaaatgttatgaaacataacatgcgtgaacttacctgtagcaaccaaacacagcctgctaggttcgcgtccccgccttgccttcggcaagcatcacagagttgccggtacaaccaggctagggcagccgacccccagctgaaggtacccgcctcgtcccagtccgcgagcaacggcagccacatccaagaagccatgtctccaccagagtcagggaacagaatactgccgaagatgtacagcacgtacgccctgcagtatcgctgtactgtagcctcgtctgcctcagcgggacactgaccgaagttggctcgcaaccaactcaaaggaacccctgatgtcttcgtctgcctctgaccatcaggtgccactggaggctccagaccaaggtactcctcgaccctctccctccagttccccgacgctgtgtcaccttgtcggtgatatgggaccgggagtatcatgaccagaggcttgaggcagacgcaatcgcccacgtggcctggcaccttcggggacgtcgggcccgagggtgaggtgtccgccctcctcctgatttcccccgagggggggtcgggttgcgcttgccccggccccgagggccgaggcaccccgaccccttaaggaagtctgcgccacatatatgggataagtgagcacagctgtgctcacctaacagcatttattgcagtctggtcaagcgtgtcatgctgcatgcaacgcagtacagcgcgttcctttatccggtctgtgaccagtcacagaccggtcagatcacgggttaggtggcgactggcggtctgacgcacgccttgccccatcccgtcaagacaaaagtctgtaggcactcgtctcaagccggagctagcgtgttatctcttagagatggcacgttagccctggtcagatttaaaccagggttcatcctaaccattacaggccaggtggta

SEQ ID NO: 6323 - DNA, 706 bp, Oryza sativa
cagtattattcggaataaatcaaaagcatagagatgagataaatttattttctgctcttaataattgcaaaagtacctaagtagtaaattctgatccgtgaaactttgttccgtgatactactcatcctatatgtttgttctgcaggatccaaatccaaatatgcataaaagggattcatggctttaagcttatctcttacgctccaggaatggatcagtcagaacatcaccaccggctcgccgtcgtcgccgccgactggagtcttcacctatacggttggttggaaacaccaccgttgttgggcgtctacgtctttaccgactggccgcttcgtccaccgccgactggtgtcttcgcctatacggttggttggttacaccaccgttgttgggcgtctacgtcttcaccgaccggcttgccttcgtcgccgccgactggtgtctccgcctgcacggctggcctattatgccaccgttgttgggcgtctacgtcttcactgaccggccgcctcgtccgccgccgactggtgtttccgcctgcacggctggcctattatgccgccgttgttgggcgtctacgtcttcaccgaccggccgcctcgtcagccgccgactggtgtttccgcctgcacggctggcctattatgccaccgttgttgggcgtctacatcttcactgaccggccgcctcgttcgccgccgactg

SEQ ID NO: 6324 - DNA, 1516 bp, Oryza sativa
cggcccgtcacaggtatcccctcacctgtgacgggccgaaaggaaaacccgtcagaggtataccagtgacgagttttgcttccaacccgtcactggtatcccctcacctgtgacggctttcatttctggcccgtcacaggtgagcggataccagtgacgggccgttgaatagaagcccgtcaaaggtatgagcaatacctttgacgggctttttttatctaacccgtttgaggtgtgttggatctataaatacccccaaactgccaactgctttccatcccgaccattgtactgttcacaaatcggttgggagggcaaggggggcgattttttgctaaaattcaaggtaaaaaacacattattctccattcattctcaacatatcgatcatcatttatttttcttcgtatgttgttgatttcagatggatcgtagatggatgtactatgcgcatcgttcgtctaccgagtatagagagggggtcactgaatttgtcacatttgcggataatgacagaaaaagtaggatgagcatgcacatgttgtgcccatgtaggggctgtaagaatgaacagatgatcgaagacaaggatgaagtgcatgctcatttgataatgaatggattcatgaagaaatatacctgctggaccaagcatgaagagcaagaggcgcctgatgtcgcagctgaagaagtgttggatcaggatgtagagaacaccgccgcagctcgagaaggcatgttcgtaccttctcctttaggtggagagaccatagatttggacactcaatgtctatctacaatgttgcatgacattgaagacgcagaggacaacgacagagattatgagaagtttagtaagttggtggaaaattgccagataccgttgtatgatggatgcaagtcgaagcacagcaagttgtcatgcgtgttggaactcatgaagcttaaggctagtaatggctggtcggacaagagttttacagaactccttgaactgttaaaggatctgttgccagaggggaacaatttacctcagacgacatatgaagcgaagcaagtattatgtccgttgggcctggaggtcaaaagaattcatgcatgtccgaacgactgcattttgtattacaaggaatacgctgacttggatgtctgccctatctgtggggcatcaagatacaaacgagcaaagagtgaaggtgaaagaagtaagtcaaagaggggaggcccagcaaaggtggtgtggtatctcccaattgcggagcgcatgaagagaatgtttgcgaacaaggaacaagctaagcttgtgcgctggcatgccaaagaacggaaagtcgatactatgctgaggcacccagcagattcagtacagtggaggacaatcgataggatttaccaggaattctcaaatgacccaagaaacatgcgtttcgcaatgtgtacggacggcattaatccttttggtgatttgagcagtcgtcacagtacatggccagttctgcttgttaactataacctt

SEQ ID NO: 6325 - DNA, 8794 bp, Oryza sativa
ccccggggtagatgggccgagagagatttcggcccatcgaccctgggggaggcaaaatagacttttgcggagggatttgatttggaaagatttggattcgggattgaactcgacgatagatcggggatttgagatcttgagatggcacggacactagacaacaagcaaagaaacaaatttcgcaattagggtttttaagagataatttttcccgctaggcgccacgacggaacgggcgctacacgacacccctccaccggtggttcccctcagcacgctaacacctcacagcccataatagctccaccaatgcgctagccacgagggctagattgccctcttaaccacctccctcatcatggagaaccccgtgactggacctagaagcaaactgtccctagaaggagaggagctcctcagagaagtggggactgtctaaagaggagctgatcgtcgctaccattcaagtaatccaagatctgcaatcgtcgctagaatcccactggtcatcaccactaccaccgtcaaggcacttcggtatcgtcgagcttagctatttccatcaccgcccactagtctcccactgagtagatctagatggaatcgggctcagcaactatggattcagtgcctgcaaatcggttgcggcctccaccgcagtctacagccctggccgttgtctccaccactacctggtatccaaccacaacatacaccaccgcctgttacctcaccaccacactccgccagtagtgcggtgtccgtgggcgtcgtctctccagatcaagccacggcgacctatagatttgggcaatgcagtgctacctctacctaaagacgtcgtggtgctcccaaccactctagcaccaccaggggagaaggagccctaccaccgctgtcttagccggtatggggctacccttgtcgccctaaggctagagcgacgcaaggtttcatgaagctaagagagctacgagattaattgcatcattgcatggacatggtaaggttccatgatttattacccattaaaaatgtgccctagtatgacatactagtcatctaggatatggctcagtgagtgtaacaccgtttacagaaatgttatcaaaaccacatcggtcatacacatagctgcgttgcccaaatgaaggagaagaggaagctgatcctcccccaaagaagaatgcaggttgtgctggtggctgaagctccatgttttctcgggtcaacatgaaaatgacagatgatatctgaggtctatcgttagggtctgactggacgcacaacagcgcaatgtggatgcatcgcagtgcttggctttgagaatatccgtgaagcgattggtcaatcatttgggaaaccgtcccttttgtccagcaattccagacctgttagacggattgacatgagtttgttaatcggaaacttgtttgagagtactttcagatttgaaatcatgactagtttcagtatgcaaatgcaataaaaatggaagcatatatactggagtaaggtatgtcagcattactcagcacttacatcactaaggagattcacaagatcatgatcatcagaattgcagttccttctcctcgttactatttcgaggaccaacacaccaaagctaaaaatatcgatcttggttgacacatttccatctattgcatactcgggtgccatataaccgctgcagaagttatcagcattaggcttggaaacatacattgatcaatatatgtgtgattagtcgtgagtgaaggttttattatgcagatgaacttacaatgttccaacaactctagtcgtcctagtatgagtatggccttctcctagcagccttgccaatccaaaatctgcaattttcggttccatatcctcaccaagtaaaatgttgttcgattttaggtcccggtgaatgatcctcaagctcgagtcctcgtgtagatacaatattcccttggcaattccaagaatgatgttgtattgttgctcccagtttaatgcatttcccctattgatatctaatgtgacgaaatgttcaacttaatcaaaatcactcacctataatacaattcagaaagtgcaaattctgttcttaagcatgtaacttgtttgccatatttgctacagtacttaatgctttttcttaatattgttccacatactttgtctgaagtaaaatatttctaatcgcagtgttatagatttagatactccactctaaagaaatgtgtgattaaatggtccatgaggaggtacagttgtcagttgataccataatttttaatatttaattattggtaggggcaccaaaatctacactgaaagatattataccttttggtatctcctcaagaagtgtaaaaaaataagatatgtttgaatgggaagtaaaattaccgaataggaagttgtccaggctcccgttcttgatgtattcataaaccagtaatgtctccccctgatgcaagcaaaatccatgtagccgaacaaggttcttatgctgaagctctgccaataacagaacctcattgtgtagctgatctaatccatgcccacttgttcctaaaagtttcttgactgctacttcttgtccatctgagagtactccctgaacagattattattcagagaatgaacaatatatagtcctctaccgaatgatcaatggcatctgaagctatttttcatgcatataacttaccttgtatactgaaccaaaaccaccttctcccagtttattgttctccgagaagttctcagttgcctcttgcagcgtaggcagatcaaaaatcatgcattgtgctcttgttatcttcttcaatgctgttgccatttgacaagaaaaattacgtcagggaacagcaaattccagaaactgagcagagactgtatgctactcacggtggtcagcctcgacagccttggtcctcctcttgaaccgaacgaatgcaaaaactgcaaggatcaacagtaccaaaactgaacaagccaggcctgcagcgactcctgctgcactctttttcttccctgctcaaacaaaacatgaactctttatattcgcacaaccttgatcgagtcatatttatttgttggaacataactaaattgcacgctcctgttcatcatactagggtttgaaattacggttcgaaatttcggtaattttgcccccccagcaagctcacatctcacccaaaattttcggttttttgcaattttttgtgaatttggtcaaattttattcaaattcattaaaaaacagtcaaaatttcaactaatttcggccaaaaaatttcggtccccccagcaaaaaaaaccaatttcgaaattgaaaaccctgggtcatacctgctccagcctcaaccggagtctcgacgaccggtggtggcggcggcgagagctgcagcgtcgcccggcctccgtagaacggccgcacgctatacatcagcctgcaccacaccgaatagataccaacccaccggaggctgttgcccatgtacaccgttttcgcattatcgtggaggctcctaaggcattccttgcactgctccggcgtcaggaccggcacgcactgcgcgaacccgtagatcttggggttgaagctctcctcacccgtggcgaaatacttgatggtggtggtcgagttgttgcccgtcgtcgtcgtcgtcgtcgtggcccaggcgtgctcgaccagggcggcgaggatctttgccacggcggcgttgaaccagccgacctccggcaccttgacgttccccgaggcttggccgggaatccaactgtttaggacgaggagcaaatcagtttctctgattccaccatggatatggttaggaagaaatggtcggatttatatatagaatagttcagtacgtcatctgggagacctgccacttgtccggcctgaggaaatccatgaagctctggccggtgaagcggatcaagcaggcgtcctcgtacagggagatgccgccggggcagacgcccttcgcgtcgacgaacgccgccgcgacgcacgcgcggcaagccgaggcgttcacgtcgccgcggcagagcgccagcgcgtagacctggtcgggcgccgcgccggcggtgcggacggcgaagcccggggcgccggcggcagaggcgttggcggcgagcgccgcggcgaggaggcccaggttcctgtcgaaagcgctgttgccggtcacgttcgtgttggcgacaccggggtcgcattcagcgaccggagccgccgtggccggcagcggcagcgtgacgacgacgacggcgagaacgacggcgaggatgccaccaccgtagacatagccggcgagcatcggcgcagcagatggggagagagaggtttctacccttaacgaacggcgccatggtttgcactaaagatggcctagctagctagcgccgctgtgccgatagctacgtatgccggattgagtgcgcaagtgtggagtcaaacatgaccggctcgcccgggaatgtttgcaaattcgcccacttgaagttgcattcaaccatttgccgctatatgatttagcctgccgcactacgtggggaaaagggatgtggatttccacgaggggatatccctcgttgattgcatgtcatctaaataattatcaaaaaattttaaagaaatgacaacatatatagattaatatgaaatatatcactccacaaacatataataccaaattcaacttttacatgttgcaacaaaaagaacaaattgaactaaaaatagttattgtacattcgcagctatatttgttatttttgttacaacttgtagaagttgaatttaaacttgcatgtttgtagagtgatatatttcatattaaactatgttaaaaattttttaaaaaatttttagtgactatttaggtggtatgtacgaaacgaggggatatctattgatgaaatataatcactttcccggggaaaagcaacaacttgcatcgctttgttacactagggaaagatagaggatgtgcttgcctttcctgcttgggcggccgtgtggcagcaaagcatgcatggccttggaaaatcatgtgccaatttttctgtacttagttatcacgagtcattgactcagatgtcattgtcgcggtatttttagcttttccggagtatattggtacacgaatactcgaggatatgacagcataatatggtttcaatgaaaaaggcaatgtgatcgattgatgattttgtagtcgccgcctttcagactttagaccccgcgcgtgcgtactttccagccacaacatctgattatcagagcctaactcaatggttttaatttccacgagttttccggccgatggtgacaagagcaaaggcataggtgatgttgctcagggattcgggtcagctgcagtcactactgtgactgcaacttaagcagcagtagtgcatgtcattggatgcaaattggatggtccagattgcatgctgtaccgcgcatagtactatagaaaaaaatactgtagctccgatctgaaccgttgatcctaaaaatagattgccaaaattgtgtgcagttttatcttgcagttacaagtgtaacccgatctcaatccgttgctcaggaaccttgatccggtatggaatctggaaagccatgcgcatgcagatcgctcgctggaaaaaggaagcatcgatttttttttgagggaaaaaaaaagggagcatcgattgatttgattagcatgaagcttggacacacggtcagaggagcgcgcggcatttgacgtgtctattggaaaggaatgaatgtgggaggaagcgtcactaccacattaacgattttcgcataggggcccctctctagcttaccggtctgctactcggctatgacatcatccgtctgtgataatattatcggcccgtatgttcaaaaaaaatattatcggcccgggaggaagacaacacactcgtatgtaaaaatcaatttttgcatgtcagtctcaccaagccagctgccccgttccctacttccctcttcatctctttttctctctaatcttttttaaaaaaatctcctcactccacactcgtgtgtccatccattctcctctcctcacccgctcctctagcacccgtcccccttcccccaccgcctatccatgggagcgatgacaacggtcgtgacgacagcggcgacgggaatggccctgtgatggtcagatctgacgccagtagacagggcgacaacgacgacgacagtggtgggtagggaaatgatgacaatggcatatcgcgactcgcgcgagggtggtaaagtggctaatctaccatcccctgtcccgggaggggcgcatccaccgtcgtcggcctcgggagcgacgacgactactgcggtgactgcgtgcctcagctcttcctcctccactatcgcgagcgcctcaattcctccacggtcggaagctttgcaacagccggatctaacggtggcggctagatctagcaatagtggcctcgtgacaattggatccagctgtggcggcgctgcgatggttggatctagttgaggcgccccctcgacgggtgggagctgccagcagcgattggcccggtgacagatgggcacctgggcttctccactgcagcgcacctcggcacctccgccaccggtggcctcagcttctcgacccttgacggtaagattttacagatttttgggattatttatttgtttttgccaaaattctagtgcaggcggatgacataacatgtccacttgcgaaaaatagtgtttgcgtacggttgtagtgttgatgtgcgaaaatcttcatttttataggcacctggctctaggcaggtggagcaccgtttgtgaaaactgaaaatgcctgcttgcgaaaagcaattatgtagcagtgcgtcatctacatcgtgaatgcgttgatcgtacccgtctgaggatcctctgagtggtttctcgaaagaagctcaaagaagatatgggatgttcactactctcatagttgccggttcaattcgtcagcaccgatgcctaactgcataggtgccagttttaaaattggcacttatagagattataggtgtcggttctatcagtataaccggcacctataatcttcaaaataataaaacatatgggctaggagaggtgttgctaccgttgggtggagctccggcaggaagacaccgtcgcgggagagcgacgagcgggatgacgacgccgactcgttgttgtccctccaggcgtgctcgacaatggcaccctatcaccgtcgacagcgccaccggccgccaccactgcctccatctccatattgtgctcccccttgcctctggccttatctccttgtgcgtggggaggggaagtggcctgaagtggcgggggtggatgggcgcagacaccaagctctaagaccttgtcatcagccagccagggtagactaacgcaggaggggaaggggaaggggagggagaggaggtagaccgcaggtgggagagggagtgttgacccccgattttggaaatcggaaatcttctgtgtttatccgtaccaatccctggatcagtagttggtacacacatacatagttggatcacaacatatcacgaatgaatttaggctaaaaagaattaaatacttacattagggccaggtaggccaacaactatcagagaacaacagcggaagacaaaataatataagggcccggttaacatgccacaggcagtcgactggggaacgagacctagaacaagaccgcactccgatcatcttgtgggatacgcaagcgtaccgacaagggcttctcttcaacactcccctaaaagatatataaatagcaagggtgagtaccaaccgtactcagcaagccaccacaacaacaatgcatatgatagagggtatttcaaggaatggcttcaggttcttttgcataaagctaattttacaattcttttcacaagcctaaaacctagcatagactgatcaaattttagtaccagtgttcactttaaacaacgacggttcggtccaccatccattgtcatcccaaggatagcttcccgccattgaatcatcatggttttctgaggatgtccaccttccctcctctcgggatgtggctccatcagcataaaattcatcatgcaatatcccatcccccacaagttaagaatttagagtctagccaagtgtaatacatgtcccggtgctcaataaccgcgagtacggctattcaaatagatttagtttactcacactgcagtggatgtacactttacctgcactccgcgactgcccaacacatgagcctcgtcccaacacatgagacgcgtcacggcaaagcttttcgataacctcgcattggcagtacccgctccatgaacttaaatcctcatgcactctaggcgtccatgtttctagcagtgagaggagttctggcgctcccgggaaagagaagtctcacacgcatattaaattatggttcaagttaagttctctctctcacacactcatggcagtcctaccaatggcgacaccgatgtagggcacgcctctcggccctacctcaacggctgtcccattgtagcgcacctgcctcactcaggggtgaaccatctatgcagggatactgcctccgctcggctatctaatccgctaggtctatacccattcgagaagtacggttgtacgggggtcgtttcatgcttaacttcatggctcggtccttaattgaccggggatggtactagccttttccagataccacccaaatcctccgtccgccccagtcga

SEQ ID NO: 6326 - DNA, 12625 bp, Oryza sativa
gatcaccccccatctccccctgacacgctcctctcccccttcctcctctccttcttttcctactacaccataaatttttaaaaaataaaaaaacaaagttaaaaaaatttatgtatagaaatactatatataaaaaatatttgaattcaaatttaaatttgaatcgggtatataaacttttgacttataaactttggttctataaacttgagatgtataaactttagatgtatagaaaatactatatataaaaaatatttgaattcaaattcaattttgaatcggatatataaatttgaattaggtatataaacttttgacttataaactttgggtctataaacttgaggtgtataaactttagatgtatagaaaatactatatataaaaaatatttgaattcaaattcaaatttgaatcggatatataaacttttgagttataaactttagatctctaaactttagatgtgtaaacttgagatgtacaaactttagatgtataaatttactaaaataggaaaataaagtaatacggtgccaaagaaaaaaaccacgtggaggagaggtgagcgatcacccattaggaatctcgaatgtctacagtctacgtacgctgcattcatccatgatccatccggagaggaaaatgacaaatcaacagtcatgctaggagtgctgtggttatctcaccacatcttttggttgctactccacttgctataatcgtgccatgccaaaaaaaataaaataaaatccttggtcgacctagcccggcccagttgcaaattaacctgtatctctagttctctacacagactacacaaggccactaggtcgcaggcacgggacgggacgcatgcacatccagaaacgaaatcacgagtccatgtctccatgagccttgttgctcgctataaattcccatcgcgctcgcgtcttccagtatagtcgtcgtcatattttaccctgctttcctctgccactcgatcgccacggctcgcaggacaagaggccatatggcgctcgctctcgctcacctcatccttgccgccgcattgccgctgctcttcctctcacgtgcaggtaaacggtgtagttgcagctctgtatcaacggcagtgtggtgcgttgtttttttttgtttttctttgcttataatatatcgacgtgtaattcttttgcgtgttcgcgaaaaatgtttttcttgcactgcagatgggggcgaggtgggcgtgtgctacgggagggatgggaataatctgatagatccaccgtccgtggttagccttctcaaggcaaagggtatcaccatggtgaggatctacgacgccgacccgaccgtgctaaacgcgctggccaaccaaaacatcaaggtgatggtggcgatgtccaatagagatctagtagctggctccgccaaggatttcaatagtgcgctcagttgggtgaaaaactacgtgttgccgtactaccgttcctcacaaattaacggcgtggccgtggggaacgaggtgtttcagcaagcacctgacctgacctcacagctggtatcggccatgaggaatgtgcaggcggcgctggcgaggctgggcctcgccgacgcaataaaggtatcaacacccattagttttgattcagtcaaggtgtcattcccgccatccgcaggtgtgttccaagataacatcgcccagtcggtgatgagtcccatgatcgacttcttgcaacaaaccaactcctatctcatggttaatttctacccatatattgcctgggctaattctaatggccaaatctctcgtgattatgctgtatttggccccaacgcctctcctgtggtcgatcaagcaagtggcatcacataccatagcctctttgatgctcagctagatgctgtttacttcgctatagaccatgtttcaggtggtagtgtgagagtctcaatggcccaagcaagacgggggcgcccgtctccaaggatacccgtgaaatgttcagaatgtgggcatccctctggtggtcggctccctcagttgtccacactagatgatgttcaagtagacgtggctacaaaagccaacgcccaagcttttaacaatggtcttatcagtcgtgcactattcggagccaccggtatgcctgatgtctccgtatacatctttgctcttttcaacgagaatttgaagggcggagcatctgtagaacaaaactttggcttattctacccagacgggacggaggtttaccaagttgactttcacaatggtggtggtggtaatgtttgccctacaaaagcaagttggtgtgtggcaaattcagcagttgggagcacccggctgcaagcagcgttggattgggcttgcagtaatggtgcagattgtggtgctatccaaccaggcaagacatgctttgcaccaaacaccttggtcgcacacgcatcttacgcgtttaatgactactaccaacgtaagagccaagctagcggtacatgtgacttctctggtgctgcttttattgtctacaagccttcaccaagttagtttcctctccatccttattaagttttcaggatactgtttctacatctatgcatccatttcttattcgctatttgttaaccaaaatgtataaaggtatctgcgacccgaacccaagctggtgcattgcgaaaccggaggttggggacacacgtttgcagaatgcgctagactatgcatgcggtagctgcgcagattgcagcgctatccagcgtggtgcgcaatgctttgaccctgacaccaaggtagcgcatgcaacctatgcattcaacgactattatcagactaccggtcgtgccagtgggtcatgtgattttaacggcgctgctaccattgtcacacaacaaccaagtgagttcacgttcattttagaatgcgttcaattaatatatctcataccacttaaatcacatccttgcctgaacaataattgaacgctttcatttcatgagcagtaaatggttttcaccggtgctcatttaatcatattttgcagagattggaaactgcgtactctcaccaaacaactcttgaatgtacagaagactcggcagtaagaggatgggattgaagaataagtccatattctctaagaaaggaataagtccatattatggtcaaataaaaataaggacgacattgtatgtattccggtttggaattttaagtaagtaataaatgtatcgttcactcgtgttgaaatgaataagaaacttaattactctatgaaattcccagttaaacattaattccagagagatacatgtacatgaaactcctacgtggcttgttcgcttaatccgagagagagagagtgagggggattggagggaattaagagggaataatcccacaccataatagttatggaataaatcccctcgatccctttgtgggaggggttaatcaaacaaggtctcaacattaacagcaagtatgcaatgcaaatgcactgacgacattgttcaaggcgtttcctcatcaaagttttagaaaagatttaatggccctcgaaaggtgcggtactacaaatgtaaatttggtactatagtatctctcagttccaagaggataccctcctgctacagtcttaaggcccctttagaatttctcaagttgtattatcccactgggccatacatttgacagcatattacatcatgtaaaaaagaattaacagtatatcaagatctcgggatcaaaaaccttgatctcccttttctataatgaaagaaaatatttaaatgttgatgagttggtgctgaggtactatatataattatttttgcgtggatagacacctatgtgcatttgtatgatatcacataaaaggacatgttcggctgcgaaacatacatacggtgcggcaatcacaaagacagcagctgtagagctggcctgccaaacaggcccaaaatttgatgatcagaaaatattaagtctccccttttgacttgagaaaatgatggcatttggcttgtatagctaggcatggcagcgccaatgactctagtggactgaacgatagatatttatgtgaacgaaattaaagctaggagtatgaaaataaacaggcactagcgcatacgggtcaggcatatatatgcactataaaagagaagaaaacggtacagtggaatggagatattgttagttgttacttgaccttgtatctgcgccttttccacacgagtagacaaaatgtggaaaatagcatttgaccccgaggaagacctgcatatatatgccgaatgcattgcagcaacgtgaggatccacacaacatacaagttgggcagcaataaaccagagaaggtatagaaaaaacagcttataaaaatgattatattctaagacggagggagtacttcagaacaattcaaatgaaaactttatcaactacaaaggtttatatctcagagttctacaagttttatattggaaatatctccctccaaggtcggatgaatttttcaaagtttcgtttttaaaaaatagatcacaccttataatgtatattcagacatgtaaacaatctctcataaagatattatcaatattaacgttgtagatctggttgagctccacaactttgatatacggcatatctccatccatggtcattagaaaattttgaatttttgttttcttttaaaatatttcctcattccaaaaagaattcaatcctagtgatgaatctgaacatatatatagtgtaggttcagatttatttttagggttgggtattttatgggattgaggaagtcgatctcatcacctatatcatattagggtatgtataaacaatctcaaatgacaattattatcagttataaagttgtagatatcattgaggtactaagatcaatatgtaacggttgttgcactagtgccaggggcggagctagagtcatcagggggttcccaagaatccggtgaaaaaaaattgtaactaaaccttacctattatgatcatgtgtgcgctcctctcaatataaatttaggaacccgtatcaacttaaacttgatataaagtagagtaaattaaacaaatgacactcctccattttattctagctccacccagtgcagaggtactaggattattaatcatggacagacacctgcgtgcgccttgtataatagtattgcacaaattttggtattgataatagcaaaatataagtctccccgttgactcgagaaaatgtcggccgtttggcttgtatagctaagcatggcaacctactctagtggactaccgaacaaaatatttatgtgaacgaaattatagcgcatacggcatacgaaccatatgcactataaaagagaggaaaacagtacagtggaatggagatattgttactagttgtcacttggcctatactacaccttttccacgtacgcgagtagacgaatttgtggaaaatagcaaatacgactacgagtaagtttcttcttccaagtcgcggcctttgacccgagaaagacctgcatatgtatacatgatgcatgcatattgcagcaacgtgtggaacgatacaacctacaagttgtgcagtgtgagccagagaaggtacagaaaaacagctgccctcttgggttacataattcttgaaaaacatctactaacgttttgtacaatcacagagtcttccaaaatatatctttagctatattcttctatcataatatatataataaatatatttttttacttttgttataatacttggtaagacacatctatatatgttattccagtgtctttaaactaaatatttttaaagttattgattgtcaaaattacaaaaataatgatctcaatcttgtttaaaacataaagaattatgggaccgaagggagagtataccgacaactcaaacgtgcatttaggttcgatgattgaataatttttaccattcaacatttggtatcttgagatactttttattataaaatttgatatttttagtgtaaaatttgacacctcaagatacctacctaatacatcgagggatcaaatttttgcatgcaaaatgtggtaataggattaaattggttggtttgcgttgtggcttatccaaaccaaatcccgcggctctctctccagtgtgtcgatctgcctcgtggaatacgacgctacaccaagtgggcacatatttacgcagacatgcatgtatcataggttctatttgagaaattttgctgagattcagataagttgaatgtcagttgtggtacaatattaactggatgatatctgccgtgcttcaaccgcactattttttcataaatctttttatcggtatagtttaaaaaagtttccaagctatttgtcagcattattttctccggtcctgtaattcttaacgttttggacaacgttgagatcaaacttataactttgactatcaataattttaaaaatatttagtttaaaaacagtaaaagaacacgtatagatttatatatacttcctccgtttcatattataagactttataattgcccatattcatatagatgttaatgaatctagacattacgaatgtagacaatgctagaaagtattataatatgaaacggaggaagtattacaaaatacaataataaagtaaaaaagtatttatttattgcatactcccttcgtcccaaaatataagcatttttagttatgaatctggacaactgtatatccagattcataactaaaaattattatattttgggagagaggtaatatattataataaaaaaatatagtcaaagatatattttgaagaccgtgtcaatgcccaaaatatcaagaattatggaattggggggagtaaactatataatatttaattcatctttgtagataattttctatataatttttatcattatttagaaaggagatagacttaatttgtttaaaaaatatgtctaacatattaagtgtaacttaaaagtaaagtgtttttaatgaaatgtttagatgctctctttttaacatatcatgaaaaactattattgctaatacatatattttgtcagtatatcaaggtagctctccttctaattgattcacgttaatacagttcgttacatacttacatatgaattaataaagacaacgaagatatatgatcccttctatatgcgttatctatagttcttttttttaaaaaaaaaactagtcaacatgggttctaaaatttaatttaagagtaataaatataacttttaaaccaattatgtaatgctacgttagtgtggcttatatatgcaataatatatagagaaactaaaaaataccacggtatgaatagatgaaaggccattaatatctaatcacttaaaaatggttatgacaatggaaaacataatgatcttttgaaaagtaagaaccaattctttttaacgaatttattagattttctccgtatagctcaacttagtctccgttgacatgttctattttatacaagtcttattttaagtttaaaaatatatgtattatggatgttgaactattggtttaatatattataaatagagcaacatgtagattataaatcagatgtgtagtttacaaattacagtcgttttaatattattaatggtttcgcttttagtttgcggaaagagtgaaggttcaatagaaacaggcagagggaggtgtggagagcggagaacccgaaccaaaagaagaggggggcgcgtgtaatgttgtgcattggggcattgggaagattggagagggggaagtgaaggggacctttatttttctgatttttcagaacgatttaggtgaaaagcgataatcagatgtgtccatgtttatattggtaatattaattaaaatatgggctaattgtcgttattctacagcacgtaattggcggtcatgttctgttctgatatttacatggaatataagtcttccctaaaccggagaaaatgatggtcgttggcattatgtacatatagacggcggttgcgcctcctccaccggactggatatttctgtgaatgagacgcatgcatatggaaaaacaatggatcaatccatgcaccaccagtaagagatggaaatattagaatggcagtcctactgttaggcgctttaagttgacttgtcttagggcaagtacaaaaggtagagaccgatatagtctctatgttaattagaggctatcacgttacaatagttaagagaatacggtctctaaccattaatgtaccaaaatattttcttactagtcgtctttcctttattagactcaaaaatgcaacaaaaaaaattcctaataaatgctaagagtcgactctatgctgttgtcatgcatagcaaccatctttctttttcttttttcctccctcttccacgtcatcagatatacttacatgacaataaaaagagaccgctaataaagaccattgtacatgcccttatgccttttttccacacgagtagacgaactgtggaaaatatcactgctcgttaggcctctcaatagtcaatgcatatttatacggattttccaagtccgctggctttttcttgagcaatattgcacgcaacaaaagctagcaattaaactgatgctagggttgctagcttgcagttgcatgtcacgatcgaggaattggaaaatcgatggactgatggagtccactaaccaggagatcaggatgggtagacaaagcataggcgaaccgtggatgacgggggtcaccaccagccgctcagggccgagccctttggcgaatggcgccgtagtgcgcgtgcgggagctaatgcctctcggacacatatgtgccgacatcgacgacttgcccgcccgtacaagtcatgcacggacatgcacgccaccggccgaaattgtcaatttggcaacgccctgatgaaaggatatgcagcggcgtccgaagacatcgccattgctggtctatagaaattaacctaggctaggctttcacctgtttcctctctactactactctatcatcgcagtgatatttcccacaacccgtgacctgtgcaaacatgagtaccttgccgcaccagcactcctccagcggccatcccctgcccgccttcaaaacagaatactggggccttccactccacaaccgccaccgtgttgacatgtaacgtcccgtctcccccaggccgggcccacttacatctgatagttttcataggtcatagactgcccgcttaaccctggagttctttggagattggcttccgaaaaagaagttgcaacttgttcatatgagtattctattaatcctattaagccctaggccgggatgttacaccctcacccccttaagagagatcgacgccccctcgatcaaccctaagccaggaacgtcctctcttggccacgtccatgtgtccagtgccagcgcatgtgccatgctgtgtaaccactcccggtctacaccagccatgcgcaccatgcctgcgcaactgcgacacacgcgcccatgaaaccgcgagagtcagctctgataccatctcttgtcacgccccgaactagtaccgaccggaactagcccgtgacgctcccaattaacctgttaatcgataccagtcccaggaaacagtgctggtatcacaggaagacagattatcacagcaacagaggtctctttattatagatagagatacagtcatgttgggctgcggacagaccccgagctcacaactgcattacaaaaggaaagcagaagccaggactaggaccaaacatcacaggcgcgacttgggaactaggccgaaaccctaaaactcatcgtagccggcttgctcctggaagaactcctcatcagcaggatccgcttcatcttcttcagcaactggggggggattatttatatagagcaagggtgagtacgggagtactcagcaagccatgggaaataggtgtttattgcagactttcaaggaaaggctgttgttttagcaattgattttatttgaacccttttctgaaaacaactaagtgagtgcttctcaaacgacacggatgagacagtgcgtctcgtccggtcggagtatgtgcaatgtatcagtctttagaattgaaacaaggttggcacccggccaacagcttttcaaacggccacccgggccaacaactttcaaacggccacccgggcctagccgattccatcagttacagatttttcaaacatcgaacccctttccacaacagcaatttcacaagcagtagtccaacaaaactacgctaggaatcacctcacatccgcccatgaccgtgggcacggctgttcgaatagtttgttaacctctgcagagggggtacactttacccacacgacattactaacccggatcacccagcccatggggatcagccacgtcgggagacctccaagctttcatgacaaggcatttccaaagccgacacaggtttaccatatgccgacgagaggggtcccagaccaacaacaggttaggtcccagaccatactgtgccaggaagcccaggggtcctccccgacaccaccccggcgaatccacatgtctctcggcatcaaggctcccctgataagctagttactcagccaggggtgtcccattccacccatgtggtcgtacttgtcttatgttcggatgaaattccaaggaaacggtccttaagtgcaagagcgggaaaccgtacacccggtacgttccctggtccgcggttttggaaattcatttagttcgcaagcaccgacccaggtgtcgggttttccaagtcttttgtaaaactccagttttacccaagttgttactcaaaattttaagtttgaaggcgtccgtcgatactcgcgcagggtgcacgaatatcgagacgcaactagatggttacaaggggacatggtatcacaattaacaaaggaaggatcaaatgcaacaaattaggtaggtccgccaatctgccttgcagacgggacaagcagattaagtgcagtcctatcaatgcataatatttttcaagcaacataattaaattcaaatataggctcaagacgttcgaaggtggcttgccttgctcgagatctggagcttgatcctcgaaatcctcgcactgcgggtcttcgggctccgaaactacacgcgaaacgggacaactcaacaaacggcgaaaataaagccctattaatgacctctaagcgtgccattagatagatctggagatttgaggaattttggaagttgaacggagtcaaacggatttacggttgggaagatattgaatttctaagattattggatttttggtctaaaggaaaaggatttaattaaatcctttttaaaaagaaaagaaaagaaaaggaaagagggagggaaaatagacttcccttgggcggctagggcgcggcccgagagaaagggcggctcggccgagcttaatgggccggccggcccaagaaggcggcccagagcggcccaaggttcgcgcgcgcgggagggaagaagagagagagccagtggaccgggctcaccacgcgtggtcccgggtgggacccgcttggcagcggctcggctcaccgtgtggagggagcacgcggcgcggcgctagggtgggggagggacgcggtgcacgcgcgcggttcgcggtggacgcggatgcggcgggcccacgcgcagcctcacggctcacggtggaacgcgcgcacggggagggactgaccggggtcggctcgacccggtcttggctgagctggcgccgacgtggcgcctacgtggctgccacgcgggccggcgggaggtagacgacgacgccggccggaatggacggcggacgacagcggcgagcggcggagcgaaccacggcgatacaggcgaaagcgagcacaccgggtagttgcacgagacgaggggagacgagccaacggctcggattcgccggagggagtccgtcggcggcggattgcggcggccgcaaccggcggagagaaaaggggaaaacggcgacgaggtcacgaggggccgattcccggcggagagagcatctacgcggctacgggaatccgttgctagcgtcggattgggcggagctacgccgagcgaggccggcgacgagcgggtgctacggagctcgggcggcgacggcggcgagcacacggcgagcgacggcaacggtcggggcggcgccggctagctacggggaggctactcgtgctaccaccgaaaactaaggggggggagatggagcgaggaggaagaacggagggaggcactaccgtgcgggcggggcgcagtgacgagaggccgacggcgcgggagtaatctctccggcctcgggccaaggaagaggaagaagagggcgcgcccggagtccccttccgcgtccttgctcgtgccggctccgccgacacgcgcaacgacgaacggcgatggcgaacagagcacgagaggcggcggcaatggcgtggaggcgatgggacaacgagggagaagagagggagggcgcctgggctttaaagggcggcaatgtcggtttggaaaccaactttaggcggtctaggcgcgagctggcgctccggctagcggccaaaacagcgacaggaggt

SEQ ID NO: 6327 - DNA, 8155 bp, Oryza sativa
agggttcacggccttgtttaataatactgtgtagctctaggatcgtctttataaaatggctttgggcaactaagtgacttttaaatgctgcttttcagcaaaacttaacccctatattattaccccttgtacccccttgcattaatcatgcatctgtcggtgtggcttgctgagtactgtggttgtactcattcttgctcaatcttttcccccttcagtaagagaagctttggagaagaagtcttaggtggagtcttggcttataccccagttgagcgcctgtgaagatggagccgtaggcccgctagtccgctgctgtttatttttgattgtcaggcctgaagcgcctttgtaataatgtaattattatcgatataataaagatgtgtcttttatatcatgtttgtgtggtgtaccccggcttttcctgggacggggattaatacactagcgttcgggaaaaggcaattttcccggtcgcgacaagctggtatcagagccatctcgactgtaggataagccaagtggataaaacctaaggacatattttataaataaaactatttgcgaaagttcctctttttctccttcccctaatgctatttgcaaaaggtttacccttttcttccttcttcaaatttcaattagtactagttggtcagctttgtgaagaagaagacatcgtcagttgtttgccgaagctccggaagactgcaagatccgctagcgaagcaaaggaagcagtgaagccagctgtgaagcaggagtgaagatcttggaaaacccatcgcagaacctaagccaccctctagggtagagtcgtttgtcgtgtgtttccttgcttgtgtgtgtagcgcgtggtttgcatcagtggggtgtgatgtaaccatgctaggttgtttgcttaatcaacttgcagaataagtgaaacaaacagcacatcagcaagaagaattagttcctttaaggtcttgtccctagttctggtctattcttttcttgtatgcttcccctctcaacctctaccttgtgacagatggataatactggtaacaaaggctatgggaatgatggatccgatgactcaagaacccaagccaatgggaatgagagaagcaccaacgaaacctcaccagagctaatccaagttgtggttaaccaaaccaacatgttggcaacagcctttcaactattacagaattggagcagcccagcaggggcaaccaacgttcaagtgcctacagtccagcaacagtgcaagttatcagaatttctcaaaactgagcctccaatctttgccattgccgtcgatcctatggaagccagtgattggttgcgcacaatcgagaagaagctagggttgattcagtgcaccgaccaggagcgggttggcttcgcaactcatcagctggttggaccggcttcagagtggtgggatagctacgaggcatcacggccagaaggacataccatcacctggaacgagttttcctctgtattcaggagatcacatgttcccgcaggaatgatcacactaagaaaacgagaatttcgctacctgaagcaaggagatttgaccgtcacagagtacctgcacgagttctatcgtttggctcgctatgcaccagaagatgtggaaacggatgaagacaaacaagagaagtttctccaggggttaaaagatgagcttgcagtgcaactactcctagaggattatgaagattttgagaaacttgtggacaaagccatgcaactcgaaagtgagcataatcggatgacgaactgcaagagaaggattgtcaacatcccagtaattccatgtggtaaccaaagacagcgcactgagccacttcagatcaccggatcttctgttgtgcatcaagagttcctgccccaagaagacggacgcaatgcagacaacaacactagcaatactaatgatgatgataccaccaacaaccatggttcttgccccattagtgaccactcgaataaagcgtgcaatgtcagtagcattcaccaagatgtcaacgatagtatcaatgttggaacccagaatgacaaccttagcaattttgacactgagaaagactccaatggtgatagcaactatggtaccactgatgccaatgttagcaaggatttccaaccaccaattccaactccaagtcagaacgatcgtcctcagacggatagctcagcaaagaagacgttgatttgctacaattgcaaagaaccagggcattactcgagggactgcctgcaaccaaggcaaaatcgacctccacattaccgccaatttacacgaagcagacattccaattgtattgtggtcactggagcaaacgccgtacccgtaaggcctcgtgttaatcagaacccatagcagaaacaatgcaccaatgctcctcctgctgcacctgactcggcaataaatcatagcaaccattctctgcaccgacagcctcagcaaagaattgtcgtcgatggaagaaattgtgtctctccccgatctactccaggccgagccaagggccatcaacctccggagggcgataccaagcagaagaccgtcatccgcttcaaacagcaatcaaaaggaagcttctcctgtgaatgatagcattatgcagtcctatcacatcatcacagaaccaatcaaggatgcagtcactagaacaatgcccgctttatctctccaaaatcaaaatgagcagccacgcttgtggttttcagttcgctacctatcattgtgcagtcgaaagtttgcagcaatcatgtaattcataaatataatcatgtctgtaaacagtgagcttgctatgtttagagatgattcatgttgaggatacaatgtaccgatgataagcaccttccctttttgtttaaggcagtgccttgtattcgtgtgataagggagaaatgtgtaatacagacaagttctaagaggattcttttgaaagatgcggatatgtgatcatgtgtataattgtttactgacaaaggagacctagggtctcgtgtcagaggaactatattctaacctcgagttaataaccaacctgtggatggaaaagaaaaacaattaaactgtgttgggttaaaaagccaacgagacagtagttgaggataggagtttggatacgccttttacagatcaagataaggattgttggatgaaacccataagggtacctgccatgcctctacattgataagttcggatatacctgcaaacagttaagaagatccaggagacatcaatgtttgagaacatagtagtcgatggttggtaattagtctatcaagtatcagaagagggtcaaaggtgatatggcagaagaacaatttggatgctccccatctcgaggaagcactaaggatgatcatcggcaattaaaccctagtggtatagatacaaatagcaggcaatgtatttccctgaaggtagtcagtacagctttttgacgaaccacatcaaggtttcaccgaaaggcagcaagccaaaggacctcatcgtccccagaagcgtccgcaatccacattaaagaataccacctgttagagataggccgaaagatgattgataaaagagattggcaaagatgttctctagcatgaaagaagtaggccgaaaggtgattgataaacagaaacatgttctgcatcgctcaagggagacccctaattgtaattgccccgcaacagtcaccttgtcattaagtaagcaagatgacctaggtaaaagtgtttttatgaaggcaaagagtgaaatcttcaactcggtatcagatgctacacggagtgaaaagtgcaagcaccggttaccaggcaatgccatgacttgggaagatgatccaatgggaaagaacacatcaaggttaaaggtgtaaaggaatacgttgaatgctaactgaggacaacctgaagataataaggggaagtaaactgaatgtaaagaaagtgaatccgagttgcttgttcgtgagggctattcccagttatgaatcaagtgatatgttcgaagataatctacagaggtcagattaaaagcacatctaacaacgaagcctcagatttgacagggtaatgattagacaataacaaatccagcaataaagccattggagaagacgtcaaagtatgtcaagtgggataaattggttctcttgggaagcataacttatagttagagtggtcgacccttgcatcgaatagctgaagtacctagcaccggagaccaggaaagctaatatgagacagttgatggcaagttagaagtgaatgacaagcatgatattcttatgatgacaaacatagtatcctagtaatgacaagctagtgttgacgcatgacgtgaagtggtaacttgtctgaggttgactccgaagatatgaatcatgagaagttctggaacggaagcatcactgaactaccgcaacctagtctgagtcagccaaaaggtgcaccctggtccaagttaggtgaagagaagattccatccgcaacaggaggtcaagccaagcagttccgagtggtaaagttttgctggaagtttgtcaagacgcaacggaagaagtcagacaagaagagaagaccgcccaacctatcttcttgctagcctcctcgaatctcggggacgagattcttgtaaggggggtggatttgtcacgtcctgataaattcatcccgaaataaaaatcatcttctaaaaggaataatagaattaattaaaattcgaaaagaaattggcaaaccctaaaatacgtacaagaaaaattcaaatgtggcccggagaatttttgttaaattctccttggtctaaaaggagccctcaaattttagtggaattttcagagcacaaataataattattaagaaataaacaaagttgaaaaggttttataaaaagaaaaatccctaaaagtcttcttttcccccccttcctctcttgggccggctcggcccaactccccctctctctctctcctctccccccccgcggcccatcggcctcccccgcgcgcgcgccgctgacaggcgggcccgcccgccgccctcgctgacgggtggggcccacctgtcatcgccttcctcccgccgctcccgccgctcgcccgtgccctagcgccgccgccgccgccgaatccgccgcatcccgccgtccccgcgcgccataatgaggggggaatcattccccgcgattccctctcccgattcccccgcttttccctctctctctccctcggattcgttcggagttaatcccgcaagtttcgccggcgtcttcaagggcggccgagatctccgcgcccgtttcctccctctccggccgcgctctcctcctcccggtgctatataagcgtcccccgtgctcttctcctccgtttccgccactcgccgcctctcctccccgtcggaatcgagcccgcaccgtcgcaccttctctccgccgtcgccgccgagctccggttcgccgccgtcgtcgctccggacctcctccccactcggcgtcacctccatcggcttcgccgcgtccccgtcgacctcggccacccctccgcttcgctcgccgactgccggagcaccgtcgccctcgtcgtcccgaaccgcgccgccgccttcctccgcttcggccgccgttcccgtcgtcgccgtcgacccggggtgagccgaagaccgccctttcgcttccctctcctctccgctctctcgggcgccgctccgccgcgccggtggtcgccggcggtgaccatcggggcgcggtcgtgccgcctcccgtcggccgtgccggcgaggccgccttcgggcgcgccctcgcggctgccaagtgggcccggccgtcagccgcccgcgcccacgggtgcggctgacgcgtgggacccacggcgccgaccgccgccagccgcgtgctcccggtccaccgtggaccgagaggctgacgcgtgggccccactcccgtggacccggtccgcgcgccctctctctcggctgacgcaataaatgagtttttaattaaaatttaaatgaagaaattcgcaaatatccatttaaagagcatataaacttcaaatggccataacttggccatttgaactcggaattggaccgttcaagtctctaatttttccttaagaagtaaagaacccatttttgtgctttgtttctgttgttgtatggagtttattagagtaaaagcctttttcttttccgttggtcgtgtagacgctgcagcttcggaagatccgctcttcgtggaagtcgaagccgtcggttgggaaagcgagcaaggcaagtcacatcatccttgagcatattgaatcccagtttacaaaattatttttaatttaaattaatgcattatcgctttatttaaattcccgcgttatcactgttttatttagccatgcctatttacctttgttatgaccatactattattgttattgttattattaccttgttcaccctagaataaacaaaaccccaactagtggacactctatttatggttccactagtatgaatttaggtagatgcttcgctgattaataggacaacattaggtggttttataactttagactttgggaattctcatatcatttggacactatggaatggttggcttatgttggaattggacacacacctccccctcttttcaaaacccccaaaatggtttaggctgggctcgaggtgcgtggttgggttttgttagtcgtacctcgggtactataaggattaagcttgggcctctgttgcaaagcactaccgtacttccacatgtctaatgggtaaggcttagtttgtggctcagtctagtcataaacaaaagtacacggattggagatggatgaagtcgggtgtcgatggacattctccagggcaaatgaaggctacacgagctgcggcccggtagtcgagatgtcatatggcagagggttggtgccctgctgctaggggctcagttctgcctacctgtcccgggtatcccggccgtaggtgggattgggtcggtactcttgtctatggctaggatgggttggaaactatgtcacgtctttcgtccgtataccgtggtggtatgtggcacgtggtcacacgtgaggaagatgtgtcttgtgggtaaagatgtacacctctgatcagagtaaatctattcgaatagccgagccctcggatatgggcaagcctagcaatgtacccaagtcagtgtttcaattcttaaaatttgctcaacaactaaaatgtggaatggttggcctgggttggcttgggacgagctgggacccagggtcgggttgccagttcggtctgaatcatcgtaggccttgggttaaggcaggttcgtgagggttcacggccttgtttaataatactgtgtagctctaggatcgtctttataaaatggctttgggcaactaagtgacttttaaatgctgcttttcagcaaaacttaacccctatattattaccccttgtacccccttgcattaatcatgcatctgtcggtgtggcttgctgagtactgtggttgtactcattcttgctcaatcttttcccccttcagtaagagaagctttggagaagaagtcttaggtggagtcttggcttataccccagttgagcgcctgtgaagatggagccgtaggcccgctagtccgctgctgtttatttttgattgtcaggcctgaagcgcctttgtaataatgtaattattatcgatataataaagatgtgtcttttatatcatgtttgtgtggtgtaccccggcttttcctgggacggggattaatacactagcgttcgggaaaaggcaattttcccggtcgcgacatgccgccgccttgcgccccgcgccgccgctgccacgctgtcgccgcgccgcacgcccgcctgccgccgtgcaaccgtcccgtcgccgcgccgcgcgcccgtcccgtcgcgccgctgtcccgccgctccgcgcgccctcgcgcccgtcaccgaccgtcccgtcgccgcgccgcgcgcccgtcatgtcgccgctgccgccccgtcccgtcgcctcgcgccccgctcgccgcctcgcatcccgcgccgctgccgcgccgcgttgtcgtcgcgtcgccgtcgccgtcacacctagccgcgccgagccccgcgcgccgcc

SEQ ID NO: 6328 - DNA, 17263 bp, Oryza sativa
  unsure (1)..(17263): unsure at all n locations
gttcccgtgccgccgcgctgccgttcccgcgccgccgtgccgtcgctcatgtgccaccgtgccgccgcttctgtgccgccgtcgtcgtcgccgctgctgccgtcggtgagccgccctccttccccctcgcgtccaccgccgccaccgctcgggtaggagggagagccgagagagagagagagccgagagaaggagaggaagaagaaaagaaaccgagcgagggagaagccgaggaagagagaaaggagccgggagggagagaagaaagggaaaaagaaagagaggagagaaagaaaagaaaaggaaaagagagaaaaagagaaaaagaaaagggagaagagaaaagaaaagaaaaaggaaagggagaaaaaggaaaaggaaataaataggaaattagagggagtttggggaagtttagaaaatttaaaataattagaatttaattatagattaattatagtcgtagaattgcaaaatttaatataaattatggattattcttggtaatttctataagaaatcaattcgcggtagtaatttagatgtaattaataactaaacaaatagatgaattcttacagattattatagattatttttgggtaatccctataagtaatcgattcacggtagaaattcggatttaatcgctaggaattttagacgtatattatatttaatcgtttagtcatagactaaattaaattgtataatatttctaggatttcgtccaatatttagctcgtaatagaaatttctaacctattatatacaatgctcggggagagtaaattattgacaacgaaataattatacccgcaaagtagtttaaatcgaaattgggtttgccgtagtttgcagatagtaaagttaataaaaaggaatcgactttatttggatttatttggatttttatttgaattctaaccgaattcaaatcaatttttgcacgtaactatagagcccgagggagttgcggatccaagcgaaggccaagacccgcaagactttgagcaaggcaagtcatcactattccttgaacatgttgatcctaattgcgaaattgttttgtttacaaataaaattgcatgcaatgatgaacatcctacttgtgattatgccatgccttgattattgtttacccttaaaatccttgtacccatgattacgtatgagtccctagtcaattatgacaattgcttagaaatgctattctagaatcatgcatactcatatttatcaaatgctatatgcttgggcaattacctttgggaaggtaattgagatgcggcatgtggagacatgagcgccacattgccatgatgttgatgacatgatttgtgaaaggagaaataaaattaaacaactgttttcgactggggcggacggaggatttgggtggtatctggaaaaggctagtaccgtccccggtcaattaaggaccgagccatgaagttaagcatgaaacgacccccgtacaaccgtacttctcgaatgggtatagacctagcggattagatagccgagcggaggcagtatccctgcatagatggttcacccctgagtgaggcaggtgcgctacaatgggacagccgttgaggtagggccgagaggcgtaccctacatcggtgtcgccattggtaggactgccatgagtgtgttagagagagaacttaacttgaaccataatttaatatgcgtgtgagacttctctttcccgggagcgccagaactcctctcactgctagaaacatggacgcctagagtgcatgaggatttaagttcatggagcgggtactgccaatgcgaggttatcgaaaagctttgccgtgacgcgtctcatatgttgggacgaggctcatgtgttgggcagtcgcggagtgcgggtaaagtgtacatccactgcagtgtgagtaaaccaaatctattcgaatagccgtgctcgcggttattgagcaccgggacatgtattacacttggctagactctaaattcttaacttgtgtgggaggggatattgcatgatgaattttatgctgttggagccacttcctgagaggcgggaaggtggacgtcctcagaaaaccatgacgaatcaatggcgggaagctatccttgggatcacaatggatggtggacagaaccgtcgttgtttaaatacaaactctggtactaaaatttgatcagtcaatgctaggtcttaggcttgtgaaaagaattacaaaacttgctttgcgcaaaagaactatggccatcctttgaactccccctttcatatgcattgttgctgtggtggcttgctgagtacggttggtactcatccttgcaaatataaaatttatcagaagcgggagatgaagcctcggaggatccctatgcctactatcaggagggagatgaagacgatggcgtccagtaggtcttagtacggtcgttgcctgtggcaatggcatgccgctgcctgaattccgctgccttatctatttctgcttttggatgtattccggacctctcggtccgatgatttaagactatgcctgcgggcctatgatgtaataattcgtattagacactcgtgtatgtgcacttgatattccagctatgaattcgtgtgtaccaaactacttgatccagggaaatggtactgtttacacgattgattcctgttataaaaacaggggtccacagcgcgccgcctcccgccggctgtgccggcgtggctgccttcgggcgcaccgtgcgcctgccgtgtggggcccggccgtcagccgcccgcgtcctcgggtgcggctgacgcgtgggacccacggcgccggccggtgtgagcccgggtgcgcccggtctatcgtggaccgtgaggctgccgcgtgggccccactcccgtggacccggtccgcgcgcccttcccctcggctgacgcaataaaccttttttttaattaaaatttaagtgaagaaattcgcaaatattcatttaaagagcatataaacttcaaatggccataacttggccatttgaactcggaattggaccgttcaagtctctaatttttccttaataagtcaagaacccatttttgtgctttgttacagcttgttatatggagtttattagagtaaaagccttttcttttccgttggtcgtgtagacgctgcagcttcggaagatccgctcttcgtggaagttgaagccgacgtttgggaaagcgagcaaggcaagtcacatcatccttgaacatattgaatcccagtttataaaattattttgatttaaattattgcattatcgctttatttaaattcccgcgttatcactgttttatctagccatgcctatttacctttgttatgaccttattattgttattgttattatttccttgttcaccctagaataaacaaaaccccaactagtggacactctactcatggtaccactagtatgattttaggtagatgcttcgctggttaattaggcaacattaggtggttttacaactctagactttgggatattcatatcacctggacactatggaatggtttgattattgtggaattggtttcacacctccccctctattcaaaaccctcaaaatggttttaggctgggctcagggtgcatggttttgatagtagcacctcggccatataaggaccggtctgcgggcctctgttgcaaagcactaccgtacttccacatgtctagtgggtaaggcttagtttgtggctcagtctggttataaacaaaagtacacggattggagatggatgaagtcgggtgtcgatggacattctccagggcaaatgaaggctacacgagctgcggcccggtagtcgagatgtcatatggcagagggttggtgccctgctgctaggggctcagttctgcctacctgtcccgggtatcccggccgtaggtgggattgggtcggtactcttgtctatggctaggatgggttggaaactatgtcacgtctttcgtccgtataccgtggtggtatgtggcacgtggtcacacgtgaggaagatgtgtcttgtgggtaaagatgtacacctctgatcagagtaaatctattcgaatagccgagccctcggatggagatggacgaagtcgggggtcgatggacatctctaggacaaatgaagtctacacgagctgcggcccggtagtcgagatgtcatggcacagggccggtgtcctgctgctaggggctcagtcctgcctacctgtcccgggggtcccggccgtaggtggggttgggtcggtactcttgtctatggctaggatgggttggaaactttatcacgtcttccgtccgtataccgtggtggtatgtggcacgtggttacacgtgaggaagatgcgtcttgtgggtaaagatgtacacctctgatcagagtataatctattcgaatagccgcgccctcggttatgggcatgccgagcaatgtacccaagttagtgttttaaattcttaaaacctgcttaacaactaaaatgtggaatggttggcctgggttggcttgggacgagctgggacccagggtcgggttgccggttcggtctgaatcatcgtaggccttgggttaaggcaggttcgtgtgggttcacgaccttgtttaataatattgtatagctctgggatcgcgtttacaaaatagctttgagcaactaagtgtcttttaatgctgtttactgcaaaccctaaccctttatatcttaacccccttgtactcccttgcatttatcctgcacttgtgggtgtgtcttgttgagtatggtggttgtactcaatcttgctcaatttttcccaaacccagaagaggagcccctggaagataaaggctttggtgtctagctcgtgcctgctgtcaagcgcctgtggtcgtcgccctagtcttccgttgtttcccgtttgtctttgtgtgtgctgagccttcgctgcccatgtaataaattaactatttacgcttccgcttgataaactctgaaatgtatcaacttttggtgtaccttgcctcctgggacaaggaataatacacgcatgtaaggaacgcccattgggttaattccggtcgtgacaacttcctcaggagcgtaccgagccaacttgttgaacatacttaggtactcattgacactgctgttgccttgcttaagtctgttgaattcatctttcttcatgtcaatagtgctttcaggcacatgagctgcacggaaagccgtagcaaactcatcccaagcaatgttagtgggttcagggtgtgcattgcagtaattctcccaccaatctgcagcaagtcctcttagctgttgagaggcgtagagcgtcttctcaaccggagtacactgcactaagttgagttttctatcaacatctttcagccaatcgtcagcctcgacagtctcgacggtctgagagaactctggcggacgagacatcagaaaatctgtcagcttggatctattgttgctcatgtgagggtggccatttccatgcgcattatgctgaaaaccggctacggctgcggctaatccttgcaagatttgtgtctgaactgccatcaggtgctgcatgttgttttccacatgaggtggggaagggaggcgttcttctccagaattgtgactggcagggcggtgagagcggtgagactgttccatctctgcatcacgggaagctgtgcgatgcgagcggttgctgcggcggggttgctcaacttctgcgttgcgggaagcagtacggtgcgaacggttgctatggtgagactgctcattagctgactcatgattttcttctggctcaactctaccttcttcaaaaccgaagcaggctggtgcacgagctgcacggcggggacggctagccatctaaactcccagaagagggcggggtaagagtcagataagcacttaggagggcaaggagcaaagtaaatagcaactcagatagcacacacttggcataaactggatttttcaaatcataaaaacacctgatacaacgggtgtggacaagtcacagagctacgccgagcttgactgtgcgcacaccacctaggagaaccagactaccaaacaacacccacaacaacacacgcacgcactacctcgccacgactccaaaagagttggcggcggaacaaaagggcctaacacacggacggctgctgaagactgcctcctctactcctcgtcggcctggctgcctcctgtagtcggctcctcagtcgaagaaacgtcgatcggctgacgcgaagggaccggcggaacctgtcgagggccggcagcagcacgggccgctggcggtgggggagctgggtagtggaaacggaacacggtggaagaaccaacaacacgcttccgcgcagtgcggataaagcataggccacagcgggaggaagcaactggggtgtgtccgggggtgtaggaagggctaactgggtgtgggtagggggagtacactggcgagtacggcgcacgcgagctgggggagcgcgggccactgggagtgcgggcagagccacgggagctgtgggaggacaggtggctggcgtgacagagacggcctaagtcccaagagatagtgtcaactgaggtgacaccctcctcggccagacgggcctccaaggcggcgtagcggcgggcaagggagcggtaagcctcaaggagtaggtcgtgctgagtggcctgagcctccgaaagctcaaccatgcgagtcagcactggctgagactcgctgtacggacaagggtacctggcgtctgcgtggccagaaggaaggcgtggaagctgccgaaaggcggagcccccgagacggtggctgtagtcgtgggccaggcgacgaagcgcagtccaggagaggtcctggtacgcgatctggagagtgggcctggccacagtgaagtggtgtgggcgaaggccagctccgtgtatacctccacgggggtaaaggtacacagagagctcacagtgagggggaacacggtccatggagtaccccgtgtactcgggacacgagaagccaaggaaacgggcgaggtcacgaagctgagcgacgtggtgaccctcaccaaaaccgtgggaactgaatctggcgttcactgccatctacaattttgaaagagggaggaaaagatcagtaacaattttagaaacaaactattggaaataaagaaaacaaaagaaaccttagcttttcgtaagtagttttgaacttagtatccttagggtcgtcctaagcgtcgggtttcgccctagggccaagcctatgctctgataccatctcttgtcacgccccgaactagtcctgaccggaactagcccgtgacgctccaaattaacctgttattcgataccagtcctaggaaacagtgctggtatcacaggaagacagaatatcacagcaacagaggtctctttattatagagtagaggtacagtcatgttgggctgcggacagatcccgagctcacaactgcattacaaaagggaaacggaagccaggacttggaccaaacaacacaggcgcgacttgggaactaggccgaaaccctaaaactcatcgtagccggcttgctcctggaagaactcctcatcagccggttccgcttcatcttcttcagcaactgggggggggggattatttatatagagcaagggtgagtacgggagtactcagcaagccatgggaaataggtgtttaatgcaggcttcaaggaaaggctgttgtttttgcaattgatttttatttggacccttttctaaaaacaactaagtgagtgcttctcaaacgacgcggatgagacagtgcgtctcgtccggtcggagtatgtgcaatgtatcagtctttagaattgaatcaaggttggcacccggctaatagcttttcaaacggccacccgggccaacaacttttcaaacggccacccgggcctagctgatcccatcagctgctgatttttcaaacatcgaacccctttccacaacagcaatttcacaagcagtagtcaaacaaaactacgctaggaatcacctcacatccacccatgaccgtgggcacggctgttcgaacagtttgttaacctctgcagagggggtacactttacccacacgacattactaacccggatcacccagcccgtggggatcagccacgtcgggagacctccaagctttcatgacaaggcatttccaaagccgacacaggtttaccatatgccgacgagaggggtcccagaccaacaacaggttaggtcccagaccatactgtgccaggaagcccaggggtcctccccgacaccaccccggcaaatccacatgtctctcggcatcaaggctcccctgataagctagttactcagccaggggtgtcccattccacccatgtggtcgtacttgacttatgtttggatgaaattccaaggaaacggtccttaagtgcaagagcgggaaaccgtactcccggtacgttccccggtccgcggttttggaaattcatttagttcgcaagcaccgacccaggtgtcgggttttccaagtcttttgtaaaacccaagttttacccaagatgttttttcagattttaagtttgaaggcgatcgtcgatactcgtgcagagtgcacgatttccgaggggcaactgggtggttacaagggaacatggtatgacaattaacagaggaaggatcaaatgcaacaagctaggtaggtccgccaatctgccttgcagacaggacaaacagattaagtgcgatcctatcaatgcataatatttttcaagcaacataattaagtttcaaatataggctaaagatgttcaaaggtggcttgccttgctcgagatctggagcttaatcctctaaatcctcgcactgcgggtcttcgggctccgaaactacacacgaaacgggacaactcaacaaacggcgaaaataaagccctattaatgacctctaagcgtgccattagatagatctcgagatttgaggaattttggaagttgaacggagtcaaacggatttacggttgggaagatattgaatttctaagattattggatttttggtctaaaggaaaaggatttaattaaatcctttttgaaaaagaaaataaaagaaaagaaaagagggagggaatatagacttttctcgggcggctagggtgcggcccgagagaattggggcggtccggccgagctaaatgggccggccggcccaaggcggctcaaggtggcccaaggcgcgcgctcgcgcgggagggaggagagagagagccggtggaccgggctcaccacgcgtggtcccgggtgggacccgcttgtcggtgattcggttcaccgtgcggatcaagcacgcggcacgcgcgcgcgggcggggctgggacgcggtgcacgcgcgcggttcgcggaggaacggatgcggcgggcccacgcgcagcctcacggctcgcggtggaacgcgcgcacgggaggggctgaccggggtcagcccgacccgatctcggccgagctggcgccgacgtggcgcctacgtggctgccacgcgggccggcgggaggtagacgacgacgccggccggaacggacggcggacgacagcggcgagcggcggagcgaaccacggcgatacaggcgaaagcgagcacaccgggtggttgcacgagacgaggggagacgagccaacggctcggattcgccggaggatgcccgacggcggcgaattgcggcggcggcaaccagcggcgggagaagggggaaacggcgacgaggtcacgaggggccgattcccggcggcgagagcatctacacggctatgggaatccgatgctagcgtcggattgggcggagctacgccgagcgaggccggcgacgagcgggtgctacggagctcgggcggcgacggcggcgagcacacggcgagcgacggcaacggtcggggttgcgccggctagttacggggaggctactcgagctactaccgaaaactaagggggggagatggagcgaggaggaagaacggagggaggcactaccgagatgaggaggggcgctgtgacgagaggccgacggcgcgggagtaatctctccggcctcgggccggggaagaggaggaagacgagcgcgcccggagtccccttccgcgtccttgctcgtgccggctcctccgacacgcgcaacaacgaacggcgacggcgaacagagcacgggaggcggcggcaatggcatggaggcgaatgggagaggaaaggaaagggggaagctcgggtttataggatggcaatgtcggtttgggaaccgacttagggcggtcaaaggagagggctagcgctcggcggtcgcggccaaagcggcgacagggaggagggaggaggatgacgccggcgggaggaaaaaggggaaaagagggagagaaaagggggcttgtccccttgcctcttcgggaaaaggaggagggagcgggggtgacgcggcagagggaggaggagctctgcctccgtcccttggcagcttgtgcgcggagtggcgggggccgggcgatgacgacggcgatgacggcggggcggtgtggagcggagcggcgacacgagcgacaggcacggcagaggctgacggcggcggcgaccaggcggtcggccaccacggcacgcgcgcgcgggaaacaacgggcggcgcggacggcgcaggcgcggcacgcgcgctggctcgcggggtcgagcggctgcgcggcagggcagctgggccgggtggcgcagacggcgcaggcgcggcacgggcggcgaccacgcggctctcgcgcacgcgcgggcagagcgagggaggagggctcggctcggcgcggctcacccccccccgcaaaaaaagcccgagaggagcgggncgcaggnacagcacccanccagagcnagnnccgccgccgnngcanaggncccgcgcaccgggggagatgggccgagataaattcggcccatcgaccccgggggaggcaaactagacttttgcggaggaatttgatttggaagggtttggattcggaattgaactcgacgatagatcggggatttgagatcttgagatggcacgagcactagacaacaagcaaagaaacaaatttcgcaattaggtttttaagagataattttcccgctaggcgccacgacggaacgggcgctacagaccaacccccctaacaagaatctcgaccccgagattcagtacctaagggagcagctccgggaactcggcgcggagaagatcttctcgctcccaggttgcctcatcttcagaatggttgctccattggactttgtagaacttgatggtcttccttcgagtctgacgttctgcctcttcaagaaccttgatcggtctttccttgtaggtcagattcttttccagctcgatattacccagggggacttgctcttctggaactcgaagacatttctttaactaggatacgtggaacacgttgtgcacatctgcgagacctttaggtaactcaagctgataagccacttcgccacgtctggtagttatgaggtaggggccgatgtagcggggtgctaacttgccggacatcccaaaccttctcataccacggaggggtgatacccgcaggtatacatgatctcctttttcgaactcaaggtcacgcctccgattgtcagcgtaatttttctgacggttctgcgctgtctttaaacgttctcggattagcttaacttgttcttctgctgacttgagtatgtcaggatcgaataccagcgcttcgcccacctcattccagcacaagggagtgcagcactttcttccgaacattgcctcatttggcgacatctgaatgttggcctgataactgttgttgtatgagaactcagtatacggcaaacaacgatcccaagtgccttcgaaatccagggcagacgcacgtagcatgtcttctaggatttggtttaccctttctgtctgaccatcggtctgcggatggtaggccgtactaaaatttagatcggttccgagggcttcgtgcaactgcttccagaaccttgagatgaactgagtgcctcggtctgacacaatattcttgggacagccaaatctacatacgacatgggtcatgtagagttctgctagtttctttccatcaaaggtggttttcactggcacgaaatgagctgatttcgtaagtcggtccacgattacccaaatggagtcgtacccgctaggggttcttggcaaaccggtgatgaaatccattccgatctcttcccatttccactcgggaatcggtaggggttgcagcagaccagctggcctctgatgttctgccttgactctttggcaaatgtcacacaaggctacgtattctgcgacatctcgcttcattccagcccaccagaagtatgccttgatatcttggtacatcttcgtacttcatggatgaatggagtaggcggactcatgagcttcctttaggatgagatctcttaactccttcttggccggtacacagatgcgtggaccgcaccaaactgtgccttgttcgtctatggagaaattggtgtctttcttctcctgtattctttttattaactcttttatcccttcgtcatctttctgagcttcccggatttgcgactctagggtaggctgtactgtcaagctggcagggacacctgactgtaccacggtcagccttaacttctccaattctctgcacaggcgatcttggttaggccgtatttgagctacattgcaataggccttgtgacttagcgcatcagcgaccacgttagctttaccggggtggtactggattccaagatcgtaattcttgattagttccagccatcttctctgcctcatatttaactcggtctgagtgaagatgtacttaagacttttgtgatcggtgtatacttcacatctgttcccgattaaatagtgcctccagatcttaagagcatgaaccacggctgccaactcgagatcatgggtgggataattgacttcatgaggcctgagctgccgggatgcataggccacaacctttcgttcttgcattaggacacatcctaagccttgtcttgatgcatcacagaagatctcgaaatcttttcggatatctggcaaggtgagaactggggcagtggtcaaccttttcttcatttcttgaaagctgtcttcacaggctgtagaccattgaaatttcttttccttctttaacagctcggtcataggtctggctagcttggagaatccttcaatgaatcttcgataatatccagctaagccaaggaagctgcgaatctctgacacattcttgggcgggttccaagcaagtacagcttcaaccttgctgggatctacttcgacaccgttggaggagatcacgtgtccaagaaatgctactcggtctaaccagaattcgcatttcgagaatttagcgaatagttgatgatctctgagcttttccattatcagcctcaggtgttcggcatgttcttcctcgttcttggagtatatcaggatgtcatcgatgaacaccatgacaaactggtccaagtaatccataaagattttgttcattaagttcatgaagaacgctggggcattggtgagtccaaaggacatcactgtgaactcatatagaccataacgcgttgagaaagcggtcttcgggatatcttcagatctgatttttagttggtggtaacctgatctcaagtcaattttagagaaaactcttgctcctttaagttgatcgaacaaatcgtcaatccgtggcaacgggtacttgttctttatagttacttcattcagggctctatagtcgattaccattctctcagagccatcctttttcttaaccagaagcactggggctccccaaggggatgagctaggtcgcacataacctttactctccaattcttcgatttgtcttttaacttctgctaactcattagctgccattcggtagggtctttttgcaattggtgcggtgcctggtgccagttctatggcgaactcaatctctcggtctggtggcatactcgttaattcttctggaaatacgtcgggatattcacagactatgggcaccgactccaaggaggtgacttgtaaacaggttaggatagaccgacttgcggtaggagtgttagaggtaaagcggacttgctttcctccaggtccttgcaaggtgatggacttttcggcacaatctatctgtcctttgtgcttagccaaccaatccatccctaggatgatgtctaagctttgtgagtctaggactatcggtttggataggaagtcaacttcctcaattctaaggttaacttccgggcatatttgagttgcccttatattcctcccaggggaatgtactatcattggtacacgtaaattttgggttttccaaccatttcttttcacaaaagcttgtgatatgaaggaatgggaagctcccgaatcaaacagaactattgcgggtacggagttgacagagaacatacccatcacaacgtctggagcatcctgagcggtctcagcttgaatgtggttcacccggcctcgaccaaagttgttggaagcacgtgaaccttgtccacttgcctgagagctaggacgagactgagctgccactggagtaggagtcctggcagtgctgccattagcatgccctgagttggtgttggtaggattctaagggcactgtctggcatagtgacccatctggttgcactggaaacactgaactgctgacggtccctgcggtgtcttgaaagaggtaacactgtttggcgcagtattgccactaggggcacgctgctgtggctgaggtgccggacggttcatctgaggacgaggggcgtagcctggctggcggttagcctgagtgaccgactggtggtattgcatgggttgaccgtagcgagggcgaggtgcgcctcgggaagaatttccctgatggttagacttgcgtttcttgtattcttcggtagcctcttttctggcatcatcaagtagaagtgccttgttgatcatatgttgaaaagtgggaaagtcatgagcgagcaactagagtctcattccaactgcgatccctttcaagaacttcctgatcttcttcttgtctgtgtccacttctgtcacgtcccaaaacgactctaaaatacatcctctaaattatgcctagaataattaaaatccgtgtgaaagcctccaacaattaaaatgtgcaaagttaaaagtcaaataaggcttggaggatttttgtatatttcctaaaagcctaaaatgcgtaaataaattttagtggaattttcagagcacaaataataattattaagaaataaacaaagttaaaatggttttataaaaagaaaagctctaaaaaaatcccctttccctccctctccctcttgggccggctcggcccatctccctccccctccctctcctctccccgcggcccatccggccttcccccgcgcgcgcgccgctgacgggcgggcccgcccgccaccctcgctgacgggtggggcccacccgtcatccccttcctcccgccgcctcgcccgcgccctagcgccgccgccgccgcgaatcccgccgcctcccgccgtccccgcgtgcaatcaataggggggaattattccccgtgattccctctccctttccccccacttttccctctctctctctcgcgttcaaacgggcggatttgcccccgcaaatctcgccggcgccattgatggcggccggacctcccgcgcctattccttccccgccggccgccctctcccccttccaaccctatataaaccctccccgcgcctcctccgtccgtttccgcctctcgccgcccttcctcctcgacggaatcgagctcgcgccgtcgctctctctctccgccgtcgccgtcgagctccggtccgccgtcgtcgtcaccccggaccatctcccaccccggcgtcgcctccttcggcttcaccgcatcctcggcgacctcgtccacccctccgtttcgctcgccgaccgccggaacgccgccgtccccatcgacccgagccgcgccgccgccttcctccactacggctgcctttccgtcgtcgccgtcgacctagggtgagccgtggaccgccgcttcttttcccccgtcccttcccctctctcggccgccgctccgccgtgcctatggccgctgccggcgaccataggggcgcgggcgcgtgtaacaccctgaaaattcgaccgacaaaaccaaaactctaaaaatacggattttcaaaaactttttaaactaattgcatcatgccaatcttattcgtctattttatctggagttgatctcgaagattattaatcgtgagtaaagaatagctaattagaaataaaccttaaaaacaaattggtaaaataaatataaattaaaaataaagattaggtgtggatagtaataaataaaatattatcgcgaccatgtttggatcaattaaatttcattgcgatggaataagaattaaccctaattaaagctcaaataaattatataaaaataaaatatgagtaatattaatctagggtgaattcattagttaagataacacgaatattgagtaaaatgcatatatgtaaaattaggaattgtggaatcaaatttagatggaaaatacactaaaatcgggataaataggaaaagtcactgttcattgcgcctaaggtgttcgatgtggtccctagccttccccctcctctcccacctctgcccctagccgccccgagaccgtccatcgcggcgccgctgccgcgccgcgtcgccgtcgcgtcaccgtcatcacgcgccgtgcgccatcgccgtcgccatcgttgccgtcggcctcgcgccccgtgccgccacctcgagccccgtgccgtgtcacgtcctgataaattcatcccgaaataaaaatcatcttctaaaaggaataatagaattaattaaaattcgaaaagaaattggcaaaccctaaaatacgtacaagaaaaattcaaatgtggcccggagaatttttgttaaattctccttggtctaaaaggagccctcaaattttagtggaattttcagagcacaaataataattattaagaaataaacaaagttgaaaaggttttataaaaagaaaaatccctaaaagtcttcttttccccccttcctctcttgggccggctcggcccaactccccctctttgtctctcctcgccccccccgcggcc

SEQ ID NO: 6329 - DNA, 13292 bp, Oryza sativa
attcctgcagccccaatctaatagctaattcatacttaaaaaatacaatagttaactacaaatatatactacatcattaataattggtcccgcatatcatacacacataatgtatggagttcgtgttgcagctggctacaaatttataagagcaggtacaatagcaggctatatgtcaactataaacacatatcgaggagatgaaagaagacagagatgagcagcggactacagatttgtaaccaactatagcacgagcttcaagacgaaatgtatatatgacaggtgagaccatatattaatagtgtagtatacatttatatgttactattatatgaattgtctgcaggtgatttggagccagttgttggctatactattaaacttgctctaacatgcttctcttctctctctcatctcttatcttctccacataagtttgtagtcgacttgtagtttattattgtacctactctaatggacacttcgttagacgatacagtcgcctgccgccgcactgctgtcaccgctcttttagaagaacaccggcctagaggggcctgcagcgatttttttttattttcccgaacctttctattttatctttaattttaaagaaatcttttaaaatttatttttattttcaacatctgaaccttttagccatactagctgaactagcgtggcaaaacaacactatcacattattctagctaacgtgacatcgttatttagtcacactggtctagttggcgtggcagttttatctaagtgacgtggtaggataaaactatcatagctgttgtatgtggtgcatgagtattgttttgccacgagagagctgacatggccaaaaggttcatatgaagttttggttggatttatatttataactttttaaagttaaaataataaaaaatttgcctgcagcgacaccgtgccactggtgagcatcacgttcacggccggcctctgctccgggttctcctgtacgtagggcagcccgacatggacgcaccgcgcgatcgatctgccaccccgcctacgcttgctcgctcatcggccggtccaccaccgcggcgatgtcccacaaggttcagtgctcccaaatctgcgtcaagtgttcgtagcttcttgagtggtcacagataaagtggcatgtgttaatctatattgaggcgagtggatcgctggggcgctcacgatgcttagcagatcggcggattgcattgctccaagttgtaggagccgctgtttctcttcttcgtcgttacgatctacaggatcaggacgctggggtgaaagtgggacgggttgtggcgccccgcatcgcatcgactgcagaagtcccacgcgggccaacgggcaaccagtcccgcactgaactgcgggaattttctgtcaacgggtgtcgcgggttagtcttagagcagatataatagtcagctataaatatattttaatgagataaaaaataagagagaaaagcagcgggctacagatctgtagccagctgcagcacggactccaagacgcaatatgcgtatgacaggtgggaccatatgttaatagtatagtaagcaactattttattaattggctattagatcagttatagataaattggagttaatagtgggctatactattgaacttgctcttagctagcccgcaacgtgaaatgaacgaacagttcagacagaccaacaatgatccccgatttatttaaatgcaattaagactggcaggaatggaccaggcaggtgcaggaatcgaaccacttggaacaatgcaagccaatcaatcaaatggaaacagcaaacaccaactaatcttcctctggaaaataatacgggaggagctgcggtagcgacggcggcgaccacgccctccagggcgaggaggcgcttgacgaggccctcggcgaggagcgcgtcaacgatctccttgcggccgtagtagccgacgcggagggcgaactccagcgcgagcgtgcggatgcgggggtcggcggagcagagcagggagacgagccgggggagctcgccgcgcgcgtggagctcgtccacgagcgggctgcggatggcggccaaagcccgttcagcggcgcagcagcgccggcgaggctgaggcggacgcggacgcggacccgaccagcgcgccgacggcgcgccccatcagcaccggcccgacgaacacgtccttgttgaagcggaccagcacgagcaccgctgcggcgcagccgtccccgaagccggggtccccgagcttcgcctccaccaccgcgaacacgccgtgccgcagcggcacgcgctgcagccgcgggtcgaaccgctcgccgccggcgctcgcccagccacgcggccacgcccaacgccagcatcacagagaaggacagagaaggggttaatatgacatgtgggccatatgttattttcttttattttttgctgattggatttccacgtcagcgccacgtgtataccacgtaggactaaaaccgcttcgtattgacttaaggggtaattcgtccggtttcaatagtttgaggtttaatgtgtctggttctgtggttccgggggggggggggggggggcaattcgtactggtgcaatagtttaagagggtaattaatactttttccttttttttaataagggaataaaatcccggtttttgttcgaaaggttacagccaagtattacagcaattcaacaaaataaagaaatatacaccaaagaagctgagactaatcaacatagggcctgtgcgctgagactaatcaacatagggcctgttcggcaggcaggtgcagtagctgctgcagccggccgctgctttttttttttttcttgcttcactgtttgtataggctgcagcccttgcagacgaacacacccatagtcatatataagtatatacctattgcctgctttgccaccacacgctagaaatatcgtagcaaactgcagattcacaaagaaaatttggaaaacttaaacaaactggacaacctacaagcagctcaaaccgatagagtggagtgcaaccacgacaatccatgactggtggacagaactggcaaccaccgaaggacttatcacaatattggatgtctggaaggaaataaacaaaaaagtcttccaacataaggagttatccgcaacgttaccccgatacggttgctaacccttgtatcagtatccgatacgcctctggatacggatacgtgcgggatacggccggatactatcccgtacgtatccctcatttttctctttttcagataattaaaataaataccgatactcttctgatacggcgggatacagacccgatacggtggagccctaaatcaagcaggaacataaccgcatatctctccccctcccccacgccgcccctcgctctcgcaactcacgctgtccctctctcttcgcttccctaatccccatcgtggcgccgccgcatatgccatcgctgcatgcgctgcctcgccgccgccgccggccgacgccatgctgccgcctacggctggcaccgcgtcgacggcccccctcctctgtactctcctccgcgactcctccatgaggcgacgcgccgccgcctctgaaccagtcctacgccgctcgctccgaccggccccagcactgttgtcttccttcgatcccgatgttgaggactagaggtaaaagaaaatcccttcaagtttgatctgcaccgtgcatagtgttccagttcactttttattagtattgctgttatctttggtagattcaatggattttagaagtgaaagcttgaatgctagtggtagtgctagcaatctagtggtaatactggttttgatgcggagaaataatatattgcagagaagatgtttgccatcatctactgtgtggttttgcatggtgagatgctgtgaatctatcgtactgagatatataccatacatagatgattggtgcatttgtggtttgatgctgctgtgttccctattttttccgtccatattccacactcaatttttttctatgttttttaattatatatataaatatataagtgtatccccgtatctacgtttttagaaagacggtgtatctcagtatcatcgtatcgcgtatccatatccgtatcggcgtatcggggtaacgtaggttatccgtcacatctctggaagcacagatcaaggaggaagctaatgcttaggtcttagcgagagcaaaacagctagcgcttttaattccttaggcatttctctctttttacagttatttattttctgtacatgtaacttttactcttcctatatccaatgaaattggcatattctgcaccggtttttaaataaaaaacatagaagtataccaaaattgctcaaacaagaaggcagtgagcagcaaacagaatcagagctctcaatgcaagaacgtactccctccgtagaatatatgcatttttatagttggccatagttattaaaaaaataggtaaaagtaaatggtggatggttgtgattggttgagtagtgaagatatgtgggaaaagtgaatggtgaagaattgtgattggttgagaagagaatgttggtggataaattattatattttgagacaaatcttgagggttaaaaattgttatattttaggtcggagcaattacatgctagaaactctctttagcttcctctcccaaatcatccaagatgcaagatgcaataaaaacacaccaagatctgtagctggcgatccataagcatgttcaccgggcaaagaggtgggggaatatccaggggaggaagcgctcgactctgaataaggatccagtgcaactatactagagactgcaacttaagcagttgaaattatttttcaccgttggattgaaacgatcaacggataaaatctgtgacacatcggctctaaacagtagatgctacaatgtttgcgacaggagatatctagctacagtgtttaacaaatagtgcctagggaaatcttgaccgctactttccaatccaacggtgcctatgtgactgtttaagttgcaggggctatagcaactgcaggtgatctcaattcctcgactctcgtggtcggccgaggtggcggagggacgtcgatagacggctgacagggaaggtggcgctggcgcgcgatgaccgacgaattcagatcaggtccagttatagtttgaacggtaaagttaacgactgcatataattttggccgttcgtttttccgatcaacgggccagattcgaggctacagtaatgacgcaactgtactctgtgctacagtaattttgctacggtgttatgaacattacaatgtgcggtataaaccttccaacttacatccaactagtatggtgacctatgcagattatacggctagcatcattatattctctctcatataataacatatatgttttctcaatgtattattcaaatatgttaaaatgacaacataattttaaattttgtactaactttacgaaactactaatgtgtaatatttatattatattttatatacgtgttagttattaattatttttaatatcaaattttagttatttgtaaattatattcctatatgaactctagactcgctttcaatatatttttaaaatttttaattctgaattttcattatctataaattgtatttctatataggctctaggctcttcttccaatattacttatttttaattctgaatttttattatttctaattatatttctacgtggactctaaactcatctttcagtattctttaatttttaatcgaatttcagctacttctaaattgtattcctatattaattttagactcttcttcccatgttttttataaaattttgaattttagttatttgtaaattatatttttataagaactctaaactatattttttaattttattatgtttattccgaattttagttagttttaaattcctatacggactctatactctacttctaatatttcttattttttaattccgtatttctattatttcttaattgtatttttatatggactctatactctacttctaatataccttatttttaattccgaatttttattatttcttaattgtatttctatatggactctagtctcctcttccaatattccttgtttttttaaattccgaatttcaactatttctaaattgtatttctatatggactctatttttccttttctccgattaatatgagaatttctaggctatgagagcgaacatagaggctcctttttctattcctttaataagttaatagatagtgtgcactgctattgctttaagttgactgcagctgatccagatccatgactgatgacggcggggctgcaacaatggagcaagtaggcaatcagcgccatcgacggtgtagtatcgaacaatatcaaacaaacctactagagagagtgaatgctagggaaaaccaaaaacccaaaaatttttaacggaaataaaagttaccctcatatcaatggagatctcgacgtagtcggtctaaccgtcagatcaactccggtctgactgcagtgttgttgctggtctgaccgcctgcacaccgccggtctgaccgacgccttgtcgctggttggaccgccttccagcaactggttgaccgcccgctggttagaccatcgatttgcctccggtcaaactgccgagatccccaaaaacacgcattgatgaaactcttgaaagtagatcaactttgcatcaatatatgtttataaagtgcatctaaagcactcatctctcacgacaaggctaacgggagtcaatcgcccctagcgatcacctcccctcctccacgtggtttccttttttgacaccgcattacttttctattttagtaaatttatacacctaaagtttgtatacctcaagtttacatatctaaagtttagagatccaaagtttataagtcaaaagtttatatatccgattcaaatttgaatttgaattcaaatatttttttatataatatttctatacatataaagtttatacacttaaagtctatggacccaaagtttataagtcaaaagtttatatacccgtttcaaatttgaatgtgaattcaaatattagtttatagatctaaaatttataagtcaaaagtttacatatccgtttcaaatttgaatttgaattcaaatattttttatatatagtatttctatacataaattttccaactttgttttttttattttttttaaatttatggtgtagtaggaagagaagaagaggaggaaaggggagagaagcgtattggggatggggtgtgatcgctgtggacgaccacctgcccattagccacgcccaatctctcaactcatgaactaggattgaaacctcaaagtaaaccctaacttttttctttcaaaaagtcgatataggcaatctacttctagcctcaacccctcatctatttatacccataacgtggcggtccctagccacaaatccaactcatacaagaagtcctaatcccctaggaaaccttcccgtacaaaaaaacaaactttacaaactccaatcttctcaaacttagaatccaatccaaatttgactcctctttccatacgcacacaacactatgtgtatgccatatggaaaccttcacctccatgtgcattgttttctaacctgagcatcctgtgtaatatccttaactgtctagacctcaacttcccctaagcctagtcccgatccatcaccggctatactcccatgacctcaagcaacacctacacatgaacaacaaataaattccatatacaagttcacaccaacttgactcacatcagcacacaatagcatcacatacgaataaaaatcatctagaaatcatatccatgaatcaatctagaaattccaaaaaaacaacccgaaatcgactccctactggagtctgccggtctgaccgtcaggcaacccggtcagactgcccagagccccggacacctccggtttgaccggcggcacccgcctggttagaccggcaacccagtgccaaccaccgcaccgtttaccatccgaaaacatatcacctatttttataaacacttgcctttgacaattgttcatcaccacaattaaaccatcatatgattctacagatgggacttgggagtggtgagtagacccgcactcgcgccgcacgtgggcggtgtgctactgttgcctaccgattctgcgtacagtgttctctagtgccatgtatcttactgtgaaaatatagacactggtaccatatcttctaaaatccactccgacatatagggcatatgatggggaaattgttttcatcccttgaaaagatattcccttattccttgcatgccacctaagggtccattcgttttggaggaaaaccgaaagatttagataaccgaggattaattcctatgagtttcatttggtttatatgaatgtagatataggaaaaccaaaggaaattttcctttcctataagttgtagagagaaaacctaggaaacttttcatccactcaaacctttttgaaaattcctatggattgaagtatgcatgcattactgtccctccacttttcttattcctatgggttagaatttcttcaaaacaaataggcccaaatagttataaaaaatttaaaaattgaaaaaaaaaagagaaggcagattaatacgaaatatatcacttcttaaacatgaaaaattcaaatcaaacctctacaagttgtaacgaaaataacaaatataactacgaatatacattaactatttttaatttaatttattttttttgcaacctatagaagtcaaatttggcctttgcatatttttggaacaatatatttcatgtaaatctatattatcaatttttttttattttttaggtgatatgcaagaaaatgagatgaaatccatctcccatatgatatactactgaatgttcttactatgttccgactggtcgcgtccaaagagcctcgccaaccgaagtccgaaatattggggttaaattggagtctagcatagcgttgcttcacttgcttgtcttgaggtcccggtaaatgatcttcagccgtgattcttcatggagatactgcaaatgccgagcgatcccgtgtatgatcttcagccttcttccccagtctagcaaactactggcatgatctgtcattcaagttgtgaaacatctatgagaggcatgacttgcatgtggaacttgtgttgtacacttgtacagttgtactgctgaaatttttgcaatggaaaatgaaccaaagagaatggtatctaggcttctgttgggcatgtattcatagatgaccatcttatcatgctcctcgaggcaaacatcgacaagccgaacaaggttcttgtgctgaagcttggccaccagaaccagctcatttttcagtctcccttgttcctgaactcagtgagaggcctctttactactgtatattgaccatcaggcagggggatccttacatgatagaattatacactcctaaaaagattgtatatcagttttttttgcgggggaaatggggattatattactcagctaaagagtcctcacaaacaaaatgtgcgatgaaattacatttatcatccgggcagaactcagtcagagattcacaccgggctctattagctagagtatggctaacattattctgattccgctgaatcttcacgatgatcacttccctgtttcctgataacaattcaccaatgcccctgacgatgaatgtaagctcagagcgcccttgcacagctgactctatgaggttcttcaccaccaagcagtctgtctccactatgaatggaaggagagtccactgaagagccaagctaataccttccctgcaggcaagaagctctgcttccaacgggctgctacactgattaacaaaaccacaagcagagaaaattaccatccccatactgttccttagaacgacaccgatgccccatttttcagaatttatatcaatagaaccatctacattcagtttcatccagccctgttttagcttcacccatcgacaattattattcaaagggttttgcttgggtttttggatctttcgctcctcatgatacagagcctgcttccctgtaaccaaatctgcttggggattattcttcacttgttcaagcgagttaacatagctttgtaggaacgtttttgacacctcaattggggtttaccttgtactagtaaacaacaacaaatcctcctccaagttcactactttcagtgaagttctgtgtgctgcaattccaagtgagtcgatactatcgatatgttgttggtgtgaatagctccactggtagtagggttgtcaacgagccgagctcaagtgaactcgcctgcctaggctcgagctcgatacaagctcgagccgagcctataaaatgttcgagctttcaaacaagctcagttcgagtgcgatctagctcgatctcgactactaagcttgatttttaagtagaacaaggtatatttcaaggataaccttttaaaaataattaatttctagttcatcatattaatagaagaagaaaaaagaataaataaatatacaagaccaatacaagacatacaaataatatatttgatatcttaatttattaaataacaacaaaaatcatatattactagactcgttgaaagctcgagctcggctcgaagaagctcgcgagctttgggagaagctcgggctcggctcgtttggagctcgatccgagcttgagcagattgcgagcctcgagcttttttgaatagccctaactggtagcgcattacaagggagaacaatcttatgcgatcaggtctcatgaatgtggggatagacccattagaccaggtctcataggagtaatccatgcgtgtactgttgactatccggcaacagctgtacaatgcatgataggctggcttttgaatgggcggttttgacccatgaatttcactggaatgtctaggatgactattttttcccttttgttaccctatttataactgaatttgctgtttagattacatattgataatgtgtacgattccaatacaaaataaaacaggcaataactgttgttgctgctcttctttagcccctactacctggcagataattgtgtgatggtttgagagtagcgagagctcccatcgaaggaaaatgttggcctagctgcaggagccggtatagagctgctagcattgctgttaagcaaaaccatgatgtccgccattgtaggtcgatttacggggttctcctggaggcacaggaggccgatattgatgcatttcagcacctcggcttcagggtaattttttcccaacgaatggtcgatcatctttgcaactgttccatctgaccagcgcctccacacctaccattggttacaggcatatctcttcagttttcagcggcaccaacatgtatttgtggctacctgcaaacgcaaatagtaccacatagtgctgtatgagctagcagggatactcactgtgcttattatatcttcgttttgttcaaacaaatagggtctgttgttcctctggcctgtcacaatctctatgatgagaacaccaaagctgaacacatcagattttgtcgagtattgtccacgcatgacgtattcgggagacatgtagccactgcttgcaacaacaaatagaatcacatgattagtttgttagctacatataagaacaaatatgtaaagtattggacttaattacaatgtcccgacgatacggttggtgacatctcgagtctgatcctgtccaaagagcctagcgaggccaaaatcaccgatcttagggttcatgtctgtgtctagcaagatgttgcttgccttcatgtcacggtggacaattttctttcgggagtcctggtgaagatactgtagtccgcgagctacgccttctatgattttgaatcgtgtcacccagtctagccctctccttttctctggatctaattaattgacaccagatgaaaaactcattgttataatgtcataccgatgcacatgagaagggtgtatatctagattcagagttaggttgttaatggtaccaaaaagaaagaagtcgaggcttttattgggcatgtattcataaacaagcatcctctctccctcttccaggcaaaaccccacaaggcgaacaaggtttctgtgatgaagtttggccactagaactagctcgttttttagctcttctagcccctggcttgaacccttcgccaacctcttcacggctacttcttgtccagaaagaagtccctaaatgcattgatttagtaattaattaatatcttactttttgcatgatagtaagaacacaaagatactatcttttttcttgagcccataaatgtataagtcctataccctattttggcactcaaaatttccacgttaatcgcagaaatagtaaacggatcaatccaagaatgaaagcgtaattcatatgaagtaaaacttgttaataactcatgatgacttactccatctccttaacaagtttagtaaccagcataataaccctattgctcctacagagagaaaaacataagtggtatgtcacaccccgaagttttcctcccaagccaaaattgtaatttttataaatgaccctaagaaaataccggtgcaaatcaggagtaaaccctaaggaaataatgcaaataataatcggatttgacatgtggaatttttcttgagttctacgtgtcgaaattcattaacatgatttttagtggaattttcagagctctagaaataattttaaccaattaaaattgagcaagcaatattttaattccagggaaaatcctttttcctttttctttttctttttcctctctttttcctccttttttcgaatgggccgtcggcccattctctcctttccttccccctcctccttgctgggccggccgcaggccgaggcccagccaggccgtcccgccgccctcctctccgaggtcgccgacaggtggggcccacctgtcgggtccttcccccacctcccgccgctctcgctcgcgccgccgcgcccgcaaccgccgccgcgcccacgtctccgcctccttcgggccacgtcgaccacgcccgcgcgtgcgccgcgtttcccgcgcccactcccctctctctcccgctcgcgcccgcgcccgagatggccgggattcgattttcgaatcccgcctctctctcctccccctctcccccacg

SEQ ID NO: 6330 - DNA, 4778 bp, Oryza sativa
agcccatgacattattggaccttttcctgaaactatatacttctctgtttcttttttaactatagttgcttctcttaagcaaaagaaggaatatcataagatttaaactctgttgcaactcacgggcaccttactagtttctaggatatgttttgtgagttcctcttgtgttactatatggacagatgctactcactttgcaacaccctgactcccgggtgtgcctgtgccctggcccctggcatgtgtgcaaaattgcaggttacctgctgcctgtgctgcaaaatgactcgtaacgcaaaatataatgatcctagcaatatggaattcagtatagacacacatgaacaagtttggcaagtacacttgtttggatcagtcaaaatagcatccttgtttggatcaatcaaaatagcatccttgactcacaaaattcagcttgtagcaatttagttagtctactagttcttgccagaaattttctgacccccaaggaattgaattatttcccgagctaattcactagtaacagtcatattgacactttcccattttgttagctacccttccaggctaaagaacttgtaaaattggttgctgtggcttgtgcaactgaatatttatcactaaacatgtaaggaccatctggccatatggaagactgtctctgtttgtatgtctgcactctgcactctgctatctacttttttttattttttattttagagaagggtattttttacccggcctctacatccaaccagatatatacggccaactctgctatctacttagggacatctcaagcttgtagctgtagtcgtttaggataattggatgtgatatttatgatgaggttttcatcactagcatcttgatagagagcgcacaatgctcccagaacataatatgcatcttgtcctatttggacatgttttcgtgctgatatgaagtaacttattttgtcagctaactaaatgtttttcatcatgctctgttaataatgtactgtcatatgtattgcaattatggagccctgtatttgtataacaaaaactagaaagtagtcattgtccaaatcattttcagtacaatactctttgctctgctttctgcaattccagttgtatagttaaatcacaaaattaataagacacacaaacttttattcattacctcaaatacatacaacaacatgggatcgggacgggcaagggctaacatattacagcttattataaaagcatatagtttcatgaccggctgtacattattgtcacatcatatgattataaccagctagtatagcagcttatttatcatctggcgtatcgtacccaataggcttatttactatttcccttgttcctcacaaagtggctgcagactgcatcagcgagatctttaaaccggcaggtcggtattctcatcaaagggaaatggcgccaattttgggtgtgctgcttgtaagatctttccaattggcatttctggcatttgatcttgcaaaggctccaatgggtcaacatttgaattataatcctgaagcaacattcataattttatttaaaaaaacatctcagttgcaaacaatacatgaattctattttgcatgtttttggttttgtagggtggcactcaccaggttagcatgcatcctcttgacgaaagttttgaatgtgctgtagttctgtccctccagcagctcgtctgataatcggaggtaggtgaatccaaatagcttgtgctcaggaggtccattcttgttgatgcctgtcggccttgaattccttagtattgtgttgtaagctgttgcatcgtatcgaccgagtgcgttttcgcatgccacatgtaagccctctctccatccagcactcaggacctgccatttcatagttcatagccagaatattttgataagtgctcttgtgctattctagaagaagagcaatgcagaagttctaacttatagaccagtaagtactagtatgtaatagtccgttatttacctgttggactagttcttctggtgcactctttgcctctgagctttgttcagaatccctcatctcagcacatgtgaagttaacgcaggcacggtgccttgtgagcatgcgtgcgatggttctgtagccatctctgttgtccaagttgtagtatccagcagtgagctcagctgcatggtttggaaccctataccaccaatgaatgccggagatctgccagcaaacattggagcatgtgtcatttatgttctagattcaacaattaatggaacattatatatatatatctgttgcctattcatctagcctgtagtctaatttgaaatcattgaagtcttcaaaattatgtactataattcgccgagatctttagcatgatacttactttgattgccagctgcactctgcatcccaagaagaccttgtttgcttcatccaagatcttgtctccatgttttatcagcttgtttgagtaccatgtgaggaagaacttccccttctcagtgacatatgttccattatccgcgaagaaccgggtcttctcgggagtgtcattgtactctccagcatcgtcgggcaattcccattcaggatgcccagcctttgctgcttctgctttgaaatctgcctccaggtatttatcatagcactgcagtattttttttattgtaataactgttagagcagtgaattactaccatttgtcatgcattttgtcccatttcatatctgttcagcatatttagaatttgatttcctcttcttttgttgcttaatttcagtctcaggcttgcttctactgttttttttttttctgttagtactgtttttggtccaaacatctttgtgaaccagaaccactttaatatttgtgctcattttccaaagattttttttcctaaaggagatctgcaattggaccatgattgttgtctttggtcatcagccatcacatggaggagaatatttttatcaacaacttatttataaaatgagggcagccataagaatctttactctggtaaagactaaagaacactcactatgaattctcctatgcctgggaacacccatccctggctctgggggtaggaagggtatctcatctcaccagctggaccaagccccacctcaatgtccacaatgacaccagtatccaagaactctgccatgttctccctgaagctcttcatgtagtcagcatacatctgtcacagccacagacaagagaagaatgtaatacatataacgaaatcaaaacctcatttttatctcttttttttttctaaaattcatcggactccatatgtgcaggtggtggtggggcttgcttatcagctaaaacctggatggcagttcttccatggaagagaggctggtcatccactccaagggtgaggtactcgatgttcctcgccccaccacggttggtgtagaagatgtcggggtcgctcgcgccgacatcccgcacccactgcgggatcgggatgttgacgatgtcgccgacgttaccaccgcactggtggaacgacatgatggcctgcagcttcagcccggcctcctgcaccagcctgaacagctgcttgtaggcctcccagtcgtaggacccggggcccttcccctccaccagcccccaccacacgtccaccatgacgccatcgacgccggcctccgtcagcttcttcagctgtgcccgggtctcatcgaccttctcgaacttgttgtccacagtcaccacatccagctacatatctcgcaacagaattcaggtcagtgtaccacaaattcgctcttcttgagcttgttacagaaagtttgtgcctatgttaatgttaatgttgccagtgctgtgactaaaatttgattatccaaatagaactagagcttacggggagcatgacattgacttgaacatagttggctagcaagttcccggccattgtcgctggctgtgtatgctctgagaacactagcttcactgtcttgttgctcactgagctcggcttgatgaaatatagcaggacgctcatgggctatttatacttgcaaaaaggagaggggggctcttctccaccggcgggaaccaaccaatccttttcttccaggtacctacttcctctgagaaaattagagatggtgtactatgcccactatgaactgaatttggttaccgcccctgtcatcccaggcttcgatagttgatatcattcagcatttcagttgttgtgcacacattttgttcatcctcgagtaccatcgattcatgcttgcttgctgcagttcagcaggctcatggtatggtaccgctgtttttacctggttaaaagttttactatagctatgtacgtcagcttgcagtcatgcacggttctcatagggtggttaatttctactccctccatcccaaaatataaacacttttagaatagtacagagtcaaaatatttttaactttgactattaatagctaaaaaataaaaatatcaatgatgtaagaataatatgactagatttatcattaaacaaactatcataatatgtaactctttttatttaaaccatcttatttttgtaaatatttttagtcaaagtaatatctcaatgaccgtgtcaaagttcaaaaatacttatattttaggacagagtgagtagtatttactatcagctccatgaatttactattgctcagtactccctccgtttcacaatgtaagtcattctagcatttcccacatttatattgatgttaatgaatctagacgggctgcagga

SEQ ID NO: 6331 - DNA, 3185 bp, Oryza sativa
cggcccgtcacaggtatcccctcacctgtgacgggccgaaaggaaaacccgtcagaggtataccagtgacgagtttttcttccaacccgtcactggtatcccctcacctgtgacgggccgatacattagaagccgtcagaggtgatgggccgccacctgtgacggctttcatttctggcccgtcacaggtgagaggataccagtgacgggccgttgaatagaagcccgtcaaaggtatgagcaatacctttgacgggctttttttatctaacccgtttgaggtgtgttgggtctataaatacccccaaactgccaactgctttccatcccgaccattgtactgttcacaaatcggttgggagggcaaggggggcgattttttgctaaaattcaaggtaaaaaacacattattctccattcattctcaacatatcgatcatcatttatttttcttcgtatgttgttgatttcagatggatcgtagatggatgtactatgcgcatcgttcgtctaccgagtatagagagggggtcactgaatttgtcacatttgcggataatgacagaaaaaataggatgagcatgcacatgttgtgcccatgtagggactgtaagaatgaacagatgatcgaagacaaggatgaagtgcatgctcatttgataatgaatggattcatgaagaaatatacctgctggaccaagcatggagagcaagaggcgcctgatgtcgcagctgaagaagtgttggatcaggatgtagagaacaccgccgcagctcgagaaggcatgttcgtaccttctcctttaggtggagagaccatagatttggacactcaatgtctatctacaatgttgcatgacattgaagacgcagaggacaacgacagagattatgagaagtttagtaagttggtggaagattgccagatgccgttgtatgatggatgcaagtcgaagcacagcaagttgtcatgcgtgttggaactcatgaagcttaaggctagtaatggctggtcggacaagagttttacagaactccttgagctgttaaaggatctgttgccagaggggaacaatttacctcagacgacatatgaagcgaagcaagtattatgtccgttgggcctggaggtcagaagaattcatgcatgtccgaacgactgcattttgtattacaaggaatacgctgacttggatgtctgccctatctgtggggcatcaagatacaaacgagcaaagagtgaaggtgaaggaagtaagtcaaagaggggaggcccagcaaaggtggtgtggtatctcccaattgcggagcgcatgaagagaatgtttgcgaacaaggaacaagctaagcttgtgcgctggcatgccgaagaacggaaagtcgatactatgctgaggcacccagcagattcagtacagtggaggacaatcgataggatttaccaggaattctcaaatgacccaagaaacatgcgtttcgcaatgtgtacggacggcattaatccttttggtgatttgagcagtcgtcacagtacatggccagttctgcttgttaactataaccttcctccctggttgtgtttcaaaagaaagtacattatgcttgccatgctcattcaaggaccgagacaacctggcaacgatatcgatgtgttccttgaaccgataatcgatgacttcgaaaggctatggaatgagggcacacgaacatgggacgcatatgcacaagagtatttcaacctccatgcgatgctgttttgtaccatcaacgattatccggcccttggcaacctttctggccaaactgtgaaagggaaatgggcgtgttcggagtgtatggaggaaacaagaagcaaatggttgaagcattcacacaagacggtctacatgggtcacaggagatttctcccaaggtatcacccgtataggaatatgagaaagaatttcaatggacacagagatacagccggacccccgacagagctaacagggacagaggtgcacaacttagtgatgggaataaccaacgagtttggaaaaaagaggaaagttggaaagcgaaaagagaagagcacatcgaaggaaaaaacagaggagcatgtggaaaaacaaaagacaaaagagaggagcatgtggaaaaagaagtcaatattctggagactaccatactggaaggatcttgaagttcgccactgcatagatttgatgcatgtcgagaagaatgtatgcgagagtttaatgggattactacttaacccaggtactacaaaggatggtctcaacgcccgacgagatctggaagatatgggtgttcggtcggagctacatcccataaccacggaatccggcagggtttaccttcctccagcctgctacactctctcgaaagaagagaagattgatttgctaacatgtttgagtggtataaaggttccatctggttactcatcaagaatcagtaggctcgtttcactgcaagatcttaagttggttggaatgaagtcgcatgattgccacgttcttatcacacagctgttgcccgttgcaataaggaatattttgcctcctaaggtgcgacacacgatccagcggttgtgttccttcttccatgcaatcggccagaagatcattgatcccgagggactagatgaactacaggcagaacttgtgagaaccctatgtcatcttgagatgtactttcctccaactttctttgacataatggaacatcttccggtgcaccttgtgaggcaaacaaagtgctgtggtccagcattcatgacgcagatgtatccttgcgaaaggtacctggggatccttaagggttatgtacggaaccgttcacaccccgaggggagtatcatcgagagttacaccaccgaagaggccatcgaattttgtgtggactacatgtcagaaacatcttcaattggattaccacgatctcatcacgaagggaggcttgacggtgttggtactgttggaagaaagactattaggttggatcgtaaggtgtacgataaagctcatttcacggtactacagctgtcggtgatatgggaccgggagtatcatgaccagaggcttgaggcagacgcaatcgcccacgtggcctggcaccttcggggacgtcgggcccgagggtgaggtgtccgccctcctcctgatttcccccgaggggggggg

SEQ ID NO: 6332 - DNA, 6965 bp, Oryza sativa
accgtgctgatctccgcccattcaagagaaaaagaacagtccagtttggaaagagaagggtgcatgtggtatccccttgaagtataaaaggaggaccttgcccatagagagggggttgttggttgattctttcccagattatgagcttagaacgggggagaagtcagctcacacttgtagctcattcatacgcagatccaccaaaacacaggagtagggtattacgcttctcagcggcccgaacctgtatagatcgtcggtgtctcgtgttttctggctggcatacgatatttccacatacagagagagcgagagcttgagatttcaccctaagcccccggccgaactggcaaaggggggcctgcgcggtctcccggtgaggagccaccagctccgtcatctggcgcgccaggtagggggctcagcgtgtgctttctgagctctcagactcttccgtgtgccccaagtttttcttgttcagcctaatggccgagcaaggaaaaacacacgacctctcgccgagtgtgagcggcgacgacggggagccgaatccgcgccgtcgagctcgtactcctccacctcctccgcgccaaagccctaagcagggggaggcgcttgagagggtcgacaaatccgcggcgtcaccagccgcaggtgatgcaggagaacggcgagacggggagcgtcgcctcctcgtctacggcgacggcagcacacctcagggtgcgcttcaggctgctggcgcgctcctacgacacccgcctgtcgtccatgacccggagtctccagcccaacgatggctggaagacgtggccaacttggtcatgacggcacagcagcgcctgggtgctggtggacggtccgccaccaccaccaagacctccggcgccgctaccaccggctccgtgtcatcaaggcggagggcgcggcgagcggcggcggctgcacgtcattcggctgccactccctcgtctacaccgtcgactcgggaggatcagcatggggagccggatgcccgcctcaacatcgggcgccggcgtaatagccggcgtactccccgcgcaacggagggcgcctcttcgtccagagtgtcacctcgacatggacgtgaggaccagccctccgtgcccccggctggtggtgtcggctgtagagcctttgtggcgagtcttcggaatgtccgttggcccccaaggttccggcccaccatcaccgagaagtatgatgggagtgtcaaccccaccgagtttctccaggtctatacgaccgggattgaggccgctgggggtgacgacagagtcatggcgaatttctttcccatggccctgaagggacaggcgcggggttggctaatgaacctgccacctgcgtcggtccactcttgggaggatttatgccaacagttcactatgaactttcaaggcacttatccgcgcccaggcgaagaagcggacttgcacgcggtacagcgaggggatgatgagtcacttcgctcgtacattcagcggttttgccaagtccgcaataccataccatgtatccctgcacacgcggtgatctacgcgttcagggggggtgtgcggcacaaccgcatgctcgaaaagatcgcttccaaagagccccagactactgcggagctttttcagctcgcggaccgagtggctcgtaaagaggaggcctggacctggaacccctccggttccggagtggcagcttcggccgcccccggatccgccgctcagacagggcggcgtgacaggaggaggaagaagaggtcagcccataccgacgacgagggtcatgtcctcgccgtcgagggcgctccgcgggccacccgaaaggggaggccagcgagcgacaaaaagaaggaagccgacgctccctgacctcggctacttggaagagcgaaggcggcgcgcggcccttcgagccgcgcgctaccagcagagcctgcggcgctaccatcagcgccacgtccgggcccgatcactctgcgtcgacgacctcgtcctacgccgcgtccaaacgcgtgctggactgagcaaactctcaccaatgtgggagggtccgtatcgagtgatcggcgtcccccggccgggctccgttcggctggccacgggcgacggcacagagctgcctaacccgtggaacatcaaacaccttcgtcgcttctacccctagtgggggtcgggtgtcaggttttgggctcgggccaaccccgcacccccccgggcgtgcagggttggccgggggcttatcttttttctcttccgtatttcaataaaagcgttttcgatttcctaaaggctgtgtctgtgcttttgtttccttttgaagaatcttgacttgaaataggtcactcgtgttcaatcctgccctcgggggctcgggtcggctaaaatcgccaaacggggcccagaaccgagccgtgccccggggcgtggtgaactccgggggggaatcggcaaaaacccacaatcgggtcacccataaccctcggtcaccacgttcccggcctggccagtctcgacatgtggatctccccaggcactagccccgacccgagccatttgaggactaggacctgggcacgagcccttgatcaagccaagacacagaaggaccgcggcacagaccatcctcgtctcatacacacaacaaatagaattgacatagaaatttcctctttatttggttgcagattaaattagtctatacaagaaggggcccgaaggcctcggaagaagaaagaaaaagctattcaagattggcgggggcctgggggctcactccgacgcgcccgggtcaccagccttgtcgtcgttatcgtccgcaccaccgtcgccgccctcctcgtcggagtcgagggcgaacgcgagccgaggggccgtaccctcgaagctgtgaacgatgtggtcggcggcgtcccggacctgcgcgcgtgcgccgtcctcggttccgaaagggaactcttccagcgctgcccacggggagaagtcagggtccgagaggcccccaagccgaacggcggcccaaggcccccgacggccagagttggccctccgcctgcttgtccgacggtgtcaggcgcccccgaccctcaggatagcctcggggccactgcgggaaggccgcgcctgtcgccctcttaccccgaggatatcggcgcagaagccgagggcgccccgcgctgcctctcggatgaagagcgccctggagatgcggcccctagcgaagaggatcggccccgccgaaaggtgcagcggcccgtctactttgttagtgaggccctccgggacgccaaaacccgataccctcgggcccagaagatgctatacgctattctgatggctccgagaaaagcaccatcaccatatctccaggcgaagcaaatcggctcgcccagattcgtgcgctgctcaggtaatgtggcagtcttgaagagaccgcccattatggacagccaagtcaccattaccaatgtgcatggattgagaccgttgggtattttgcccaactacggagaccggtcccacctgtcaccaggctttaggggtggcgtcacacctgaccgcttcccttgggaagggaaattgctctggcataacgccgggggctactgtcggtgatatgggaccgggagtatcatgaccagaggcttgaggcagacgcaatcgcccacgtggcctggcaccttcggggacgtcgggcccgagggtgaggtgtccgccctcctcctgatttcccccgagggggggggtcgggttgcgcttgccccggccccgagggccgaggcaccccgaccccttaaggaagtctgcgccacatatatgggataagtgagcacagctgtgctcacctaacagcatttattgcagtctggtcaagcgtgtcacgctgcatgcaacgcagtacagcgcgttcctttatccggtctgtgaccagtcacagaccggtcagatcacgggttaggtggcggctggcggtctgacgcacgccttgccccatcccgtcaagacgaaagcctctaggcactcgtctcaagccggagctagggtgttatctcttagagatggcacgttagccctggtcagatttataccaggcttcatcctaaccattacaggcaagatgttgtgtgaagaagggcaaacatgcacgttgccaagattacacgcggtggacaagaatgaccgatttgtgaccggtctgacactgaccatatcgtcagcgcacagccatgttcccacgacgcgctcacccccggcggaagtggaggtaggtgtgggctgtcccatcggagcgtcattcggacagcaaccgtgctgatctccgcccattcaagagaaaaagaacagtccagtttggaaagagaagggtgcatgtggtatccccttgaagtataaaaggaggaccttgcccatagagagggggttgttggttgattctttcccagattatgagcttagaacgggggagaagtcagctcacacttgtagctcattcatacgcagatccaccaaaacacaggagtagggtattacgcttctcagcggcccgaacctgtatagatcgtcggtgtctcgtgttttctggctggcatacgatatttccacatacagagagagtgagagcttgagatttcaccctaagcccccggccgaactggcaaaggggggcctgcgcggtctcccggtgaggagccacgagctccgtcaacagcatatgactgaggtggtgccgtacgttgacgaacaccttgcagttatccgacaagagaacccaggccgatcagagagttgggtcaggaataagcacatgtcttctttcaacgagtggctgaagaaccgaattgccaggttgcagaacttgcctagtgaaacacttcagtggttgtcacagggtcctgaatggagtgccaccacctggcaaggatatgacataaatggatacacctttcacacggtcaagcaagacagcaaatgcacagtgcagaacagtgggttacgcatcgaggctgctagtgacggtggtcgtcgtgatcaatactatggtagagttgagcaaatattggagctagattacttgaagttcaaagtcccgttgtttcgttgtcgatgggtcgatcttcgcaatgtaaaagttgacaatgaagctttcaccactgtcaacttggctaacaacgcgtacaaggatgaaccgttcgttctcgccaaacaagttgttcaagtgttctacatagttgacccgtgtaacaagaaactacatgttgttcgtgaagggaaaaggagaattgttggattggacaatattgcagacgaggatgattacaaccagcacgtccatggcataggtcaagaaatacctctagaagaggaggaggaagaagatgaagttcaatatgcacgtgtcgaccatgaggaaggattatttttgtaatttatgtacgtagtttatgtctacatgtctgttatctgtatgattctaatatgttcggaatgatcaatagtatattgcttatgaaatagtcaaataaaataattaagtgaaacacccactagaagtgaaataaaataattaagcaagtattagcattggaaataatataattaaagtagtataataatgaagtgcaattactactgttagtgaaataaaataattaagtataaaaaaatatgtagtgtatgtgaaaatatgttaaggaaaataaaagaactaagtgaaataaaataaaataaaattgctctaggcaaactcacctgtgacgggctctatctgtagggccgtcacaggtgacctcacctgtgacggcccagagtgctgggcccgtcacaggtggtcttacctgtgacggctccacggttggcgcccgtcacaggtgacctcacctgtgacggccacatagttggagcccgtcacaggtgagtttgactagggttgacctagggttggacatcttctagatcgatccagatccggcgcccactctcactcactcactctctcgaccgccgcctcgcctctctcgacctctctgccgccctctacgccctcctctccaccgccgcctcgacctctccaccgacgccggcctgcaccaccgccgccgcactcactctctcgaccgccgccatccatctccaccgccatctccaccgtcgccgtctcgacctctccgccgccatctccgccgccatccagaccctcctcgccgccgccctctctgccgccatctccgccctctccgccgccctcgccgcctccttctccaccgccgcctcctcactcactctctcgaccgccgccgtcctctccaccgacatctccaccgtcgccgcctcaacctctcctctgccctctccgccgccatctccgctgccctctctgccgccatctctgccgtcctctccaccgccctctccgccgccgcctccaccgccgccctcgccgccggtcgtcctctccgccgtccgtccatcgacttccccgacctccccgaccctgatctccccgacgccgggatccccgaccaccgccgaccgcctcgacctcttcgccactgcctctccgccgccgccaccaggatccaggacgactacggcctgcgccgccgtctccaagtacgccgcttctccaagtatgccgccaccctcccccattcctccttttttccgatggatgaattgcattgtttagatgaatgaaatgtgatttgttgtttcgattattggtgctgctgtatagatgaattaaatgtgatttgttgtctgtggatgttttggatgaatgtaggggctagattttatatacatgattttggtgcagtgaatcttagcatcaatagaggatcttagcatgaatttttaatgcattttgttttctataattctttgataattaaggacctttattaggtgtaggtttgaaatctagttacaagggaagaattgatagattggccg

SEQ ID NO: 6333 - DNA, 17059 bp, Oryza sativa
tttattaggtgtagggtttgaaatctagtcacaagggaaggattcatagattggccgcagatttaatgtagttccgaggttatcaaaccatcacagaatacaaagtgcatggggaatcttggtggataggccagtgtagtccatggacggaaccgacctagacaccaaaattctccatgcattttgttttctgtcataatttgatgattaaggaggctttgcagattatctaaacttgttgatttatataccctttttgtctatgaataggtcaattgtatgaattgttgtttatatacatgatttatatacccttgctgctgctgccacaatattgtgggctgttttattatctagacttgcttgaattgaatggatgaattgctgtttacatgaagttagtagtactgtctccttttttatctacacccctgctactgcccctacacttgttcacttgttccttattaaatggccagtgtagagtagttatatacctctacacttgttctttttttatgcataagaacagattttgtgcacttgctctttttttatgcataagaacagattttctgcacttgctcttttcttctggattgataaatggccagtgatgaattgctcaataagaacagattatctacacttgatcatttttttatctattcttctttttgcccctgttgtggctcaataagtaatgaattgctcaataagaatagtttatctgtacccttattgtgggctgttttttaaatttgcatgattgactcagtggttatatacctctacacttgttctttatggataagaacagagtatctacacttgttctttttttatgcataagaacagatttgctcttttgatgttatgatttcctctttttatcccttcatgcaaatgaatataattgatgcatatttctgagcaaaactgaggccatatctttcatagtataccccgtattacatgattttggtgcagtgaatcttgaatgtggatttaagtgcaactgctgctgtctatgtttgcccttgctgtctatgtttgcccatgctgctgcctatggttgcaactgttagttaagtgcaacttgaatgtggttttaagtgccatttggacatataaccattcatggagtgtgtactgctatatatgttgctagacctattgaattttgtggacttgcatttatactcctcctgctgctgttttatgtcaatcatgcaaattctgtacccttgctgctgctgttttttaaattttcatgattgatttagtggttatatacctctacacttgttctttttttatgcataagaacagattttgtgcactctctctttttttatgcataagaacagattttctgcacttgttcatttttttatctacaataatatatgcatgatttatataccactgctgttgttgcccctgtacttcttgttaaatggccaaggatgaattgcttaataacattctatctatacctgttcttttctttatggataagaacagattatctacacttgttgatttatatacccttgctgtctatgtgaatttccctctgctgttgctgtttatgtgaatttccaccctgctgttgctgtttatgtgaatttccaccctgctgttgctgtttcctactctaatttcctgcacttgctcttttccttatggataagaaaagatgaactacacttgttctattttattgataagaacagatgaactacacttgttctattttattttctatttcctcttttttctgcacttgctcttttcttctggattgataagaggagtatatctagacatgttgttttagttaatttgcccctgctgttgctacccctgtggcatatatactcctcctgctgctgttttatgtcaatcatgcaaattatgtacccttgctgctgctgttttttaaatttgcatgattgattcagtggttatatacctctacacttgttctttttttatgcataagaacagatttcctgcacttgctcttttccttatgattttctctttttatcccttcatgcaaatgattgtaattgatgcatatttctcagcaaaactgaggccatatctttcatagtataccccgtattacattggatctaatgctatttagtctaatggtaggaaatttataatctttttcgcgaaagttaaaccatgtcaacgcccggcgcaaacccgccctccccaacacctgcgaggatccaggaagaagcaaacccagccacagaggcagttgccgaaggtcatcccgcgacaacggcggtccaacaacccgaaattcatggtaatttataggataaattttcaccacatgaccacataaattttagctagcaccccttagcaaatattgccttctgtttgtgctgcagaattgccgcaggaacaacatacgtcgatgtcgggcgagacaagtgcaagtaggtctagtagaaatccgcggtcacaaaatatatggccgaccacagtgcaagttataagagaggttgacgctagtggtaggcccacggcgcccaggactgtcattggaagatggtctaactgctgcgggatagcggcacgtgagaacttcgggatcctccataaagatatcgggaaggtcacagaagccgagaaagagcgagcttggacggcaatggagaaatggttcacatttccagccgaagcaaaggataggctcaagcggaaggcattacaaaagatgggcaaagcttggaagaattggaagtcgaagctcttcaccgagtatgtcaacccgcccggcaatcatacgccgttcgatgaataccctcaaataaccgaagcggtgtgggaggaattctgctctctcaagaccacccaagagtttagggaatccagcgaggcacatcgcgtactgcaacagcggaatgagcacccgcatcggctgggcaccgcagggtacatcggcaaggaggcaatatgggcccaagaagatgcagccgctgcagcagcgaatgtacctgccccgttttcagacatccctgaacaaagagctcgcaactgggcgcgggcaaggggtaaggtcaacccggacggctctgtcacatttgagaacaaaagtgatgccgtcgtctatcaggaactggtgagttcactacttaacctaactaatttccgttcgtataaagtacaagttcgtataaacgactatcttcttttctagttaggcttggttgctgaacaagcttcacaaagcgaggttgagtccgcgccgaagaggcgcgaagatgacatcctcacaaaggcgctcggaaccaaagaacatcctggccgaactcggggaattggtagcgatgtgccctggaagcatggactccctcagtacagctcccaatacaggaaacggaaagtctccaaggaagagagggacgctcgtttgaaggccgaacttaaggttgaggtcattcaagaactagaagctagcatgaatgcaagggtggaagaaagggttaacaaggtgctcgccgacatgaatataccccgagtcacaacacctgctgtgcaaccaactcctcgtatacaacacgacgcgagtccgtcacagcataggagtagttgtgcatccacagaggtgccggcccctggtctcccgatcgcaccactagctgcagtggaccacatcgaggtaattattgttatccgatccatatctaataaaagacatttacacattccaatattaaattcaaactttcaccttatgcagggcgcagcacagtgtgtcctactagcgagagtccacccaactttcgctcctgaagtcgctgagggcatggctttcaagccctcggttacagacaaggtccacggcgcagacctgctagctgggtatgccaaggtgtccatcgatacagtaaaggacacctggtcaggctatccgctgcccgtgcccccaaatgatgaaatcatgactttgggcgatgcgcgcaagacattcatacaatggcccaaagaatacatagttgtgaagatgactcctcgtccaagtcgaccgacggagcttacacctcccaagtctaagctatcaattgaggctccccgtggactggcattgtcagtacctcattctcccggtggagctgatatggacttggcagatatagctcaaagcttggctccaataaagaccacaagaaaggccgatagctccccaccacttgtcaagggccagaagcgtgaacgaggcaaggggaaggtcggggagttggcgccggagccaaaaaggggcaaggctgcgacgtcgatgccggtaagcaaatcggggaaggtcgtgagggcgccagcccaatttgagctaggcatgccattggtggaggacaatgtgttagctgtgatgggtattgcttgccgagagctacataagcaatacatggagctaagcaatgccaagcggaaaatgagggagtcatccatagttggacatcacgaccaccagccgttcctatcgtcgcctgcctatataactataggctttgatgacctcttcgaccttttcaggatccggaagttggacactggtcttctaaaatgctactccttgtaagtgcataccttctatacttgtgatatgactggactatatctcctaattaaattagttctaatacgtaaatattttaaggttgtgttggatcgagagtcgtcgccatggtaatcaggttgggttccttgatccatccatggtgaatgaggttaatttacaacagagctccactgaggtggttgactatgtcaaccggtgtttatgggcccatcaagacaaggagtacatcatgtgcgcacacaaccaagagtaagaggacaatacccttcgtgtatattgtttttgaagttaaggttcttagtactaacgctacataaccactgcgcaggcgacattggattctcctagtcatcgtacctaagtggagtagggttacctaccttaactccaataagtccaaagattatgatttcagtgaaatcaccaaggccttaaatatggcttggggtccatatgtggaaaagggtggtaggcacaaggagggcaagaatgaactttatcatgacaccaagtttgcatgcgcacaacagatcggagaccaatgtggtttccacgtgtgccacaacatgtcaacacttctaagagaggtgaaagatttcgaccctgaggttgttgctaatggcgaataagctcatttcaatatctacattgctattcaaaacgtgctaattaacctcttatttattaaacagaaaggtagagctggcttcaagatctcacccatcaacccccccgctatcagaggcgaattgcgcgcctttattcttgcagaaataatgaacaagaaaggacgttttcatgccaaatagactcatgaacttggctagataatttattgtgatgtaaaaaagatgtttttataatttctggcgatgtaaaaaattatgtttttatagagtgcaatgtaatttactttcatatgtgcaatatttatggtactttactaaattgtcatcacatttgatcaactacgatttatgttgtactattcatctgttttctcctttttttttcccttattgacaggttgtggaggttcacaacgaacagaatacaagaaattttggtaatcatttgaggactttcatggggtatgaattgtgtgctataataaattaaattgttgcatatgtgatgttgtaaattgttgctttgtgatggatctgtgatatgtgatgcatctgtgatgttgggcagttggggaatatgtgatatggagggggggtgactggcacctgtgatgtttctgtgtttcagagggcatggctagcaattcctgaggctagccaatatttagcatttattttttttctggaattaactcatcagtgacggttcggaagaaacatccgtcacaggtaacttcacctgtgacggactcgcaaacgtcggaccgtcacaggtgacgcaccttgtgacggctgttacttccgggccgtcaccgaggggttcaccctggaacggctactatataccggggatatcacctctgacgggcctttatttaggggctcgtcagagatgagacacctgtgacgggtcctaacaagccctagtctagcttagaccaacacctctgacggccttctattaacttgcccgtcagaggtggatgtcaccactgacggccggccacccgtcaaaggtgactggacttaccagtgaccactgatcactgaccaagcccaaaaccgtcaaaggtgagggtttgggcccgtcacaggtgaccttgaccagtgtagtgtactcccacgccccggggtacaacgtcgccaagtgcatggctcccaagctccatcccgcggagctcaccgagagcaagtgcggccggccgctcggcctccggttccacaacacctccggtaacttctacatcgccgacgcgtacaagggcctcatgcgtgtcggcccgcgcggcggggaggcaacggtgctcgccacggaggccgacggcgtgccgttcaagttcaccaacggtgtcgacgtcaaccaggtcaccggcgaggtctacttcacagacagcagcacgcgcttccagcgatcccagcacgagagggtcacggccaccggcgactccacgggccgcctgatgaagtacgatccgacgacgggctacctcgacgtgctccagtccggaatgacgtaccccaacggtctcgcgctcagcgccgatcggagtcacctcgtggtggcgctgacggggccatgcaagctggtgaggcactggatcgagggccccaaggccggtacgtcggagccgttcgccgagctgccgggctacccggacaacgtgaggcccgatgggaagggaggctactgggtggcgctgcaccgcgagaagaccgagacgccgtatggctcggacacccacctcctcgccgtaaggatcggtcgcaaggggaagatcttgcaggagttgagggggccgaagaacgtcaggccaacggaggtgattgagagaagcggcggcaagctttacctgggttcagttgaattaggtcatgtcgccgttgttaaggctacttgattagtttatatagttgcttttgttcagagtgtttattttgttttagatgtaagtattcaatttcggccgaactaccaatgtaataaatttgcacttcatctggatctcctgggaatataggagtatgttgtatattttgatttcatatagaactctagctacggatagtcacactttgctgtgcttgtttaagaatcatgatatttaggacgtgggcgtttttttatagtacattgaaatgctcgtatattcgtatgaccgtgaattgttaggtttaaatttctttcagtaatataagataacttctggctagaataagtactacttgtgatttatgtttcttgtaatgtagcgtacatcttagtgtaaaatcatacattagtagatctatatactagttctacaacctacgtcccaaataacttaatattttacccatctcacacataccaataatgatctctactattataaaaattgaagatgtttttaccgatattttggtacgtcatccgtgtattagtcggtttttaggttcgtttgcttttggaaatacatatccgtatttgagtcggtttttaacatcgttcacttttggtaatacaggtggaatcatataagaaatttgtttaaaaaaactcgcatgctaacttgagacgatcgaactcctaactgcagctcatgattatctaaaaatatatatatccaagcgaactccccgcagtgaatttcatcctaactaaaccatataacaataataagattaaaatagacttcacccgttgtaacacactagcattttttttctagtaataataataaaagaaatactcctaatctatcaaatcccaatgcaactattcctctttttatctactcctaatacaattattttttacttttataaactctgatataatgattcctccaaaaataaacttatttagggacaaaatggactgagctaaaaataaacttaatatgagacggaggaagtagttaacacttactaataatcatttaattgagaagaatataattaggctaatcttgtgataatgaccatataaacatacacatacacactcctattactatgagcacttccaagggacaatcgcacaccacatacctataaacacctcttgcttgacgagtaagttgctatcataaaagaacaattagaaataactacgagcacctatgctaagtttagaacatagggtaatgttgggagaacttttggaacgctcagcttttcttaaaatgaaaagctcctctaattaaacaatttagctttttattttgatttaaaaactataatagtagaattaaaaaaataaactagtaaccacaagtttatattctcactagctgaaatcacatgggctgtttgcctgtttctcatcatctgcctccccccaacccccccaaaaaaaaaataaatctaggggttatggtgcaccaaacaaattaaatgtaggagttatgatcaattcgcttgttgcacgagtaatgctggtatgcttagagtttatcacataagtgttctattctgacttgcatcctatttcgtcattgtaattttttgataggtgaatactctcaggtttcagcatcatagcttgttttgctgctacagctcatgcaatgattttaatgagttcagaatcggtacatgaattcacatgttttttttatgttttacccaaacgaaacggcatttatcgggggaagtatcagtactataaaaaacaatttggccgatacatacgttttatttatttttcaggtggacttaaaatattacttcttgttatcacttgtataaatagcgggaagcccgtagatttaaccccgcctctaaaaatcgatttttatgggcgggttaaaaagaccggcatacaaaatatgggggcactattaaatttgacacatagagagccaaagttttccatctctccttctcccttggctctctcaccacctactccacctccttcccacccgagcgagcagactctcccccatccccatctcctcccccaagtcctccctctcctggccttcctcctccgtacctacctatcacagccaacgctccgctcctgcccactgccgtcatcgaccacgcccgtagttggtgggccttaggagtcaaagggacatcaattgggcctgcaacgatgaccgtgaccaccaccacaacgacaatagtgatgacgactgtgaccacgatcgtgatgacagcgatgtgacctccacagcttgaatccgccgtcaccggcctcaggagcatcaggtttgcaaccatagggccttgggaatctagatccaccgccgccgagcttgacgcaggtggatctgccgtctttgggcctcgagcatgcagattcgccaccacaaggcctcgagaagctctcactcgtcgtcgtggaaagctctcggccatcctcattccgtggccgttgacatcatcgcggctggcctccgccatccttaccgacatcgatgatggtgcgctacttcgatttcttaccttagagactggctgaagaagcaggcactactacagaaagggccataggtgccggttgggaatcggctataggtgccggtttcccaaccgacacctattggtcggcaccaatagtagcaaccggcacctatgaagaaaataaaaccgacacctttagctttgctcaagccaaaaaaaaaaaagggaccggctcagctcgaattgagccaaactcaactgagcactgttactgcgtcatcgcccgagttgctccgaaatcaatttaaaatccccaaatccccaaatcatccacaaatcgctaccaaaatcaattgacatcacagaatgaacatactctaatccacaaatcgaccaaaacatctaaaataaatctacaagagacgagggaggagagccctcttcatgctccaccatccgcttcgtcgctggcgagcccctcttctgtcgccactcgttgcctcccctcccgccagatccggcggaggggagggtgccgccgccgcccgccgcctcccctctcgccagatccggtggaggggagagcgccgcctcccctcccgccggatcccgcggaggggagggtgctgcagccacccgtcggcgaggtgcgccgccgccgcccgtcacccgccgcctcccctcttgcgccgctgatccctcttccgagctgccgccgcgcgcgtgcgagagagagagagagagacggtgagagagatcgagagaaaggatagataaccgataaggataataaataaagggaggccaacgcttatagataaggccgacactatcggctcagtctcaataggtgcctttttaaaaaaaaaacgacacctataatatattaaatgtgctggttttttttaaaaaaatcgatatctataataaccggcacctatggttacttaaaggtgtcggttttaattgttccggcacctatattgccgatccgtatgagcttttttgtgctagtgaggagaggatgccgacgtagggatgccgatgctgatatcctcggctgaattttttttgtgaatttgacaaatcagtttcgaatttcaaatggtgaaattgcattatgaattttgcgaatcgggcgttatttggatctggactttgttttcttgcgccaaaaattgtttttaagtcacttaattatgcgctgatggggctcttagggtggcggcaaacaaaaatcatcgattttcacggaccttaaataacaagcaaagcgtttggtcacatgcaaaattatgttttgtcgtagtgagtgatacagtagtagagtcgtgggtgcacgactccatccaccgtgcggagttgaaaatcccaatgcccacgagtattacagactcatagatgctaattgttaggatgcatgagcatacgtgggtgttacacatgtagtggcgtgtgagtctaccatgtattccgaaagaaaacaatatttaccaaaaaatatttatttttgttttacatgttttcttgttgcacacaaaatacgggcgtaaaggttttgcgcgcgtataaaatttccacgatcccaggaaggcccttggagcacagaaaaaatacgggtgcggaagtttggcgagtgtataatgtttccaggtccaagcaagcacttagatcggctgaatttacgtggatgagctaattaggtccaggatattaaacgggttgattacgtcacccccataaaaatgccgattccgaatccgcagattaatggtctaattacgtcgaccgcattaatcttgctaactccgagtcggccggcttcagtgttcagttccatgacaccaatcggaatcggcgtccgaaactggacgtgatctgcagtggccacggctataaaggaacacaccctcgcagacgcagcaccaatgcaagaagcaaagaacatctgagatcagaagaactcgtgaaagcaaagaagacaatttcgatagtgagacgaagcaaagcaaggcgacgactttcattcatgggcgccgtcctcggcaccgggagggtggggactctgactcgggtggcgctgacgatcgtcgtcttcctgctgctcctgccatcgcacgccctcgccgcggccgtcgcgaaggacacctccgccacactggtcgagacgctgccgctgcccacgacgctggtcggcccggagagcgtcgcgttcgacaagttcggcgatggcccctacagcggcgtctccgacggccgcatcctccgttgggacggcgccgacgaaggttggacgacgtactcccactccccggggtacaacgtcgccaagtgcatggctcccaagctccatcccgccgagctcaccgagagcaagtgcggccggccgctcggcctccggttccacaacacctccggtaacctctacatcgccgacgcgtacaagggcctcatgcgtgtcggcccgcgcggcggggaggcaacggtgctcgccacggaggccgacggcgtgccgttcaagttcaccaatggtgtcgacgtcaaccaggtcaccggcgaggtctacttcaccgacagcagcacgcgcttccagcgatcccagcacgagatggtcacggccaccggcgactccacgggccgcctgatgaagtacgacgcgacgacgggctacctcgacgtgctccagtccggaatgacgtaccccaacggcctcgcccttagcgccgatcggagtcacctcgtggtggcgcttacggggccgtgcaagctggtgaggcactggatcgatggccccaaggccggtacgtcggagccattcgccgagctgccgggctacccggacaacgtgaggcccgacgggaagggaggctactgggtggcgctgcaccgtgagaagacggagtcgccgtacggctcggacacccacctcctcgccgtgaggatcggtcgcaaggggaagatcttgcaggagttgagggggccgaagaacgtcaggccaacggaggtgattgagagaggcggcggcaagctttacttgggttcagttgtgtggagattatgggtaccccatacccacacggcatagttatccgactagttataggggataacttatatatatggaatatgtataagatcatgacttgggtattacgtttccttatatattacggaacagcctaaagtcctggtttgataatattgtaaagtagatttaggaaaccgataccgtattggttaaggtttctatcttgtaatcctgccccccaccctatataaggtgggcaggaggccctctagggggcatgacacaacctgatcgtcagatctatactacacccggcggattcaaatccccaaacaggagtagggtattacctctcattgagagggcctgaacctgtctaaatcctttgtctctgcatccatccactttaggtctcgtacgctacccccttttattattgccgaattcatgtttcgacagttggcgcgccaggtaggggtgcgtcgagtttcctgacgacgagtgcgatggaatcaactttatgagtcgccggcttcgtcttcgcttcgggagctccttgattcctcaccgccgacgacttcatcaagacgaatcgccactgctgtcctccgcctgatcttgttcgcatcagcacgacgacaacgacggttcgatggatttgatggtcgtcctcgtccaccaccaagcctactggtccaatctacccaacgaggatgccatggtgttgcaagatggatctacaaacacgaagcatgtcaaaactgatctaatcggatgcaataggagatggctgtagccacgcggatgccttcctgccgtcctgcgtcgtgctaatggacaccaaagccgtcggggccgcgcacgctgctacgccgcccgcgactgcgacctccgcctcctccgctccgacgactgcgtcgcctccctccccgccgtcctcccggagtcgtggatctgttccctctgccgcttcaacgtcggcgaggaccgcccgattttctatggcttctacatctactgctagacctgcgcaggggactgtgcccgcgccatcatcgatcgctaccatggcgcacaaaacgtcgtcatcaacaaggctttgatcgaatggcaacatggccgacaaatgagacgatggcacgtcaccagcatggacaggactatgcaacaggaccatgcagcaacacgcatcctcctcaagccacccattaatcacctcgcattgatatttgtacatttatctttaattaattccttgctgccgctgatcagattaattctttgattgattacatgtgctaccgagacgccgtggtggtcaggatgtcgccgtgctgcagaatgtcgacttgatttgtccacgagttggcagctcattgctgccgggcctctacgcctgtgtggctggctacatccgctgacactgtcgaccccttcaacaagttcacgatcggctgcctccacgccgccgagtccgagtaccacaggagcttggcccggctacgtccaaggcatgcacactcgagcccggggggctccgccatgcggacccggctgcgcctcaccgttggtcgctgctgatgggcgtctacgacctcaccctcggcctgcctccgtcgccgccgactggtgtctccgtctacacggctggcctattatgccgccattgttgggcgtctacaatctcacccttggcctgcctccgtcgccgccgactggtgtcctcgcctatacggttggttggtcacaccaccgttcatgggcgtccacgtcttcaccgaccggctggacttcgccgccgccgactggtgtttccgcctgcacggccggcctattatgccgccattgtcgggcgtccacgacctcacccttggcctgcctccgtcgccgccgacaggtgttttcatcgctattgagatggactgcttcgttcccacatcggctacttctgctgtcaccaagggaatacgataaagctaagtcatcatttattttattctttatatgatatttttccttttcctctgcctcactacaccaattggccttccattgagtagtgagtcgggggctacagatgttatatcatatttttcataacatttatcttgattgcttgcgacataatctgagtacaaaagtacctatcgagttatggagttctatcttcctatgctttccgtttggtttgccaatggatggttgcctttgggtcgattcctagcacccgggggttcgttggatggaccgagtaacgcaaggtgctaagtattattcggaataaatcaaaagcatagagatgagataaatttattttctgctcttaataattgcaaaagtacctaagtagtaaattctgatccgtgaaactttgttccgtgatactactcatcctatatgtttgttctgcaggatccaaatccaaatatgcataaaagggattcatggctttaagcttatctcttacgctccaggaatggatcagtcagaacatcaccaccggctcgccgtcgtcgccgccgactggagtcttcacctatacggttggttggaaacaccaccgttgttgggcgtctacgtctttaccgactggccgcttcgtccaccgccgactggtgtcttcgcctatacggttggttggttacaccaccgttgttgggcgtctacgtcttcaccgaccggcttgccttcgtcgccgccgactggtgtctccgcctgcacggctggcctattatgccaccgttgttgggcgtctacgtcttcactgaccggccgcctcgtccgccgccgactggtgtttccgcctgcacggctggcctattatgccgccgttgttgggcgtctacgtcttcaccgaccggccgcctcgtccaccgccgactggtgtttccgcctgcatagctggcctgttatgacgccgactgatgctatcttcttcacggttggctacgtcgccgtcaccgctaatatgcgtcatcatcttcaccgaccggccgcctcgtccaccgccgactggtgtttccgcctgcatagctggcctgttatgacgccgactgatgctatcttcttcacggttggctacgtcgccgtcaccgctaatatgcgtcatcatcttcaacgcaagctgtctacgtctgccgccgactggcgcttttatcgtcacaattgcgcgtcttcactaccagtttgcttctgtcacttcatcacggcaatgcaactttgtcatcatggatttctacttggacatcttcaacacttattttcaatcaagcaatgactactcgacgataagaagctataattctcgactctatgttcagttgtttcccaactaaacaaagagtcgggggctacacaaatacatggctcaaaattcgacaagctttatgtcaaagatggagcaatcaattaatcagccaacgagtcaactccaggagtcattatcttcatctttacttcggagcagacaatctacttcaacaacatcaaatatttcggtttagacgagttggacaacagcatcaactctcctccaagtgaagcatctacaacagctataacattaatttgaaggattattgtcactgacatcatcaccagcacctttgcttcatcggccctgacatctccgctgttgctaatggatgattatgtcttcaccgacttattatttcaccttcacggttgacctactatgcaaatgctgatgagcgtctttgtcattatcattggttgctacactgctattgactggatcaccgacatcgttatcttcatcatgtcggttgcgtttgtcatcgtcaactattttcttcatcttcatgattgatggatttcgtcaccgcctttgatcttcattgttagttgatctgtctgtcgctgactggtttcttcgcctccatggctatgcgacttcagtaattttgattggtatcactatcttcactaccatcaatatttttgtcacctctgctgggcaatattatctctatattggtcgtcttgtctctatgccaactgcgtcagctaccatcaatagacaattgtgactacgacagaaggacaagctatatgctcagaggcttactagttcaaacacaagtattatgtctccaatttggacttgttccggatacatgcaacatgaatttatatcaaccgaatacttgcgccagtcgggattcaatttttatatctattttggagtatcccataagggataatcactcagatcacatggtctatatcacccgggagcatgttacatgcgtcatccttcaaagggtatcgaaggcatattttttggcctaggcctaatatgtctgcagcccatattttcaggtgtggcctgtcacgttcttttagggacttaggcactttttgcttaggccaaag

SEQ ID NO: 6334 - DNA, 41760 bp, Oryza sativa
actggtgcctccgcctacacggctggcctattatgccgccgctgttgggcgtatacgacctcaccgccggcctgcctccgtcgccgccgactggtgtcctcgcctatacggctggttggtcataccaccgttcatgggcgtccacgtcttcgccgaccggctggccttcgccgccgccgactggtgtttctgcctacacggctagcctattatgccgccactgttgggcgtctacgacttcaccgccggcctgccttcgtcgccgccgactggtgtcctcgcctatacggttgattggtcacaccaccgttcatgggcgtccacgtcttcaccgaccggcttgtcttcgccgccgccgattggtatctccgcctacagggctggcctattatgccgccattagtgggcatcttcgctttcaccgtcgacagccttcgtcgccgccgactggtgtcttcattattattaatggacgactttgttcccacattggccacctctgccatcaccgaggggaatattacaaagctaagtcatcatttattttattctttatatgatatttttgtcttttccttcgcctcactacatcaactggttcgccgttgactagtgagtcgggggctacagatgttatatcatatttttcataatatttatcttgattgcttgcgacataatctgagtacaaaagtacctatcgagttatggagttctatcttcctatgctttccgtttggtttgccaatggatggttgcctttgggccgattcctagcacccgggggctcgttggatggactgagtaacgcaaggttctaagtattattcagaataaatcaaaagcatagagataagataaatttattttctgctctttacaatctgagtacaaaagtacctatcgagttatggagttctatcttcctatgctttccgtttggtttgccaatggatggttgcctttgggccgattcctagcacccgggggctcgttggatggactgagtaacgcaaggttctaagtattattcagaataaatcaaaagcatagagataagataaatttattttctgctctttacaattgcaaaagtacccgagtagtaaattctgattcgtgaaactttattccattaatgacaaactcatgtcactcatatgtatgtttgggaagtgcctaggccgactcccgatgcttgggggctatgactagtcggacagagtgtttaaacgtacggagtcatctgcttagggaaatcaaaattgacaagaggagaaatacatatttataaatattttaaaatacttgattttttctcgagtattatatttatatcagatactactcatcctatatgtttgttctgcaggatccagatccagatatgcacaaaagggatacatggctttaagcttatctcttacgctccaggaatggatcagtcagaacatcaccaccggcttgccgtcatcgccgccgactggtgtcttcgcctatacggttgtttggtcacaccaccgttgttgggcgtctacgacttcaccgaccggccgcctcgtccgccgccgactggtgtttccgcctgcacggctggtctattatgccgccgttgttgggtgtctacgtcttcaccgaccggccgcctcgcccgccgccaactggtgtttccgcctgcacggctggcctattatgccgccgttgttgggcgtctacgtcttcaccgaccggccgcctcgcccgccgccgactggtgtttccgcctgcacggctggcctattatgccgccgttgttgggcgtctacgtcttcaccgaccggccgcctcgcccgccgccgactggtgtttccgcctgcacggctggcctattatgccgccgttgttgggcgtctacgtcttcaccgaccggccgcctcgtccgccaccgactagtgtcaccgcctgcacggctggcctgttatgacgccaactgatgctatcttcttcacggctggctacatcgccgtcaccgctaataggcatcatcatcttcgacgcaagctgtctacgtctactgctgactagtgccctcacctctacgtctggtttagacagctaccactactgatgaacatcatcgtcttccgtcgccgactggttatgctgtcgccgactggtgcttttatcttcacaactgcgcgtcttcaccaccggtttgcttctgttaccgccgacttgtgttcacttcattacagcaatacaactttgtcatcatggtggagcgacttcatctttattatcttcggcaccggcaaactctattggtgctacttcgcaagttttgctacttcaccaaccacgacgtctttgtgaacctcgacatctcggcatgcgatgccgtgttattttactacaacaagtggctcttcaatattcaggatttctacttggacatcttcaacacatatcttcaatcaagcaatgactattcgacgacaagaagctacagtctcgactctatgttcagttgtttcccaactaatcaaagagtcgggggctacacaaatacaaggctcaaaatttgacaaattttatgtcaagctaaagaaatcaattcatcaacccacgagtcaaatccaggagtcattatcttcatctttgcttcagaacagacattctacttcaacaacatcaaatattttgatttagacgagttggacaacagcatcaactctcctccaagtgaagcatctacaacagctataacattaatttgatggattattgtcactgacatcatcaccagcacctttgcttcatcggccctgacatctccgctgttgctaatggatgattatgtcttcaccgacttattatttcaccttcacggttgacctactatgcaaatgttgatgagcgtctttgtcattatcattggttgctacactgctattgactggatcaccgacatcgttatcttcatcatgtcggttgcgtttgtcgtcgtcaactattttcttcatcttcatgattgatggatttcgtcatcgcctttgatcttcattgttagttgatctgtctgtcgctgactggtttcttcgcctccatggttatgcaacttcattacctttgattggtgtcactgtttttactaccactgacatcttccgttacttctgatgagcaatttcgtcttcatgttggtcatttcatctccatgccgactgcgtcagctattgccaatagacaattttgactatgacagaaggacaagctatatgctcaggggctcatcaactcaagcgtgaggattatatctccaatttggacttgttccggatacattccacatggattcatagtcatgagtctattttctatgctcaaagactggaccaattattattccccgtaagggctatcaaccgaatacttgcgccagtcgggattcaattattatatttattttggagtatcccataagggataatcattcagatcagaagctattcatatgagctacacttggtctatattacccggaagatttattactagggagcatgttacatgcgtcatcctttaaagggtatcgaaggcatattttttggcctaggcctaatatgtctgcagcccatattttcaggtgtggcctgtcacgttcttttagggacttaggcactttttgcttaggccaaagtgcgcgtgatcaagtgcccaataccttaaaatccttttataccgcagttacttaactttttaggagttggtacaatgcatcttaaaaggtgtcaaacagtaaagctttatatagctgtcccgctgacttttttatatataagtcaatgtgctgtttgggtttttaagcaattgattggatacaatatcattgcttttcgccacgtaagtgtgcatttttattgaccaatattatggcttaggctgattatatattgtggtcattttctaggcggttggtaaaacctttatgagtttatttactcggattttacaccacatatgccatatatttccgggtgtggtgaaaccatgtgtcttctagggacttaagcacatctgttaaagcagtgtgcgcatggcgtatgcccaatactttggaaatttctttattcacaatatacaagcttctttatagctattttgctatatcactcatcatattttacaaagcagttggtatatcactcggatcatgttatttggaggattcacaccgcatatgctatatattgatatcaagtcacttggttgattacgattatcaaaaccactcggttggttggattatttattccttgactatatgcttggtttgttcaattaaccacattgtcgggggctacacctattaggtgcatctagtcggtgcacctgactttattttccagccctccacagtcttcagatttggtaaaagtactcgggagaccatgacaaagatgattgaagcactcggctttggagtaatctggttcgagagaagattatcttttcgactgcgaaggtctcaggggctactgtggatattatgggtaccccatacccatacggcatggttatccgactagtcataggggataacttatatctatggaatatgtaatagatcatgactcgggtattacgtttccttatatattacggaacagcctaaagtcctggtttgataatattgtaaagtagatttaggaaaccgataccgtattggttaaggtttctatcttgtaatcctgccccccaccctatataaggtgggcaggaggccctctagggggcatgagacaacctgatcgtcagatcaatacatactcggcggattcaaatccccaaacaggagtagggtattacctctcattgagagggcctgaacctgtctaaatcatttgtctccgcatccatccacttttaggtttcgtgcgctacccccttttattattgccgaattcatgtttcgacactaccctaaccatattttttttcaaattagaatagtaaacgataatttcagataaaattaagaaacttgattgaatattactgaataaagatacatatatagcaaatataaatcggaatgaatacaaccacaaatatttatcgaaacatgaaaaccacttatactgtgcttccaaaatcaatatataaactagatcttttatcaaaagaatatgctaaatttatgctaaatataatatgttgttgtaaattaaactctttgtttttttagaaatttaaaagtatttagcattataattagagtaaatttcacaaaattacatgttttatagttcaagttgtagaaaactacacacattttgacacttggcacttaagtacatatattttgatagtttagtttcacaaaaccacactatcgatgaatggattcacccatgagataacgtggttgttccatcaaggatgagaacgtggcatcctattaatttcgtgcgatggctggcaataggatgccatgtcctcatcctaagtgaaacagtcacgttatctcgcgggtgaatccattcattgacagtgtggttttgtgaaactacactaccaaaatatatgtacttaagtgccaagtgtcaaagtgtgtgtggttttctgcaacttggactacaaaacgtgcagttttatgaaatttactcttataattatgaagttgtatccatattagaatctcaatttcaagtgttatgtgttttactctaaaattaataattaataaatgtaattgatatggaccatttttacaagaataagctattaaattaataaagaatcaatctatttaatacactattaaatatttagtatcaataatattaatatagtctatggtttggaacaagaaaaatgcttgtccggtggtatttcgtagaacaactaatgtttttagaaacacagtacaaacatagatgtttataacacacgcacactcaccccggtaaacaaacatcctgcctctatgagcatctccgaaagatttatctatcatatattgaaattgacgaaatcaccacgggtgtctcgttgtcgatgtgaagtacatcacctaatactaaagaataatttaccgtaaatgtgagcacccgtgtcaaatctacgacttgaacccaggtaagcaggttccaccacaaggaagctaatcagttcagttacgttcactttgacattaaaggtaggttgtagaactgataatctgtcaatggtgaaatatagattcttccaaaaaaatgatctatgctaaatggatggatttatttgaggcaaatgatttgttgctggcctcggtttcttcgagcatgtgttagtgacacactcccgcacggacgtgcttatgatgcgttatgcctgtatatgtggctttcacctaatgatgataaacaagcgcaatgataagctgaagcagtacataattatgccccctaccccgctaatggcatatatgtgctttccttcataactcagttaggtatcaagttcttcattctctactctgtcgtgccatgacttttgttgctttaatttctagcttgctataaattcctgcacctcagtcctgtcccaaccatcaaattcgtcttgatcaaactatcagagcacatatggcactcactcacctcctctgctccctcctccttgccaccgcattgctgctgctctccatctcccgtacaggtaaccatggcaaacgtagaaacgctttcgattattttggactagtagtattatttagatatgcttaagtatgtgcagctttgtaccaacagaaccggtgtttcttagctttccactgcactgtcagtggcagagcgaccgctcggctagcccgggcagtccggctcgccggcgaaaactccattaaattttaatattgatggataaatcaatgagaaaataacaaatactagttaggccctctttaattgaaagaaaattcataggaattttagaggattttattcttataggaatttttcctacaaagccttttgaatcaaagaaatgaaccctatgaaatcctatgaaattcctattaaatacctcttcccatacaagttttggaggaattttaataagagatagaacctcatggaagaaatcctttgagtctttatctctccttaaattcctgtgtttttcctgtggtccaatcaaacagtcattccgtttttcctgtgttttgcaatcctctgttttacactttcattcctgtcagaatcctatgtttttcttattcctccgttttttcatttctgtgattcaaaggggcacttatattgaagtttgcctgggctcaaaaatctatctttctgactccaccactgactgcagaggctggcgaggtgggcgtgtgctacgggagggacgcggacgatttgatggatccaccggccgtggtgaatcttctgaaggagaacggcatcacgaaggtgaggatctacgacgccgacccgacggtgctgagatcgctgtccaacacaggcatcaaggtgatggtggcactacccaacaaggaccttgcttctgcaggccacgatcagggaagtgcgctagactgggtgaaaacaaacattgttccgtactataaccagggcacacaaatcaatggtgtggctgtggggaatgaggtgttcaggcaagcacccaacttgacccctcagctgttaccggcgatgaagaatgtgcagacggcgctagcgagactgggccttgccgacatcataaaggtatcaacacccattaattttgatgcggtcaatgtgtcatggccatcatccaagggtgtgtttcaagacagcatcgcccagtcggtaatgagtcccatgatcgatttcttgcaacagaccaactcatatctcatggtcaatttctacccatatattgcctgggctaactctaaaggccagatctcccgcgattacgctacatttggccccaacgccggtgtagtcgatccgtggagccacatcacatactatagtctctttgatgcccagctcgatgctgtttactacgctataaatcaggtttctggtgatagtgtgagggcctcaatggcccaaacaagatgggggcacccgacaccaagggtgcccgtcaaatgttcggaatgtgggcatccctccggtggtcagttccgcaagttgaccacacaagctgatgccgaagtggatgtggctacaaaagctaacgcccaagcattcaacaatggtattatcagacgcgctctgtttggagcctctggtatgcctgatgtctctgtgtacatcttcgctcttttcaacgagaacaagaaggctggagcatctgtagaacgcaacttcggcctgttctaccctaacggtacaaaggtttacgaggttgattttcatggtggtggtatttgtcccaccaaggcgagctggtgcgtggcaaatttagctgtggggaattcccggctgcaggcggcgttggattgggcttgtagtaacggcgcagactgcagcgctatccaacagggcaaaccttgcttcgagccaaacacaatggttgcgcatgcgtctttcgcattcaatgactactaccagcggatgggccaagccaatgggacatgcgactttgctggcgctgcttatattgtcttccaaccatcagaaagttagttcctacgaccacatatttcttaaaatgcaattttgtttagttctcacaaccatttgataaatctgcctcactgtttatctactaaattgcaggcatttgcgacccaaatccaagttggtgtatcgcgaaccctgcagttggggacatgcggctacaggcagccctagattatgcatgcggcagctgtgcagactgcagcgccatccagcccggtgcacggtgtttcgagcctaacactaaggtggcgcacgcatcctacgcattcaacgactattaccagcgtgttggccgagtcagtggctcgtgtgacttcggtggtgctggttccattacctaccaggcaccaggtgagttcaagctcaacagatattctcatcttgtttgtttcagatattgctttcaaaaattattgcccatgcatttcttctcccatatataatttttcgaagcaaacatagctaattaattgatccatcttctttcgtggcttacaaccacgtgccattttaatctccattgtatgttttgttttgaaactaaatgccattaacaatgcgttcgaaaccttcaagtgctaataatgtacattttgcgtaaaaaaaatacacacttgtttttgtacactacgtgatgattcaactagttaaatggtgatcttaggtgtttgttgaattattttcagagattggaaactgcgtccttccgccaatgcttgaactggacaaagcgtactgaagaccgagggctaagctagctaccatcagttcgcgatagtggggatggatatcgaagaacaagtccacatcgtttggcaaaaataaaatgatatgtttgtagcagtttttccagtcgggtctattgaaataagtaaatataccgttcattcctgttggatgaaattcctcagttacataccctgagcaatttatcatgtatgtgcatatgatcagactcctaagcagaactgaaaacatgaagaagtatttatttatttatttttagagaggatcaatgcactctaccatttccataaccgctgcaaaggtttgaatttttttttaaaaaaggaaaactgcacgagattgtgtttttcattaaatatagaagtacaaaattacaaccccaaggaataaaggaaaatagaaagcactctatacacaatacatggttgggtacgtaagagctcgcgtaagcactttgcacctgccagcgcccacgtcctcgcttcctctttaatttaaaataaaagcatcgccaactgaaacatacccaattcttttcggcatcatatataggtgccatcctattccaccttctaaggcaattcgagcactagaggagaaaggaactagacatcacaactcctgaacatctggaacagtttaagaactcctgaaacacaaaacgaccaacttattattacagaaggttcaacaggcataagtgcaaagcctgaaccagctccaaatcaaaacaacaaaacagttaacagagaaaagtccccccaagacaatattgtggagaattatgggtaccacatactcacatggctaggctatccgactggttatagggaatagatcatgtatatagaatatatataaagactaggactcgggtataacatttacttgtctatcaaggaacggtttgtagtcctggtttgttaagtttgtagattaggtataggagatctaaactataagggatatggtctctatcttataagactactccttcgcctatataaggagggcatgacgcctctttgggggcagattcataaccagatcgttagatctatattacacctggtggattcaaatccctaaaccggagtagggtataacctctcatcgagagggcctgaacctgtctaaattcttgtctctgtatccatcaacttttagatcccgtgcgctaccctgtttatattactgaattctagtttcgacgagtattaaacttgctcaaacgataagttgtttggctctcccctgctaggcttgatgtagatagctactctctctatcatataaaaaaacctaagggattgttcagattgttatcatttcaaaggcataccattttttagagttgtcaaatatttgcatccatttagttttattttaccaaactctaataactacatataaatgctgtcaaaacttggcaatattgttaaattgttgaaattttgatattgtcaaaatttggtaagatttattttagctataatctgaacatgccttaagattggatggaacatatttaatgtgctaggatatagcacatccaattctagattggttttttttatgggacggaggcaggcgccttaggccatgcaatatatgatgcatgatgcaagtagaaaaaaaaatgttgaaagatgggacgaaccaactaattaattatagataagaatgctggatgtgaggagccttacacgccaccatcgaaagctccccatggttgaccacttgacctactaataaacttcgttctaattgcaggtgttggcgtgttgctgattgaacgagaggaaggcatcaatagcgtgggggtggtggagtcctctacatagtacctaaactctagcgaaagataatctactgtaagaattactgacaaaaagctgagtctggtaaagatagaattgctgatatatactccctccgtcccaaaatataagggattttgagttttgattgtaacgtttgaccactcgtcttattcaatttttttttgcaagtataaaaaacgaaaagttatgcttaaaatactgtagataataaagtaagtcacaaataaaataaataataatttcaaaaaaaattgaataagacgagtggtcaaacgctgcaaagaaaaacgcaaaatcccttatattatgggacgaagggagtagatgttttaacgtctatacctacacattatggccttgtttaattcccaaaaattttttttacctaaaaacatcacatcaaatctttgaacacatacataaagcattaaatatagataaataaaaagactaattgcatagtttgtatggaaatcgcgagacaaatcttttgagcctaattagttcatgattagccataagtgctatagtaacctatatgtgctaatgacggattaattaggcttaataaattgatatctcacggtttccacgcgagttatgaaattagttttttcattcgtatccgaaaacccctaccgacatccgatcaaacgtccaatgtgacacctacaaattttcttttcgcgaactaaacagtcctatatattaagagtgtaagatggacctttcccagctgatgtatatgttggtaaaaatagtccaacatatagttccacccactttttttttcaaattattgtgcataagtattacgcaaatatgggtatgattccaacaatattttaatgaggtccaagatttatcaccagtctttgtccgttttggcgtctgttaatgtacgtgggtgtgggattgtgtgtatgcatcttgtgtgtaaagaaaaaaattgagggcaaaagcaagtaatatgtggggttaagaaacaccaaaacaacttccaggctgttttatcaatagttgagataagagagtgatttatttactaggaccgttgaaattcgaacttgccaaaactttaaattttggtttagtctttttttttctaaaaatttatgttgagatgtatattagcacaaacccattataattttcttttgtttcgggtagcggcaggagggatatgctgcagaaggataaatataacatatacagagaccatgtttgtttcttttttttttcagaagttgccaaggtcatttcgaaaaaaaaaaggataaatccgccgaagcgatattgtgataggtggaaaggctgaaagctatgttgccgtcccctaatctgttgagagatgccaattagtctacgttgatcaccaatagtataagtggtcagtagattatactctctccatattttaatgtatgacgctgttgactttgtaaccaatatttgaccattcgtcttattcaaattttttatgcaaatacaaaaatacttatgtcatgcttaaagcacatttgatgataaatcaagtcacaataaaataaatgataattacataaattttttgaataagacgaaatgtcgaacgtttgttaaaaagtcaacgggggagtattagttgccatgtgttgggaaagcgatcaagaggaaataattcaaatggctgcccggttgagactcgacgaagtaggggaaggattttaggtgcataaatgtgagattgtgactctgaagacaccttagcatatcaacatctccactccatcactcttgaaaaagaaaaatgacaaataaatcaattaatcatgttgtgtttatccaccattgtcgactggaagtggttcctctgatgtaaagtcaaagggacatatatcactaacatatagtgcccatcctatcctagagtccatccttatgggcatatatatcaagagacataggttactctattgtaccgataaatatgtttgttaaccgttccaccaaagagtatccaatgcaataggagtagttgagatgctattgctgaagtatttatgctgcaacttagcttctgttttgtcggcacattagctgggtgttagtcaaagatgtagggtatatctcgaattaatacttttttagtcacgtttagtaccgaacgccatgaatcttttaagacttagccaattcgtcttccatctcctcagctttccaagttcttcgctttcctttgcaccattccgtattcaaagatccactgccctttctctttaactgacgggaagacacaaggaagccatcttgacagctctaagatcggacctgctggctgctgctgtgatttttgggtgagagcttgttgattcaaattggaattgttatgattcgagtaggaagttcatggttctaatacaaattttagatactcgagttccaagttagaggcttttgcatagaaacgtttggatattttagttcaaagttatgatttttgtgtgataagtttggggactcgaactgaaagttcaagacaacgagtagaaatattcgaggattttgagtcaaagtttcgatgtccagcttgaaaagtgtgtttttcttttctttcttgctccagatggaccagatgtagggatctccaaagaagcaatcagccctcttgatttacgctgcctcttgccacggtgtgcactgtgcagttgcagagtagagcatggcattcagtcacctcctccacgccctcctcgtggccgcggcgttgccgctgctccttctcccccgtgctgcaggtaacgtgcttctggctttcctgccaatgcagctgatcggcaacgccaaacgatggagtaattccttgctcgtcaatgcagatgctggcgagatcggggtgtgctacgggagggacgcgaacaacctgatcgacccaccggcggcggtgagccttctgaaggcgaacggcatctccgcggtgaggatcttcgacgcggaccagacggtgctggacgcgatggcgaacaccggcatcaaggtgatggtggcgatacccaacgccgatctggccgccgccggccaggatctgcgcagcgcgaccgactgggtgacgaacaacgtggtgccgtatcgcagccggggcacgctgatcaacggcgtcgccgtcgggaacgaggtgttcaggcagagacccgaactgaccgggatgctcgtctcggccatgcgaaacttgcacaaggcgctggagaacctgaacctggcgaacgacgtaaaggtgtccacgccgatcgccttcgatgcgctcaagcagtcgtcccctccatctgcgggggagtttaaagatgagatcgcgcaatcggtgatgaagcccatgattgacttcttgaaacagaccggctcgtacttcatggtcaatctctacccgtacttcgcatacgtggctcagcctgacaaaatctctctggagttcgcgacgttccgccctaacgctggtgtgcttgatggcaataccggcatcaggtacttcagcctctttgatgctcagctcgacgctgtttatgctgcgataaacagggtttctggtggtagcttaacggtctcaatggctcgacgagatggaatccttagtgtgcaagcttcagaatcagggcacccctctggaggtacatttcccctattttccatgctagctgcagccgatacggactcgatagccacgatagccgatgcccaagcgtacaacaatgggcttatcagacgtgtagtatccggagcctccggtatgcgtgacgtctccgcctacatcttctctcttttcaatgaaaacgagaagcctgggccagccatagagagaaactttggcttgttctacccaaatggtcagaaggtgtatgaggttgactttaggggcggtggcggtggcggagcttgccccacaaagacaagttggtgtgtggcaagaacagatgttgggagtgcagcattgcagtcagcattggactttgcgtgcggtaacggcgcggactgcagcgctatccggcagggcagtgtgtgtttcgaaccaaacaccttggttgcacacgcgtcgtacgcattcaacgactactaccaacgcaagggccaggccagcggcacttgcaacttctctggcgccgcttccatcgtattcaagccatcgccaagtaatgttttgctctcaatctttaagatcaatgaggctttcgcaaatgtgcattcatatcttgattccatctcattgtttatttgtcctgtgaattgtttcccgagatataggcatatgtgatccgaacccaagttggtgcgttgcgaaatcggaggtcggggacgcacaactacaaaatgcactagactatgcatgtggtagctgcgcggactgcagcgccattcaaccaggtgcacggtgctttgatcctgacactaaggtagcacacgcgacctatgcattcaacgatttttaccagaccaccggccgggctagtggatcgtgtgactttgccggtgctgcttctattgtcaaccagcaaccaagtgagttttctctcattttactgtgcatgatatatatgccctactgctactaatgtacatattccctaagaaaaattgcacacttctgtttcaagtagtaagtggttatcttattagtgcttgttcaataatttacagaaataggaaactgcgtgctcccaccaaacaatgctgggacagaacaaactgcaattgaagatcaatcgactgcaaacttaccagcaacagcttggcagtgaggatggattaaagaatcacttcatatttttctgcagagaaaaaaataatggtaccattaataattagttgggattgaagagacgaataaatgtaccgttcactcctgttgaatgaaaccctgctgttagtattcaaatgattgaaccaagggatgctctcctcaggcgactctgaggcgacctagctgcgccggcggccactccggcctcggcgtccacaccccgccgctgctggccacctcgaccgcagcggaaagctcctagcgccgacggcaagtctggcccctcgcagccactctcgtcgccgtgacatcgtcttcttgtcatccactatgccgaccaaccaaagagaacctcccaggcttcttcacaggtcacagctcccctcaccgcgcgtctccagcgacttcactcagcccccccatcgctctccctccccagccgcgcccgttccccccttttggctcgactcgccgctgccaccgccccccagatccagccgtgccatgtcgccagatgcagtttcggaggtccctgagaccccggatccgggggctgggacaccagatccgcgccgcctccaactgtttgccgatgtggtgaagcagcccgccttaaaaccccgtttgaaatcgcatttaacagtgcccgtcaagagcaactactacctcgccaaccagtctccaggccaagatcgacagcaagcatcctacgaagctacaaagcgagggagtacggcgaggagactctcccctgtccagtcgaccagcggcaccattaacactcgagacggaggttggacgccggtcagaaggcgcttctggtggaggcaaaaggaagctcttgctcccgagtcaaagagcaattcaaagcgacgcgacggccattcacttgactccaacaaccggccggcaccatccccctcgctctaagcttttcaagcaaaaactcagggccgttgtttcatttgccttgctcgcaatcaccgcgcagctcaatgcagagaccctgtgcgatgcttcaactgcgcacgctccgggcataaggcccgcaattgcagcgcgcgggtgcccacgctgcgttgcgccgtcacgcgacgctcgcctcttccatatccgccgtcgcacccgtcgcaacggccgtcgtgccccagttccagcttgcctttacgcccccctcgacaccactctaggccaccaacaccaccatgcaaccttcctccgcctccgcgccccaccaccaaagcagcaatggctctcctgggtgacccaagaacgcgccccctcgacgacgactgcatcatcctgtcttcgtttgttctccaggaagaacgtcgtgaatgggagaccacggcggcagtcacctgggcaatgcgagcaccagcggccatgacagccaaagacgtggagaacgccatcaaggaggagtttcgtcttcactctggcgacgttgaggtcacccaccaccaccccgaagcctacctcatcaagttctcccggcgcagccactgtgccgatgctctttggaagggcttcgtcaaacggcgagggattgaagtccacttcatcaagtggagatgtctaaaggacgcgatgggcgcggctctcatgtttcgtgtcaagctcttcctggacggcgtcccccgacatgcctggcagccggaaatcgtcgacaagatcgtcgcgcggcgttgcggtgtggagaaaatcgagactaacttggttcacccaagccacacgcgctacattagcttgtgggcttggacctccaacccgagcctcatcccttgacgtgtttggctcaccttcaccaggcgcacgcaggacgctgacgccgactcggtggtggtcacggagtcgccaccggaccactggcagtacggggccaagtacccggtgctcatctacgtcgaggagatccatgactacaccacggcaacgattgacctctccaaccctgacgcggcgtgtgagccgaccaagcgccagctgtcggcttggcaccttggcgtggttgatggcgagcagccgcccccacgcgccttcgatggaccgcaccctctgccgccgcgcactcaagacagggaggaagacgaacgccgcaatgatgaatgcggctgcgatcgcacgcgtggtgtcgaccgtgaccgcgagcgcggaaatagtcgccgaaatgaagggaggcggtacaatgacgaccacccggacgagctgcgaggccagggctggagacgccatgatcgcgatgacgaccgtgacggccgcgacggcggcgacacgcgtggtggcaacagttcaaggcgcgcggggctgaacggcgtgcgacaccgcacgtgctcgccaaggagaagggactccgtaggcgggaactgctatggcagacgacaccatgaaggggcacgcgatccggtggaagcagctgaacctctggcgccggtgtccgaggctaaacgtgctgaccgcgaggtaagtaagctgaaggttctttaccacttcaagttaacctcgttgcaatggaaggtgaaggcactcacagagaaaaatgtccgcgacatcaatgacatatcctttgactttgcctcactcttcggcaagctcaaactgggggcaggggggatgaaggctggtccaaagggcactctaccaagacggagcacaccattcctgcgagccgagctttttggcgcatcaagcaagctgcccagcggccgccgtccatccgtgaggtcgacgacgccctccgtcgatgggaagaaaatggggaagcggccctcgtcgttccatcaccgctggcatcacgaggtgcttctccaaccgtcgttggcgacaacttgccgctcacggtagacaaaggtgaattctccgatccggcttcggcatatttggctcttgtaaatgcagcggcacagggcgataaggaacatggagacatggttgcggctgcggtgcatggtgctgatgcggtgcacgatactgttgctgtggcacatgatgccgctgcggcgcgtgatgaagcggctgttgtggcagccgctgcagcactggcggatgatgtggaacgcggcacggcggcatgcggcactgcagtgcatgatgtggaacgcggcactgctgccgcgcacgacgtcgcggtggatgctgccgcggcgcacgacgtagcgatggaggctgccgcggcgcacgacgtcgctgtggcggacgacgacaccgcagacaaggagcaggatgaggcggctgcagcggcaacggcggttgctgttgcgcacgacgttgctatggtgcacgacgacaccacgtccaaggcgcaggttgaggtggctgcagcggcagctatggcgaccgctacggttcaggatgatgaggccgtcgcggacaagggagaggcgccggtggaggacgcagaggacgaagcggcaagtggcgacatgacaactatgccgcacgatagagtggccgtggtgacccgctctgctgttttgctgccgggcgacatggaccacgctgcgctagatgacatggctgtggtgattccccctgccgcgatgctactgcaagacggggagcaggctcctaccaccccaacatctccagttgtgccgtccacgccgaccatcagagctgctgtcgacggcgccatgagcgtgctgttcaagccattggaaccagcgcttctcaccattccactcgaagaacaacaggtgcaacagaatgaagtgcaggccgaggatggtgccaggcggagcgccagactcgccatgaaacctctcgccggcatcccgatggtcgtaaaggcacaaatcaatgtctgtcgccaaatgggtttccttccagtaggaggagtcctcactaaccaaacacttgctgactacaaggcgatgttcaacacgcccctaccgcaggatgcgatcgacgcactcaacaccctcttcaacctcaacaacgaacacatgcaagaaagagatgaagcgatggcagcctacttggggccggtggacgcagaggctgtcatgggtgaggtggtcagggcaacctagacccatgccaagaagcatggatcgtccgtcctgaagtgtcttttgtttccctcatgtgcgaaaactacaaatgcctaccgacgctggttaattctgcaaatgtcgtcttaatcccgaaaaaagaaggtgcagagtgcatcgcggactaccgaccgatcagcctcatccacggagtagtaaagctcatctctaagaccctggccaacaggctacagcctttcatgaactccgtcgtcagccatgctcagagtgctttcattaaaaagagaagcatccatgacaacttcatgtacgtccgtaacctggcgagaaaattccaccagacgagaaagcccagtctcctgctcaagctcgacattacaaaggcattcgacacagtccgttgggactacctacttgatcttatgcagcagaaaggcttccctacgagatggagagattggataacaaatattctcaggagttcttcttcgcgggtgcttctcaatggagcccctggccctcctataagacatgggcgtgggctcagacaaggcgatcctctatcccccctcctattcgtcttggccattgaccccctacaccttctcctcgaaaaagcgacaagcgaggggctgctaactaaactcaacggacgagctgcgcggctaagaacctccttatacgccgatgacgctgcgatcttcatctacccctcggtccaggacatgaccaacctcgcgcaaatcctgacccactttggtgagatcatgggtcttaacacaaacttggccaagagccaaattgtgccaattcgctgcgaaaacataaatttgcagaacatcaccgaaatcttcccagcacaagtcacccatttcccgatgaaatacttgggtctcccactcgctctctccaagctcaaaaaggtgcacgttcaaccccttcttgacaagtgtcgaaaaaaatggctccatggcaaggcaaacttttgaacgcagctggtcgcatggccctcacgaaatcagtgctgacagcccaaccaatctatcatatgacggcactaaagctaccggatggcactctggaagccatcgataaaaccagacgaaaattcctatgggctggaggagaagacatctcagggggaaaatgcaaggttaattgggaaagcatgtgtagacccaaagagttgggagggcttggcgtcctggacctcttcaagtttgcaagagcccttagactgcgatggctttggtttgaatggactgcgccagaaaggccttggacaggcaccattgtcccttgcgatcagctagacaaagacctcttcgcagcagcaaccactataactattggagatgggaggacggcgaacttctggcactcccactggattgaaggcaaatcgccaaaaagcatcgctccggcaattttcgccgcttcaaaaaggaagaacagaacagttcgagaagctctgacttccaattcctggatcagagacattaacctcctacatctcacatccggtgaccaccttcggcaatacattgagctgtggaccctcattcacaacagagccccctgggacaacagcgtgacaccatcacctggaaactaactctcatcggggagtacaccacgaaatcagcgtacagacttcagttcttgggggcagcaaaatcctttttcaacgagacgatctggaaatgttgggcgccgccaaaatgcaagttcttcgcatggttggttatgcaaaaccaggtgtggacggctgatcgactccaaaaacgaggctggagaaaccaacagtattgcccactttgccacactacattggaaacggcagtccatctcctcgctcactgcagattctcccaacgcatctggctggatatccaaagatggactggtcttaatctcaacattcacaactgggacagatgtgcctccgtggaggattggtggtatctactcatgcacagtcggcaaaatccgaccaaggccgtcaagaccctaatcatcctcatctcctgggaactatggtgcacgaatcttttgacacaatggcagcccgccaacggcggtggtcaacaaaataaaaggagaagtggctacgtgggtccttgcaggggcatctagtctgagtgcgtttactactctgggaggaatcccgtagagtcccccccctctatctgttgtagggccatgtaaatatcagtcatgtttttttactttcctgctctatcaatatatacgaggcaaagcttttgccttcttttcaaaaaaaaaaaaaccctgctgttgcacatttcagagaatgaaagaaatacatgtacgccacactcgtgcagcaatggaccgaaaacacacagctgccgcagcttgtcatcttataagctacaacctaaatttgagttttcagacaaaatttcgagttactctagatgtttttctttattcatcgcttcctgtttttaggccgttggcttgtaaaccgatgaaagtaggagtataaaagtctgctctaaaatcatttctggttattccgttcatttttctcagcttttaaacctacattgtctgcaattgagcggagctcgacatctacgaggacgatggcgcattgggaaccggatcctctgacttagagtaaccaaagtcagagggacatccaatgccgctgcaccgttcgttttccatcagacggacctgagcgattgcagcagaaagaccagctagatctcagcccacgtggctcacaagcaggcttgctctcgcctcttggccgcctcactcgccacagatgccgctgccggcggcagcctgcaccttccgaaggagagaattgtaaccaaggagccagttctcccccattgcaaactgctctagctctgctggtcaaccatgccaccttttaggtgaaaccccctccgcagctgtggaagaatttgttgtcgtgaaagatgtagcgagtgagcgagcgatccttgaacaccttaacaacaacaataataagcaaaatcgcaaatcgggatggcattgtataatcttactcaattcaaaattctaaattcatattgattgtacagaacagaagagcgagcaaacgtatatggactagcctaggacaaaatctgtatacatatgttcagcctcagtctcacatgttcaattcagtaacaccaacacattctaataccaagaacaggagcaggccagcagcctcaaatgtttagctttcttttgcatacatattgattggcatcaatttcacattctcatattcacacaatagtgagtctcaaattgacacaaatattcaatcatcatattcagtgttgaatcacaatctcaattcatatatcaatttagattctcaatctcatcttctcgagctgctgctgtaaccctcatctggaaggcagaggtggtcatgttagtgtcagcaacctgaagaacaccaagccagttgctgaacaactcagtcctcatgagaatgtaactctcgctcctaagcgttctagacttattaaccaaaggtatttggggccagattgggccgtgtaatgtgggcctcgtacctgttgattagctggcaatagttggtaagggagagagagagaggaatacaaatactgtaagacttgtaagatacaactatcctagagatcaatctatcggaggcgaattggcagcggcggcgatacggtctcgttgatcgtatcgaacaattcctctgtgttcttgtgttcttgcgtgaatagctcacagttagcctcctccagagactgcaacatcgcctccctcccgtagtgctgtggctcatggtagtgcactgctgtagatggggcctaagggcttgacaaggcggccgccagccatggggcaaggtgagaaaagagaggagaaaagaggcatcgtgaagtctttgagtgctcgactggtggttgtgcacatgtgggccgaactttgttgccgtgggccgagctgatcgagcccgttcgtttcggctgagctcgctagcttccatccgatgcggatcgagcggaccaatgcggcggatctagttccggcgcattggcgcaatgcgggcactgcgaaagatccagcgtccaccggccggcatgatctccgttgctcgggcctcaggtggccaggtgccactgccacagatcgcttagtcctcgtgacctcgcccatgtccgttggccatcggcagcgatcagcacatcatcatcgagaagacgagaacgccaaggccagactcaattgccacgaagatggactactccatggtgacatcgtggccgccggcgacggcagcttgcacggagaggaagagggtgagcaaggcggcgccgatggaggaggagggaggtggcggtggcgtgttcagcgagatgtgaggcaccatacgcgtgaaattgactgtagacgaagatgtgggtgtttggggattgatggacgatgggagtggaaaccattttaggctaaacccgttctaccatccagtgcaaatccatggatatatcgaacccattttgggccacaaaagttgcaaccaaatctaaatcacttgcatctctcaagtatgagtctaattcgattatcgtccctcaatcgcaaaaaaggaatatacaacatctctcaattactaatatcggttcattttgtgtctcaaaacagtttggatggtggtttagtccttcgtagttggttgcgggctcacatgttagttctgatgagaaagaaataatagagatggagctagccgaggcaagagtaggacgatgatggataagggatccttgcctgccctcattggcgcctagcgctggagctatgacgcgaggattctgctggcgtatgatgtggccaccatcgctgtccgtagaatccatcaaaccaccaaagcctcggtggcatcgcttcctaccatcctcctcccataggcatagcttcatatattttgatcgatctgtcggaattcatacggttctgagttattgtcttcttttgaggtttaattcaaaaaattgccaagaataggatcaacattttagcattgatattgagttattaaccacctgttcttggctggctgctaattcatcttgcaggtcgagttcagcgccaggcgattagcctgctaccgacacgacgtggcccatgacgatggtggccaagaaggggaggcgcatcacgggaggaatacggcgacacattggtcatggcggcccacctccgttgtcaccttaccgtggatgggatggcgaactcgccggctccctcccctctatcctctcctctcctatgctcacttccgttgtcaccttcccgtagatgggttggcaagctcgagctcgccgaccaccactaccgttgattcctcgtcaggagaaataggaaaagaggagagagacagagagggtagggaaggggatgacctatttcactgacagtggggtctatcatattttttagttcttttttgtttgaagtgccacatagacgctacatcaatccaagatctccgtgaatactgcatagggactcgatttacggtagtttcagaagataggaggtgctctatacccggctctactattaagggacgtgaataaaactcacgcataatgaagggaccaaaagtggaccttctccttttctcgtccactcaaacctcttcgatataatccacgtacaacctcagcccagtcaaattcatccaaagccaactcaaaaggagaatcaacacaaaaaagaataccattcccacccaacggacttgtaggcctagcagcagggcaagaggagggatccagtgtttgccacagcttgcggcctaggctgcgttttcactggttatccctgcgcatgcttcccaaactattaaacggtatgttttttaaaaaaaattatattagaaagttgctttaaaaattcatattaatcgatttttcaaacttaaaatacttaatactcaattaatcacacgctaatgattcaccttgatttacgtatcttttcaatcttctcttttcctctcaactcaaactcgatcactgtaatttagtgtgcaacaggatgcccattatatcatggagcggacgcccatttttatcttgggagctgcccgttaccacttttaccagataaacgacaggatcttgcaccttgatctggcctagttggcctatggcgaaattcctgcttcaccacctgcgttgtgagccgatagaactattatggctgactcccacggctcgccgtgggtaagcatgtacctcttccatattttttaaggagagtaaaatttcgcatactatagacctgttaggtttcttttgtacagcttcaaatccaagaccttttgaagctttgatctaactctatgattacattggtaatatttgaataaatcatttttttattaaattgatgatatttgaataaatcattttgtttcattttagatgaaattcaaaattttaaatcactataccttagcatacaaatttcaaatctatcgtgaatatgagatctgaaactgtgccgaacatgaccatcaaatatctatatgagaaagctcccacatctatcaaaagatctctgctagttgattagaaaaataatattattgtgactattagattatattaaaaatccaacatgggtcttggtttccttgtgtggttgaaatataatttcttattagaggaaccgtctcgtagacgacattattgtgacatactgctacggaatttgtggatgaatatatatgttaaatattatataaacaataaatgttaaaataatgcaaaaatgaagtgaggaaaataatttgacatacttatatgttgaggtctataatattatattctaggtgatatatcttacatgagatttaagatatataatagtaatttctagtagatgataatgtagcatacttgtacactgagttttaccttctaataattattaataggtaccatctatattgaagaagttttatttggtgtttcataaatattaatagtatacttgacttgtctaggctttttccacacgagggctgtggagtcttctgtaatattttccaagtcaagtcgttggctttgtccaaattaacgatggcctgcacgcagcacaagggtcaggacgacgatatagtatatcagacacaagtgggcacaagaggagcaggaggctaaataacagaggcacacatgcatgcatagctactagaatccatacgcgaccatcaatgttgtagagcgacaagttgtttggcgttctccccagctaggaatatatattgatacatataggccggtcaatatgcgtggaatgcatgtagaaaaatgttgaaaatcggtggacagaccaaaccgacaaataagttaggaatgcaggatgtgactgcccttgacaccccatcatcagaagctcctttgtttgacctattaaaccacatcaatctcaaacggtgttatcgtgtagcatgttataaacttcgtcttgctcttttctcattaagatttagattttatctcggcttgtattaacacgctattaaaactattaaccgatgtgttccgtgtaaaaactttctctatagaagttgctttaaaatatcaaatttatcaatttatcaagtttctaatagttcaaacataattaatcatgtgctaatggttttcttgatcattttatgtacgccaacttaatcttcatcttcatcagtttcgcctatggacgtgtcatgttatcttccaactgaaaatctataattaattgatcaatttaccattataaaaatatatgtggtgtagctgggagttagaacggtgatccatctagatgtaatggtccaaatcgatagtagagtgatccatatacaaatttttatgatgttaggcaacatacctaggccaagtctaattcccaactttttcttcaaacttttaacttttcatcacatcaaaactttcctacacacataaacctacaacttttttcttcaaacttttaattttagtctaacttctaattttggcgtggaactaaacacaaccctattatagttgaaacttgtgtcaaattttaggatgatccatggcccatggtgtcacctagatatctccgcctaaatatcgcagaaaaaaagcacgaaattaagaaaaggaaaaactaaaaagggtaatatatatatatatatatatatatatatacacacacacacacacacacataaaagggtgaagtgacatataccataggaaaaagtatgtaaatgttttttcttttctttttttttcattattaaaatgggggtttataagagaatctctaaatatataataaatgatgtgagtgtggagataatctttttgcatactgatatctcccctcggtcggcaggcttggtatcaatcttgggaggggaaaaatgacaaattatcagttcagttgtggctatcaccattgtctggcaatcatatatgttatccaaagagtattatacttcaatagttgagatgttatccaaagagtattattcttcgcgcctgctgctggcgcagccgcaacttggttctgttctgtcggcacatgacacgagctgagctagtgttcctgaaactgaaagatgtgagggtatatcatctcagaattctttcgactctgcattggtgtgatcttccattaattttacatcaagttttttttttctctattccagaacgtatggtaaaccctctttgcttgctataaattcccgtcatcgcgtccctgaatcctcgcattcaacgaacaacgactactcttgactccactcaggagcagagcatggcagtcaatcacaaactcagcgccctcctcgtggccacggcgttgccgctgctccttctctccactgcaggtaatacgacgatttggaaacaaattttagctatacttctggcttccggtgaatgcagatgggcagcaacttcagcgatgttgattttcttgctcgtcaatgcagatgcgggcgagattggggtgtgctacgggagggatgcgagcaatctgatcgatccgccggaagtggtgaagcttctgaacgcgaacagcatcacgatggtgaggatctatgacactgacccgacggtgctcaacgctctcgctaacacaggcatcaaggtgatggtgatgctacctaacaaggatcttgcttccgctggtgcggatgtggggagcgcaaccaactgggtgaagaacaacgtggtgccgtacctcaaccagggcacgctgatcaatggcgtggccgtgggaaacgaggtgttcaaacaacaacctgaactgactggtatgcttgtctcggccatgcaaaatgtgcaaatggcgttagcgaacctgaacctggcggatggcataaaggtgtcgacgccgattgcattcgatgcactcgatgtgtcgttcccgccatcagatgggaggttcaaggacagcatcgcgcagtcggtgatgaagcccatgatcgacttcttggtacggactggctcatacctcttggtaaatctttaccctatgtacgctgcggcggatccgtcgacccacatctctatcgagtacgcaacgttccgtcctaatagtggtgtgctcgacgaaaaaaccggcatcatgtatttcagcctctttgatgctgagctcgatgctgtttacgccgcaataagtaaagtttccggtggtagcttgagggcatcattggcccaaggagatcaaatgttagttcaagttgcagaaacagggcattcctctggaaatacatttggtgggccagtggtcgttgaagctgacgcggatttgaatgcaatagctacaatacccaatgccaaagcgtacaacaatggtcttatcagacgtgtgctctccggatccccaggtaagcacgacgtctctgcctacatcttctctcttttcaacgagaacttgaagcctgggccagccacggagggacactttggcctattctacccaaacggccagcaggtgtatgaggtcaactttcaaggtggtagaagtccctgtccaacgaatgcaagctggtgtgtggcgaacccgaatgttgataatgcggcattacagagagcgttggactgggcgtgcaataatggcgcagactgcagcgctatccagctgggcaaagcatgctatgagccgaacaccttagttgcacatgcatcttacgcattcaatgattactaccaacgcaagggccaggctagcggcacgtgcaacttcaatggtgtcgctttcatcgtctacaagccatcaccaagtaagtttttcaaatgtacattcatatatatatatatatatatatatatatatatatatatatatatatatatatatatatatatatatatatatattgcgatcatatcctcattatgtgtttattatttgaacttatttggcgagatataggcatctgcgatccgaacccaagttggtgcgttgcgaaagatagtgtcggggaagcacaactacagaatgcactagactacgcgtgcggtagttgtgccgactgcagcgccatacagcgcggtgcacagtgctttaatccggacaccaaagtggctcacgcaacctatgcattcaacgactattaccagacagccggtcgggccagtggctcgtgtgactttgccggtgccgcaaccattgtcacacaacaaccaagtgagttcattctcattttgtaatgtattagattggtacatttcataccactaaaaatgttcattaagaaaaaaatgcacacttttgtttcaagtagtaagtgattttttaaaggataaatagctatcttattggtgtctgttcaatttatgtacagagattggaaactgcctactcccaccaaacaacgcttgatcagaacaaactgtctaggaagaccaaaagctagcctagctagctaccaaaggcagtgaggatgggattaaagaataattccatattcttctacagagaaaataaggattaaactttttgtatttcccgttggaaattttaaataaataaatgtactgtttgctcctgttgaatgaaattccgcagttacttgtttcagaaaaaataaatgtacatcaaactccttcagcaacggaaaacacagcagtgcaaatgtactgatgtgtccaaggcgtttcccttcaacagtgttaagaaattagcaaaatttatcataggatacgcaaaaaaatgtaattggctgggtgacaccgtgaaacgtgacacggttgatggacactaaaaaaaacatgtaactggccgtaggacaccggtcacattattttattattttcggatcaaaagtggtgggatatttttctaaatgcccggattgaccttctctttccttcttttcccctccccactgacttcgtcgggaacgggcacagcggcctcagagacgcggcgaggtcgtcgcgacgtggtgcagcgacactggcggccagggcggtgtactagatcatgcggcggatcgaggccgaggagatccgcctcgacgccgcgacatggtggtgatgagcaccaagcaagagatcgaggagcagtgggggctctacgatgggttcgacctcaaggtggagtgcaagctctgcatccgtcacatctggtcgaaggtgaggagcgcagtgggggctcctgcacctgctcatcaaccccaacaaggccaagaagcctctccctcccatctggtcgaaggtgctcagtttcttcacgaacccgcacaagccgatgatcctggcgctgtcgcggcaagacccaaaaaagaacatcaccacgctgctcaaggcgtacggcgagaaccgccatctccgggagcgttccaggcgaaatcttggaaggggaaaagaatgaaagggaaggagaaaaataaggaaagggaaggggcaatctaatcatttagaaaaatatctcacctttttttatctgaaaataataaaataatgtgaccggtgtcctacggccaattacatgttttgttaagtgtccatgagccatgtcaagttttcgcggtgtctcccgccaattgcacgttttttgcgtgtcctgtgacaaattttgctgaagaaattaaggcttagttcgaatgtgcattatacttggagaaaatccaagaaatgctatagataagcgtacaattccaagaaatgccatcgacaagtgcgagttccatgaaataccatcgtacaagcgatttcgttcccgaaatatcatcgccgttaaggttccgccatccctcgctgttaagtacactgttcatcctataacacttaacggagggttaataaccaaaccgtaaaggcaatggcatttctgggacaaagtatcttgtatggttacatttcatggaacttacacttgtgaatggtatttcttggaattgtgtgcttgttattggcatttcctggattttctcttataatcgagcttttggtttgcactcaaaacgaggcaaccattaacatatgaaaattgagtattaattattaaaaaaataaaatttggtttatttaataaaatttgaggggctctgattatgggcgctcctacccaaccaatatagcttctagccgctacgagtctatgatctcaccgccattatctatttgcatgtctatgctatattatagtcaccatggttacattgtggtatccccatctctatttaagagagttgtcgggttacagagtccgactctaacttcatcccctaacacctattacaactctaagtccaaccgtaactaaatatgactagtatattgggcacattctaagaatagtgccaataacttgattgagcaaattttatatttaaaccgaacgtgccctggcgtgctaaagaatattcaacggttgaggcactgttgctgaggtaccaaatcattcttcgtggacagacactcgtgaggacaattaatggtataatattgcacacaattgttgcactaagccactaatgatgattggaaattaatctgttgagtcttccccttgacccgaggaaaaagatgcatggctgatgacctgttggcttgcgtaaaggcacgggcacgtaccgcacttccaactctagtggaaaatgatctgttgcgtcaattgttcacgccacgagttttacttatatgcatatacacgtatatttatccaacaatgtttttcaggtttatatatgtggtttaaattatatattttttctagaaaaaagaggaagaaaatgatacagtgcactactgcagtagaattggaaatattgttattagttagtattagttgtcacttgaccggtattcgggcttttccacacgagtaggcaagatgtggaaactagcaattaataatgacaagtttcttggtccaacaagtcgccgcgtgcatatataatttgtcccgagcgaggggaagtcctgcacgcagcaacgtgagggtcgatacaacgtacaagttggacaattaggagttcattaggactgggaaggtacaggagcacctatgtgcacatcaattttttttgaaacactgatgtgtggggccgaggggctcacttatgtgtgggcccgaggagctcacatgtcagtgaacagtactgcagactacctgcatcctgtgcacatccctcacttgtttgtttggtctgacggatcttctgattcttgcatgtgttgtttgctttgaatcgtggcttcctattgtccatatcacatcgagctaagactcctccagatctaagatttttgggcgtggtatccgtagcttcacaaatccatttattcgataacatttggataaattattttgttcttattttaaattaaattttaaattaccataatttaatatatacaaacatcaaatctatcaagaatcaaagatctggagctgtggtggctctttctgggagtccagtcatcacatgattctacatttatatcctagaaaaaaaataattttatagaatctttgaaataaatgattgatttgtaccgatttctttgaaattcatatatgaaatgggcaattcaagaaaaatattagaggaaattaagtattttcttcttcttatatcttgaatttatgtatttttcatgtgcgccaattaaaagcttgtcttgaaattttcttatgttttgatccaataagcatgatattacatccctacatttttttactattcatgtattttcacaattctacgtttcaaaggatcagatctatagagtctacctataccaagttggatgataacatataaaatcattcaaatttcccaccgtgcaatcaagaacgagcgactggggataaaaatcagatgcactgctcggcactagacgggtcgagtagtgcatctgtgacatccaaacaggaaacaggacgtgtgtgatttcctgataggcccatctgctcctacacttcactcctggcattctagctcattaattaagcagttctagccgattatggcctactcgatccttttgtcagaaaaaaatagtcaaacttttatgttgcaagtgcacgattacttaacaacctatctgcaactggtccgactcatcttcatcaatcgtcaccactggaacggcgcccagagggtggtgagcgaggcaggagatcgagcgagggggctaacctccatttggccttcctgtcgatcgatgatggtctcctcacctccaacgacgggaagaacgcagcatccgtaccgtgcaaaacgaatgcggcggcgacctgcttcgtgttccttagcgaatgcaatcggagtggcagcgtaaaagaaaaatgatacgatatctttgcgcaaattgtaacttactttttttaagggattaagattaatttaaactggaagaaagtcgtgtggattcactagattagcttgataaacatggtttgatttttctggttttcgtcttcagttttgtgggttttctttagttttcgtgttttttaaaaaaggttacgctttcgttagaaggttgtttggttctctacctaaccaaatcatcattagtaggaccaaatcaactgtcgatgcctgtccagacactattaaaaatgatttttcatggtgtcaatctataattttcgctggcggtcgtacgtgaaaaccacaagcaaaaccgtaactagggggtcgggggctacggaccgctagcgaaaaccgattttccctggcggccacgctaagaggtccgccataaaaataacactatttttcgaggcggatctcttatgtttccgccagcaaaaacacaattttcactagcgctaggtaaagaggaccgctaaaaaaaattttatgccaataaaatccaccgcccccatcgacaccaaactcgcctctcttctcccttggtctctccgcctctctcacttctccctcgatcggtctctccttctcccttctccaccaacgccggctgtcgtcaccaccaacgctgctggatgccatctcattcaccgccgccgcatcgggagcggatccggcgccgccgtgcctcaggaggatggatccgacgccgcctggcccaagagggtggatccgccgctgccaggcctcgggagcggcgcggggaaggggacggtagcggtggcagctgttctcggcggatccggcgcctcctccctccccaccggggccgtgaggcggcgatgacgagaggcgggcggcggcacggatctgacggggggaggatgcgggcggtggtggcggcgatggcgacgggaggtgtgtggctgggtcgcgggctaccgtcaggagagctttggcgcaaggctgggtatggatctgttctctccctccctccctcttcttgatcaggcggcagaagggaggtagccgctggtggcgacaacaacagagcggtggctgctcgaccattcccctcccctccctctcccagatctggctggaggggaggtggccggcaaagttcccctggcgagctcgtccatggcacacggcggctagggttcttggatttgaatttggggggaaaaatgcttgggagctaggattgctatatgtgaaattttttttgtgcatgttcttctagacgatgcagatgctttgatttgtatttcatgatatgtgtaaataatgtttgatttgtggaaatgatgatttgtatttcatgtttgaatttggtaatgagcagccatatgcatatgcatgtggttttgtgtcacatgaggttcatgtgtttgagaaattgcaaacaaaatgggatttagggtgggtgatattggggattggggatttgtgattggatctggattttcattttttttactccaaaaaatgttttcactggctggtatcttaatattgccattagcgaaatcctattttttatggcggctgtcttaacgtggccactagtgaaatcctattttcgctagtggctgtcttagcttggccgccagcgaaaatcaattttcgctggcggccgagtgcccgccagcacaaatgaataattttcactagcctttgatcactggcggtatagccggccactagcgaaaacctattttggccgacagtaaaaacagttttagaagtagtgagagcacccgataggttttacctgaagaaaagtagaagcactaacacggtgtcttgcaaggagaaatccagtgcccgtcggcaccaggcataaagcaaagacttacgcctagagcttccatagcctaccaaccacaacaaccactgcacacagccataacgagaggaggaaggcattatcattgcccaacaggtcacacatacccaaccccataaacgcacacccataaagcaaatgcgaacaccgtctcgaacgaatgcacatgagccaccactatcgtcagaaaccatgacgaaggagactagtgttatcgttgtctagctcgtcacccgacgcagcaattctgacttcacctcgtccccccaccataccatactatggatgtggccacactatagcgactcccgcaattagacgtcaatagctgccaaacaccaccaagaagctccgagctagccaagccctcctctccccaagagaatatcaaaggattggaacgggtcggcgacaggagctcctaaaggaaggaaggtacaactagctggagatggcttgacgtccaaccaacacactcctgagctgacgtctcaagccagcaccaaacaactatcaaacggccgaagccgaccagatccaaccacacctccatgtacaacttcaaccaactacgctgtcgttgccacccaaaaccaccaaacccaaaactccatttgatttgacctcaggaggccaaattgacaccactggcactccctcacctcgccattactcccagtcccacctaggggccttaggcttccaccttgtgaccaatcgtcagcctttctaccaccacgcgcatggctctagcttccatgggtagctttacgtgaacctgcgctcgctcagcctctacgtcggcgccacctacatcaaccggccacatgccaccagccactcccgtgctggcgcagctactacgccaccactgcctgcattggcgccacctgcgtcttcccactccaccgctatctggcccaccgcctaccgacgtcgatgtccaggcggtggaggggtggagcccaacagtctaggcgacaagcctgatcaccccccacaaggagttgggggccactcttccataagagaatttatgccattaattcaaagtttcaatcagccttgatttcgtttcaatcaatttttttttcggccgctggtgttgtaataggtgctcgactcgtctgggctatttcccacacgggtagacaaactgccaaaaatagcaattaatggtaaggttgtggaatcatctatagtagtcaagttgttggctttgtcccgaatcctgaggagggggtggggaagcaaccatacaagtggggagcaagaggcacacatgcatatgataactttttaagttaatgatgcatatataacttgctgtgttctttttctactttcctagctcatctctctcgttttccgtgcgcacgtttttcaaactgctaaacgatacattttttataaaaaaaaatctataagaaagttgcttttaaaaaaaccatattaatcttttcttaaaaattagtaaatacttaattaatcgtaagaaagtgtgtcgctctgttttatgtgcgtaggaggtaagtttccaacctcacctcttcatcgaagcattagagcaggtacaatagcagactataagccagctataaacatataccgaggagataaaagaatagagagataagcagcgggctatatgtttgtagctagctgcagcacgggctccaatacacagtgtgtgtatgatatgtgggatcagatactaataatgtagtatatatttatagataactattttataagtcggctattaaattgattatatatgatttgaagctaggttggctatactattaaacttgctcttagtaaagcgaccagtactagtactaattgcttgcaggttctgcccagcttggacaggccggtcaatgcgcatgcaatgcaaatgcttgtagaaaaatgttgaaagtttgtaaaaaaaatgttgaaaattgatggactgatcgaatccacgagggatgaatttggttggatggattagatcggaaatagcccattaagttttgcacgtgttaatttgtcttgtgttcaagagttcagatggaatggacaagggaaaaaaaaaaggctcccgtgaagacctctattaatgcttatattgtgggaatatagggaataattgatcagtgataattagtatgttttgtttttaagaaatgcttatattgtgggaatatagggaataattgatcagtgataattagtatgttttgtttttaagaacttcctatgttccaagttttttttggtttgcttaattcaaacttcttttaagttcgatgaaaataaataaatatactgcttgctcatctcagaatgctggcatgcgactcaccagtcaccacggtgcgcgtgagaccagagtatccagacacctcctccagtactgctctgtctcccatgcaggtaacctactgcagcagcacaaacatgtcagaacccaccaaaatatgtttttcctgtttgtattccgtctatatcaaaataacttttatctattttcttactcattcgttaaagactttattttaagcaattaatgcattgagatctgataaagtcaagacaaatgccttgagacttgataaagttaaaataaatgcattcaaacttgataaatatgagaagaaatgcatcaagatttgataacgtaaggaacattctactcttagaatttgtatttgtatgtataacataggtaaaagataaaattattttccccgcaaaaaaaagataaaattattttgtgatagagatagcattccctctacttgataatatttatcgttttggacaagattattgtcaaactttaaacactttgactataaataacatctaaaatatttgtcttagaaaatatgaagactatatatatatatatatattagtcttaaaaaatacttcaataaaatgatatatttattaatatttctatatatatacatattaaaaaatagtgatcaaagttggtttttttttggagatcatatccttgtccaaacatcgataaatacaatattatcagcccggacagagtagttgcttaaatctctctgtaaggggccgaagctatgcttatatgtgtttttaagaaaatgtgtcaaccttgacaaacacttaagtatgaagctaatgcagctgagcggcaaactatttcttacttctcattgcaggtgcgggcgaggttggggtgtgctacaggagggacatgaacaatttgattgaaccactggccgtggtgaatcttctcaacgcaaacgacatcacaatggtgaggatcgatctacggcaccaactcgatggtgttgaatgcattttccaatacaagcatcaaagtcatggtagcaatacccaacaatgatctggcttctgttggccaagatctgggtagctcgacaaacttggtaaagaacaatgtggtgctgtacctcaaccagggcacactgatcaatggtgtggccatggggaatgaggtgttcatccaacaaccaaacttgactgggatgcttgtgccagccatgcaaaatgtgcagatggcattggtgaacctgaacctggcaaaagacatacatgtgtccacactgattgcgttcaatgcactcgatgtgtcgtttccgccatctgatgggagattttaaaactaacattgtgcaatcggtgatgaagaccatgatcgacttcttgatacaaaccggttcatacctacctcttggtcaatctctttcctttctacgctgcagcagatccatctagcatctctattgagtacgcgacgttccatgacaatggtggtgtgcttgacaaaaatacctacaagacgtacttcaacctctttgacaccgacctcgacattgtttacgccgcgataaacaaagtttctggtgtgtctgtcctcgatgtgaaagctacggaatcgaggtacccctggggtatgaagatacccccgttagccgatgcaaacgttgactcattggcaaagatagccaacgcccaggcgtaaaataatggccttgttaaacgtgtaatgtcgagtgcccctggtatgcatgatgtatctatttacatcctctctcttttcaacgagaacttgaagaaagggtcagacacaaagggcaacttcagcctattctatccaaatgggatgaagatgtacaacgtcgacttcgatggtggcaattcctgtcccacgaaggcgagttggtgtgtggccaaagcaggtgttgggcacatggtgttgtaggcggcattagactatgcatgtagtaagggtgcggattgcagcactatccaggtgggcaaaacatgttaccagccaaacacattggtcgcacatgcgtcttatgcattcaacgactactaccagcgcaagggccaagctaatcgtacttgttacttcgaaagcaccgctttgattgtccacaagccatcatcgagtaattttccactcccaatctttaagatcaatgaggtttttggaattttgtatcatcatcgtgattacatccaactgcatatttttttatggattgtttgctgagatatatgtaggcatatgtgacccaaacctgagttggtgcattgcgaaaccagaggttggggacacgcggctgcaaaaaacactagactatgcatgtagtacctacgtggattgcagcactatccaacatggtggacagtgttttgatcctgacaccaaggcggcgcctcgacctatgcattcaatgactattaccagacagttggtcgagagagtggttcatgtgattttagtggcaccgtgtagcgcccattccgtcgtggcgcctagcgggaaaattatctcttaaaaaccctaattgcgaaatttgtttctttgcttgttgtctagtgcccgtgccatctcaagatctcaaatccccgatctatcgtcgagttcaattccgaatccaaacccttccaaatcaaattcctccgcaaaagtctagtttgcctcccccggggtcgatgggccgaatttct

SEQ ID NO: 6335 - DNA, 40261 bp, Oryza sativa
taaatttattctataaatcctaatttttgcacaaattaagtttactcaatatttgtgttatttcaaccaatggattcaccctggattaatattacccatattttatttttatataatttatttgaattttaattagggctaattcttattccatcgcacttaaatttaattattaccaatatggtcgcggtaatattctatttatttctatctcgcctaatctttattttaaattatatttcaattatttattttgccaatttatttttagggtttattcctaattgattattctttactcacgatcaatgaactccgaaatcaaatccaaataaaataggcgaataaaaccggcatgatgcaatttatttaaaaagtttttaaagatccgtatttttagggtttcgattttgtcggtcgaattttcagggtgttacagttactctatatttatcagaatcacacaagtacaatatttgggattgtctatctagccgtcgtcgatatggtggcacgaacaccaacacgtagtcgacgacggggtagtcttcctccttgaatataaactcgtcacgatgagagattgcactagatccctcttgttggtcttcacaggcaccagattggatctgtctaggctaatctctgatgtcgatatctggctttgtcttggcttgtgttggtctcctcccccttctttagggggtcttgtatttatacccatagatgtcccattgtccaaacataactacaaataccaatatggatacaatttgagtagtccatatagttttcatatagaactctacttgtccttacttatctggaactccttctatatacgagtaataattccatataagactgtatataatgggccccgccgagtttagtcgattactattgggtatgtggtatccataaccatgatatatacactgtttaacaaaatgaatagaccactaaaaaagttatagaagtaatttgcgaggactgtaaataaaataaaaaaatttgctccatgacactttgaggcatttgctctataaaacctactttttacagctttaccctaagatactctggttatacggttatctgtcaaaagacactccgataattaatttatatagagagataaaatcttttaaaaaaggttttacctttggacaacttgcaagctttaaatttcaaaattttggctgactttaaacattttatgcaaattaaaaattttcccaaataccggaaataaaaaacagttatttaaatccagaaaatattggtataaattttattttatctttttttttttgcaattgtcatttagacaatttgggacaacttttgaatttgcaaaaaaatttaaatattagctattatttgtttgaattcaattcatacgaatagtcaatctttttttcaaagttatatatgtctctattggaagatggtattggaatagggtctctttttttttaaacaatagcgtgcttgacaatacaccacaaccgaataatgttatagcaaataccatgaatctagagtatcctgaagtcaagagacctcaatcgtggttcctctcgtgcgtaaactctgctaatcccataggatcaatagccttgataaggacagattgagcatatataaggctatgtttagctcttagggttgggcattaatcccttgtacatgtaaaataaagcgacttgaacaacttttttatagaaaaaaaattgtaaaatacacaccgtttaacagtttataaaacgtgcttgcgggagagtggaggttacgaaaaataagaaacacacacagcctaatacatcatttaataataggcaacaactaggagctacaaatatcatgctcccttcagcttttaatatttgacgtagttgacttttgaatgtacctttaactattcatgtaatcgtgttatttaataattttgtgcaaatatgtaaaaatacgagtcatacttaaaagtacatttagtgaaaaaacaaatcacaacgaaaataatattacacatatattttaaaatttaatgacgttaaatattaaacataagagggagtactatatactccctccttatttcttattttaatgtatgacgacgttgactttttaaccaacgtttaaccattcgtcttattcaattttttttgtgcaaatataaaaatacttatgtcatacttaaaaaatatttgatgataaatgaagtcacaataaaataaatgataattacataaattttttgaataagacgaaaggtcaaacgtttatcaaaaagtcaacagcgtcatacattaaaatacggacggagtattatgtagtgtgtgcaaggcacatttctttacgtagaaacaaatcttgtttttcttatttcactcatcatcaatgtcaggcaaaattcacccccattatttacctttgtacatggcctaatacgattgttttgaatcgaaagaggttcaaataattacacttgactaaatgctagtagtagctatcatgttgatccagggatcgtggcttggggtggtttccatgagaatactctcgaccaacttgcattattcctcctttttcctctttcagacgattcagacaatgaaacggacgctacctacgggctatggcagcattgcatgcatgttgccaacttgccaaggaggcttgtactacttccgcagtatcttatcctaaaatgagttacttttttacctaccatattttctcaactaatcattaatattcttcaattaatttattcaacaatttttttctcaatcaaccataatctttccttcaattatttatacctatttccttaaaatttatgttcatattaaaaatacttacaattttgaaggaggaagcatccttttttagcccgattcccgaagctagctaccgtgttaattcgagctactccactatttagagcaggcacaataatagactataaatcagttataaacatattttaaagagataaaaaaaagagaaaagagcagcagactatagatatgtaaccagctgcagcacggattccaagacgtaatgtgtatatgccagttgggattatgtattaatagtgtagtaaacaattattatatgaattggctattatattggctatagatgatttagagctagtagttagctatactattaaacttatactattaaacttgctcttagcttcattccatcccactgcccccaaactgctgcatctacggcaaaaaatgctgcgacgctctttggtcgcccatgccgttctcctcttcgcggcggtcgcgctcccgctcgccgccgcccagccatggcctgtctgcggcaccagcggcggcaactacacggcggggagcacctacgagtccaacctcctgcgcctcgcgagcaccctccgcgcgaacgcctccgcctcccccaccctcttcgcctccggcgtccgcggcgtcggcccggacgccgtctacggcctcctgctctgccgcggcgacatgaacccctccgactgcttcgactgcggcaccaacgtctggagggacgcggggccaacctgcaaccgcaccaaggacgccatcctcgtctacaaccaatgctacgcccagttctccgacaggggcgacttcctcgccgccaccaacaactccggcgaggtgagcctcctcataagcggcaccaacatcaccagcaccgacgtcgccggctacgaccgcgcggtcaccgagctcctcaacgccaccgtgcggtacgcggtggagaactccacgaagctgttcgccacgggccagcgggtggggaacgacacggggttcagcaacatctactccatggcgcagtgctcgccggacctgtcgccggcgcagtgccggagctgcctcgacggcctcgtgggccagtggtggaagacgttcccgctcaacgggaagggggcgagggtcgccggcccgcgctgctacctgaggtccgagctgggccccttctacaccggtaatccgatggtgcggttgccggtcaaggccgacgagctcacgcaggtaagaataattcaggaagcaaaattctagtaattatcttgccgatagtgtcagttgcaatcatcatagctgtaatttccctctgtatctggaatgcacgtaagaagagaagattggcaaaagcagagcgtcaccccggaagtgagtcctctgcacacaattaggcataaattcttgttaaacattcttataccacgagcatccattaacagtttagtcaaaattatgcaaacttgccagctgatacaaatgaggactttgaaagtgtcaagtcaaccctgttatctctggcatcactgcaagtggcaacggataacttccacgaaagcaataagattggtgaggggggattcggtgccgtttataaggtatggcatgagtactcttaactttttaacttttgtatcattgttgatttctttgagaaaaagttgtgtgatttgatggtgtgaacccagaatatggtcaaaaatataaattctagatggctagaagtacgattgcactactgctcaattgttaattaatcacaaattgtggtgtacttctcttcttgaagtatatcgcagaggtttggtgcactactgctccagcccttggttttagataaaaaaaaaatgtgacgtcccagaataattagaggaaataataataaagcaggacgagaccttagtccttgggcctccagcagtagtagagcaattggcccggttgaccttgggccttcttgacccccaggacgagcagcggcagttgggctaggcaagctagctagctagctggcagatcacacgcagcagcaagccagcaacagcacatcagaaatgttccatatgctgccaaataggattaaatgatcagccaccctaaatctaaatcaaaagacaacatccacgcaaactccaagtaaaacgtgagagtattatagatattactatttgaacattatatgtgatatagtggatatgttgccaataaaagacataaataaaattagaagtagtagtcacatctattataacacttgctcttagtttcaacttaggagtttaagctgatccatgactataatattggtttaaacttattgcgtgaagcgagaacgtaaaacatgatagtgttacagtgtagggtgtattccatttagatgagtcgggtctaaaatcgtttttatctagtcgggcctagaattattttgggctataagcgttatatagtaaaatatatgcatgtgtgtagtctaactaaataagttgagcctagctataaccttttttttttcataatggacgttacaaaaagcaagaaaatatgaatgtctggttgttaaacttattaaaaagtcatctgagtccataaaattacaaaatacacatctctatccataactcttggtttaacgtatcacatgggttccaaagcgcacctataaatatttaagaccaaatttggtcaaaatttcaaattttgtatcatcaataattccttaaatgattaattagtttaaaggattggtatatattgatttgccttaaaattactactctcgtgatattataaatttactagtactaatataaaataaatggtccaaaatacaaaagttgatcgaaacttatcctaaatatcaaatatttatatccaggaggagtaagatactaagccaagtagttaaattattcagggaattcttcatggacaagaagtggctgtgaagaggatggccaagggctccaaccaggggctggaagagctgaaaaacgagctagttcttgtcgccaaacttcatcacagaaatcttgttcgtcttgttggtttttgccttgacgagggggagagattactcatctatgagtacatgtccaataaaagcctagacacctttctttttggtactattagcattaccctttttaacctacatattttgtcttttcactccatcaataacaatttttttcttttggtaattagatgcagagcaaaagagaaaactagactgggcggtaagatttaagataatagaaggcattgcccgggggctacaatatcttcatcaggactcccaaaagaagatcgtccaccgtgatatgaaggcgagcaacattttactagacgcagacatgaaccccaagattggggactttggccttgctaggctctttgggcaggatcagactcgagaagtcacaagccgtatcgccgggacattgtaattaagtcgaaggaacactcattatttttcgctcatatatagataacaaactaaaatgcaattcttctttgatgcagcggttacatgcctcctgagtacgtgctgcgcggacagtactctacgaaatcagacgtgttcagctttggcattcttgtcatagagatcgtgacaggccggagaaggaatagcgggccatatttgtctgagcagaacgatgaagatatattgagcatagtgagcatccctactaattcattgaggaatacatgcctattgtaattactgctgactaaacacatatgtgtgactaatgttgctaggtacggaggcactgggaagagggagcaattgcagagatgattgatcattccttaggaagaaactacagtgagaccgaggtgctgaaatgtgtcaatattggactcttgtgcgtccagcaaaaccctgtagatcgacctacaatggcggatgtcatgattttactcaatagtgacactacttgcactatgccagctcttgcacctaggccagcatatttgatcgatgggacctctggttactcccagaccgtaacacaatggtccggcaggtagcagggggccgaagcagatctagcaccgttgttggcttgttgctgcttgctttgttttatattgtaagtgtatcagttctcaatttgtattccatgataaccaagttcaactaataaagagtaaatatataccattgaccagtttgtctcgctcaatgtttatcatcgagtttgtgtccatccatgacatattccaattacatgctactagttattactccctccattcctaaatgtttgacgccgttgacttttttaaacatatttgaccgttcgtcttatttaaaaaaattaagtaattattaattctttttatatcatttgattcattgttaaatatatttttatgtatacatatagttttacatatttcacaaaagtttttaaataagacgaatggtcaaacatgtttaaaaaagtcaacggtgtcaaacatttagggaagtagggagtacaatataattacgttatactccttataaaatatagtagtggtggtgatgattttgtcaccacctacttttgcgggaagaaaaaaaaaagtggagctaagagcatcactaatagaatgtgtaaattcaatcttcaaaattctgaatttgggaatcctaaatgaaatttgataagttacagaagtgatccttccaatagattgtgtaaaattgactctctaaaatagaaaagtggaccgcatagtaaactatcaactaaaaaaaatcagttatatattcctcctccttccgcgacggcgaaggcaccatcacatcgattgttgtttacaaatacacgagtaatccaggtcgagcatgtttaactcaaaagaatcagttaattacgcacatcaatttacggagagatgggcatgatcatcagatcatggaggaagaaagaagtctagactctacgacgcaacgacgtgttcgtcgaggcccccgatctgtttctctcatacacgatcgggtgctacttcggcgcctcgatcaccttgattaattgtgcgctagctgccgcttcgcgtcctctgcttcttgatacacttcgcggagcttgcgctttgcagcgatcatggccttctcgtcggtactgcacgacgacgtggcactctcgcggcggctcatgttggccgtcctcttgggcggcgatggctgcaggattttggcgtgatggtcgtcggtctcatcgggttccagcacctgagagagcttctccatgacggctgcagacttgaggagctcgtccttcacggatgccctccacccacggacaaaaacatttcgcccctcgcccgggaacgggaggagagaggcgggagcgtgagattgggagtggtagaggcgagatcgtgcgccctcatatcaaccgagctaggatttgggagatggaactccagaactggatttttcaccttttagttcttttgaaaaaaaacttattctacaaataaatccttaaaataacttattttagaaatggtgcttttcgcggcgccaatgtagttggtgccgtggtccaacatgacagcaccaaggacgttggcgccgtcctctccaccctcgggtgaaagctaagtcactaatgtgaaggagaacggcaccaccaacattggtgtcgaggaaatttgcaaaaaagaaaagaaaagaaaaaggacctagttgtaataaaaagtgactcatttgtaaataaaaagaactcggaaacttcggcaggagagtagcggatccgttggagctgtgttttggactaaaatctctcaaattcaattttcgaaatgaaatactctctccgtcccataatataagggattttgactttttgcttgcattgtttaaccattcgtcttattcaaaaaattttagaattattatttattttatttgtgatttactttattatccaaagtactttaagcataactttttgttttttatatttacacaaattttttgaataagacgagtggtcaaacagtacaagcagaaagtcaaaatcctttattatataggataataagacggagggagtaggtggatagttggtgatgctctaacaagattcacatataagtaacaaatacgtacaacaattaagagataataataacatattaataaaaattttctttaattggaaacccgttgccatgcacaggcaatatgctagtatactagagtaatatttgaaagattttaacaaaaactgtcggaatgttatatagtttctcccttccacaggcaccatgcaggcaggccggcggttggtgatcatatactcatatcatgtcatgtccttttgctcctcaccgtgctcgtacgtacgtgctgcccgacgctgatcacaccggccgagccgaacgtgctgggatgcgcgcgcggaggacaccggcacatacgtgccatcgcctcaccgcgcgctcatgtaggagttatatgttgggtgccggccggcccgcatcgacgagagaggcggccatgcatgcgtgcgtgcgcgcgcgtgtgccgcgcgcgacccgcgaccttgctgcctctctccagtccaaatatagtccagtgactgattcgtcgcgctgcgcgtgctctcctgactgaaaataggcgtatattggcaaatcctaccctttattagccgaaaacctggcacggggtcatagttgaatcacgacgtacagcgcgcgtggttacacgcctccaagtttgaacgtatacgtacggtaaaaagtggaacggtttacacatagccatgcaccgatttttctcgatatcattccatacgcgaccgcaacagtcattttgagttagaaatgggtcaagtttcatttgactaattaagcgatatatagcatgcgtgttccttttttaaggcagggtgcaaacagctgctacagagaggtttccgtgatgtcgacgaatatataattagtccctgtcccacgtgccatttgacatccaccagacgggttcactgaattcagtctgacctgtcggcctcggccaatcggccatcgcatggcaattgccaagttgacaacttgtcaagagccatcacttccaaaagtataggtagtactgtactaaaagcttgtaaaaaagagaaaaaaaacaagaagatatgatacggagatggattctaatagctcgagtggacgtccacccgtttattgcatgtcaattagatggttacgaaaaattttcaaaaaaactaacaagacagatcaatatataatatattactccaacgaacatgcaaattcaaattcaacttctacaagttgtaacaaaaataacaaatttaattgtaaacatacctataataatttgagttttttttgttatttttattacaatttgtaaaagttaaattttaatttgcatgtttgtggattgatatattacatattgatctatcttattcatatttttttaatttttttatattcatctagataacatgcaataaatgggtggacgtccactggctattaaaacagtttaccgatatgatactgcagtagtggagtaggtaccattagcagaggattgcaaatttgcaattgcaatgcaaagcccgacgatcgaacaagcttgctctgacggcgccatgcggcggcgctcctctgtcctccatgccgttctcctcctcctcctcgtcgcggcggtcgcgctcccgctcgccgccgcccagccatggcctgtctgcggcaccagcggcggcaactacacggcggggagcacctacgagtccaacctcctgcgcctcgcgagcaccctccgcgcgaacgcctccgcctcccccaccctcttcgcctccggcgtccgcggcgccggcccggacgccgtctacggcctcctgctctgccgcggcgacatgaacccctccgactgcttcgactgcggcaccagggtcggcgacgacgtcgcccaggcctgcaaccgcaccaaggacgccatcctcgtctacaaccagtgctacgcccagttctcggacaccggcgacttcctcgccgccaccaacaactccggcgcgtacagcctcctcataagcggcaccaacatcagcagcgccgacgtcgccggctacgaccgcgcggtcaccgagctcctcaacgccaccgtgcggtacgcggtggagaactccacgaggctgttcgccacgggccagcgggtgggcgccgacccggggttccgtaacatctactccatggcgcagtgctcgccggacctgtcgccggcgcagtgccggagctgcctcgacggcctcgtgggccagtggtggacggggttcttgttcccgcggaacggcgagggcgcgagggtcgccggcccccggtgctacctgaggtccgagctcggctccgggttctacaccggagctccgatggttctgctgcgagccgacgggctctcaccggcgtcggcgccggcgccggatgttgttccggccactacgttaggtgagcagcataccaattactctacccatcaaagtgatcacgtcacgtctcttcagtcttcacgtcatctgcacctaatgtttactcatctccgatgcttgaactgattatttttcactgaaatatgcagttaagaagaattcagcaagcaaaattctgctaattgtcttgccgatagtagcagttgcaatcgtagctgcaatttctgtctgcatgtggactgttcggaagaagagcagagcgacaaaagcagagcatttgtccgaacgtgagtcctctgcacaaatacaatatggcatcggattgtttacaaaccccacttaaaattcttaatcatcagtatgaattgattgttctatcgaatccatgcaaatttttgcagttgatgcatctgaggaccttgaaagtgtcaagtcaaccttgctaactctgggatcactgcaagtagcaacggataacttcgacgaaagcaagaaactcggcgaaggaggatttggtgcagtgtataaggtatgccagtagtctttatgtgtaacttttgagtcattgctgacttctttttcaaaaataattgttgatttgatggtgcgagtcaagcatggtcaaaagctcaaaatatgaatatctaaaagtttttctccattgatgatgatgatgatttttattttctacaaaagatctttcgatctttctttattagaaacaccaataattgtaaactattttacagcactcaggtttttaaaccattacaaaatacagtatatcaatgaaaagtaaaaaatatgcaggggcatctttttggacaagaagtagcagtgaaaaggatggcaaaaggttcaaatcaggggctagaagagctgaaaaatgagctagttcttgtcaccaaacttcatcacaaaaatcttgttcgtcttgtgggtttttgcctggaagatggagagaggttgcttgtctatgagtatatgcccaataaaagtctcgacacatttcttttcggtaatattaacacctcctttcagtatatatggtcatgcacttctttctcatgtgatggtgtgcaacaattacaatgatgtcttcatttggggctaattagacgtggagcaacgaagacaactagattgggcaacacgatttaggatcatagaaggcgtcgctcgtggattgcagtatcttcatcaagactcccagaagaagattgttcaccgcgacatgaaggcaagcaacgtcttgctagatgcagacttgaaccccaagattggggactttggccttgctaggctcttcgggcaagaccaaactcgggacgtcacgaaccgtatcgttgggacattgtaattaagcagaacacttgaagcttatgtgccaatatttcacttaaaaactacgtactaacatgcaatttcattcttactgcatgcagtggatacatggctcctgagtatgtgattcgcgggcaatactctacgaaatcagacgtgtttagttttggcattctcatcttagagattgtgacagggcaaagaaacagtgggccctattttgcagagcaaaacgaagatttagtaagcctagtgagtatcccttctaattcctacaaatcaatacactaatattgcttatgtttccagaaaaccactcatatgtaccatctatattactgataactggagatctatatataactaatgctaggtatggaggcactggacagagggaaatattgtagagatggtagactattccttggacagaaactaccctgaagccgaggtgctgaaatgtgtcaacatcggcctcctgtgtgtccagcagaacccagtagatcgacctacaatggcggatgtcatgattttgctgttaatttatagtcatgattagttataaacaaggtgacaccaatgaggtaaatcaagaaactgttgccaaatttcaccgttaacagaaactcatgaggtcaaacccgtctattcaaaagctattattaggccttgttaaatgggcttcaatccagctcaccaacatttgtaggccggtaatttgaactaaagttcaatgcatgcaccagaatctgtcaagattatgacccatccaatagaggtttaacatgatggattgagaaattatcctctgaaacaagaccatcaatgggaacacaaaatgggcttatggcgttgtatgacacattttcacgcagctgcgcaaggcatgagtctatagtgtgacttaacgagaacgaaaaacctatcgagcgatcgatcgcgaggggcgatcggttcccctcccccccacgcagtttccatttttggcaccgctttactttcctcttttagtaagtttatacacctaaagtttacacatctaaaatttatccacctaaagtttgtagagcgaatatttatgcgtcaaaagtttatatacccgattcaaatttaaattcggattcaaatattttatatatagaatatttctatacgtaaagtttatgtgtgcattatttttctcttttagtaagtttatacacctaaagtttacacatctaaaatttatccatctaaagtttgtagagcgaatgtttataagttaaaagtttatatacccaatccaaattcaaattcggattcaaatattttatatatagaatatttctatatataaaatttatgcgtgcaaagtttacggtataaagtctatgcacatgaatgagagtattaattttttttctattttttttactaactttgtttttttaaaaaaatatatgatgaaaagagagaagggagaggagtataggggaggggcgggtcccattaggggcgcccgagaaggaagaccagacaagcaattatattgttaaacagtaacctcgagattagggtaggtaccagtcttccaagctaacatattgtttttctttgtaaatacttgtttagcttaaaaaagtgcatgcacgcctattacaacctgctaatcattaattgcgaatttcaaacttaagttagtgaagtagttaagtgaagatttgcatatgttacatatttatatttggattcgtagtactaggcatgtatattttgagatgggtggagtaatttataatttaattattattaaattagggatttgctacccatctacctgctattgtttttggttttgtaagccgaatttgtggccgctagatcactccaagatttgtgttgatttggctcaccaagataacctttgatgtaccttgttcatacgcctacattactcgcgaggggggggggggggggcacaggcaccgatccccccttcctatttaaaactctactctcctcttcccttcctcctcctcacctttttttttctctgtctaggtacattccatagcttcgtttcgtgagatcaatcgattgagctagatgttagctgcaggagaaaggtttctaggttgtagaggagtagcgtgagggtgaggaggttgtggatgaggtaggcattgtgacggggagggtggagctgaagcggatcgagaacaagatcaacagacaggtgaccttttccaagcacaagaatggtctggtcaagaaggcgtacgagctcgtcgtgctctacgatgccgaggtcatgctccaccttctacatccgaggcaagctcaacgattttgctggttggggtcctagtatgtgcggctatgcgtgcgaacatgttgacaataatcccattctaaaatgttttgtagccatgcatgtagatgcatattgagtcaatgttgttatgctagcttttttccaaactttaaatgtggctagatatattatgtcgtcaataaataacaccagaattttgtggactagttttgttaggacctgaacataataaacaagaatagtcactagacgggaaactatatattttaatccctcgaggggacatcgttatttgcatgttactcaaatggttacgaaaaaaattggaaaaaattaagaagatgtattaacatgtgatataacactccacaaacatataagttcaaattcaacttttatatctcgtaacgaaaaaaacaaattaaacaacatctagttaacgtatatttacagtcaaatttgttttttcgcctattttgttagctaaaccaaatatcttaatgtcagttttgtcagtgcttggtggtcagttttgttaaagttttagtttcgactgaatttgtataagccaaggagcaatttggtcaacagttagttttgtcagcaattagtacctgattttgttagttttgtctgaattcatatataactaaatgcagttttgttagcagctagtttaatcaataattaattagttcatggtgttgttagttttgttggctactaaatatgacttgatctaattttgtcagcagttagttttgtgaatttaaaacttggttcagcttggttcaacttgaccaacttgaccttggaaggggtccccttgggatccttttgtaaccttgcttgtacaagctcggtttccctctcttctccttttatgaaataggcagagctcctgcttttacccctcaaaaaaaaacttggttcagctagctctagtaatttcatggaagctagttaattgacttcttgatttgattatatttttgtgagcaatcggtatctagttttgttagtttgtcagctagctagttttgtctgaattctactaatagtaattaggtcaataagccatttcaatcaaatacaagttgtcaagctgatctgcccatttcactagttcaaattcctgcagttgatttgtattccctgctttagtatatagatttatcagttacatatatatgtcaacatttcatacacgtaggtagtatagatttattttattttattttagtgtagggttgtaatcttgtaattttttttcctgctatatcaatatgaactttgcactgtctagtgcgagctgtaaaaaataaaagaaatagcggctatgagttcgttcccaagatactgttaatctcgacgaccaacttgaataattccatttccctttttcttcgttcaaacgatgaaacacgtctgcatgcacataagtacacacgtacctaatggtgatcagagaattcagtctatatggactatgcatggcatgcccaacttgccaaagacgagatcaatatccttctttttttttgacgcgatcgaatatcctttttaaggggatgcaccccgtgttagttttatactgccatctatcccacgcccctagctagctgcatcctagctctatcggcgcaatgttgcgacgccgacgctcgtctgtcggccatgccgttctcttcttcgcggcggtcgcgctcctcgagtcgctggccgcccagccgtggccgaaatgcggcaacggcggcacgttcacagcagggagcacctacgaaaccaacctcaagaacctcgcgctcatcctccgcacgaacgcctcctcggggtcctcgcccaccctcttcgcctccggcgccctcggctccgccccggacaccgtctacggcctcttgctctgccgcggcgacctgagctcctccgactgcgccggctgtggcaccaacgtctcgagggacgcggtcgcggggccgacctgcaaccgcaccaaggacgccatcctcgtctacaacgaatgctacgcccagttctccgacaagggcgacttcctcgccgccaccgacaactccggcgagtacagcgccctccaaagcggcaccaacatcagcagcaccgacgtcgcgggctacgaccgcgcggtcaccgagctcctcaacgccaccgtgcagtacgcggtggagaactccacgaggctgttcgccacgggccagcgggtgggcaccgacccggggttccgtaacatctactccatggcgcagtgctcgccggacctgtcgccggggcagtgccggagctgcctcgacggcctcgtggaccagtggtggaaggggttcttgttcccgcggaacggcgaaggcgcgagggtctccggcccgcgctgctccctgaggtccgagctggggccgggccccttctataccggcagaccgatggtgctgttgccggtcaaggccgacgggctcacgccggcgccggatgttgtgcctgccattacgggaggtgattaattaaactacagtattatacttcctcgtctcgctcatgctgtcccatatttttcccgggtaattttgcacggggcttgattttaactgttaacttaaatttgatttatactcctcttagtttatgttacatatataaagggagaatagccaatatgatccctaaaattttgctcctagatcattttagtccttaatatttcatagtgtccaaacaagtcctttaaatttgtcacgtgggctaatattgttcttggtcctaccaaaatcactatatggacatgccatgtcaccctcctatgtaaaatctatatgatttgtctaatttactcttacgtatatcatagaaaaattagaaaaaaggaaaaaagttaaaaatatatatatggtatatgtaagagtaaaaatatacgtaaaagggtgaaaaaaatgggaaaagtatttgttcctatggttatgtctaattcacccttacattctttttctatgatatacgtaaaagtaaattgggtaattcatcatagattttgcatgaatgatgacatggcatatccatataatgattttttggacccaaggattattctaagccttatgaaaaagtttaagggttttttagaccattaaaaggttagggactaaactaatcctacattgaaactttatggactatagtagctattctcccttacataaatatgattatattacatatgcaactagcgtacagtctgtgtgttgcaacggttttcttttaaaaaaagagcaattttacggtacttgagaaggtaccatgaggtacccttttttctattgtaaatttggattctctcggtacctaggtactatgaggtaccatgaggtaccaaattttacactaaatttttggtacctcatggtacctcctcaaagaccgtagtgtattgtatatatttttaaagccttaaaaaactatttttaccgtgtaatatatcaaggagcgatgaaaattttatattgaaggaattcgattattttttaggttttctctcactttttgcgtgcacatattgttgttggtggtgggtatcttttactttatgtttttgtatatacaaattaatttatatacaactattgtcgatccatttataccatttatagtcaaaattcttttcttttcttttcttttctcatgagatagatagatagattgatggattattatcaagcgaaaaaataactaaaatttgttcactgagcagcagctagaagcatagaactgtattattgtgtaatccgtttcatatttagttcttcacgtacttgaactcattatttttcactgcaaaaatgcaggtaagaataattcagcaagcaaaattctggtaattaccttgccgacagtgacagttgccatcgtagctgcaatttccctttgtatctggaatgtgcgtaagaagagaagattggcaaaagcagactccagacgtgagtccctgcacataattttggcataaatattaacattcttatacactggcgtccgttaacatttcgtcaaattcatgcaaatttggcagctgatagaaccgaggattttgaaagtgtcaagtcagcactgttatctctgacatcactgcaagtggcaaccgataacttccacaaaagcaagaagattggtgaggggggattcggtgaagtttataaggtaataggccagtagtctttacgtctacttctgaatcattgttgatttcttttgagaaaaatgtgtcgatttgatggtgtgaattgactatggtcaaaatataaattctaaattaaagttgtgtttagttgagcacaaagtttggattttggttgaaattgaaaatgatgtgactgaaaagttgtgtatgtatgacaggttgatgtgatggaaaaggactgaagtttggatccaaactttggatctaaacacagcctaatactcccttcgtccctaaatatttgatgacattgattttttttaaacatgttggaccgttcgtcttattcaaaaacttctatgaatattattaaaaacttaagtagtagtagtatatgtaacaatgaatcaaatgataggaaaataattaataattacctaaattttttgagtaagacgaatccggtcaaataacggcgtcaaatatttatggacgaagggagtacctagaagtatgaatgcactactgctcaattgtgagtgagtcgcaaattttgtgttctcttgaaacaaatggcgaagctcctgcctcttgtttagaaaaactattagtgcaggttagttattgtattttattaatagtgaaaatatattacatcctcgactttagccatataatacataggtaacaagttaacttgaaaaagacataggtgatgggacaaatcctcaaatacctttggaagaaaaccaattgatagacttaaaaagacacataaattctagcaaaaagtaagcctatatgtattacgccacccatagaaagtaaaagacctttggtaactaactctaagaatatagcataatatactgctcctcccatcgtaataacatagaccaacatttggatcagttggacgataagaagataacctgcattgcagagttagacatcatttttctgttataaaaatcttttatcattttttttcaatgccaaattgatgaatttcaagtgtctaggcactccccgaagcgagttactatttttttttgggcacctcaggaggaggcatattgtaaggaaaagaacacattgtcgtgcaaaatgagcaacatggcaataaaaataggtcttgaattgtttcttgcacattgtagacactatattgcttgtctcctctccaattccttttatgaaggttatctttcattaagattgctttttctataaagaaatcacatagaaactttgattttttatagtaacctttaaaattagttatgttatattattatatttttaacccattacaaaattttgtatttctgttcatgtctccatgtataagttagtaagaaagtaagatactaagctaaattatttagggagttctttccgggcaagaagtggccgtgaagaggatggccaaggactctcaccaggggctacaagagctgaaaaatgagctaattcttgttgccaaacttcatcacaagaatcttgttcgtctcattggtttttgcctcgaaaaaggggagagactgctcgtctatgagtatatgccaaacaaaagcctcgacacccatctttttggtactattagcattatctttgatcatttgttactcctgtaatcatttcactccaccaataatagtgacattttttttacatttggtgaaaaaagacacagagcaaaggaaacagctagactgggccacacgatttaagatcatagaaggtaccgctcggggactccaatatcttcacgaggactctcagaagaagatcatccaccgtgatatgaaggcaagcaatattttgctggacgctgacatgaaccctaagattggggactttggcctcgctaagctcttcgcgcaggaccagactcgagaagtcacgagccgcattgctgggacattgtaattaagttgatggaatacttcatatttttgtgcttatattaactaacaaactaatgaaatacaatcctccttgctgatgcagcggttacatatctcctgaatacgtgatgtgcgggcagtactctacgaaatcagacgtgttcagcttcggcattctcgtaatagagatcgtgacaggccaaagaaggaacagtgggccatatttctctgagcaaaatggtgtagatatattgagcatagtgagtatccccggtagttcacataggaattcatgatattgctttgcattgcaatatttgcatatttgtggatagctgcacatgtctatcgtaattactgctgactgctgaagacatacatatttgtgactattgctaggtatggaggcactgggaagaggggacaacagcagagatgatcgaccattccttgggaagaaactacaatgaggctgaggtggtaaaatgcatcaacatcggactcctatgtgcccagcaaaaccctgtagatagacctacaatggtggatgtcatggttttgcttaacagcgacgctacttgccctctaccggttcctgcacctaggccaacatcttcgattgatggaagctctggttactcaacaggttactcaacataatggtctggttggtagctgggagctagatttgtcaccgatgttgttgctttctgttgtttcatattgaaactattcattctcgatttgcaatccgtagcatccaacttcaattaatgaagagtttcgggggactattactcctcaggggttatatatagtttaactagttgataccccgtgctttgttgcgggatatgtgaatgaatgcatgttatacattataaaaatggtaaatgtatatgtttaaataatgtgaaaatgatgagtagataataatttgccattgcttgtatattgagttctaataatacagcaaaattgtaaatgatacgtaatgtttgcatgatatttaaaatactctagataataattgctagtgtgggtgatgatgtcgcacacttgcatgatgagttttaggagttaatgggcatcaattttatagtaagaaaggattaatgaaaagtgtccacattgggagattcctatcccattcaatctctcaggcagctcgctccatgcttttcgtctcaactccttctctcctctttatgtgttaaagattgggttcagagatagccctttccattgtgaaatcaagttgttagattcaacctatatgatgaacaaatagtcaaaagtgagtgttttagaaattatggtgaatactgttttcgcgggtaaacagtgcagggtggcactaggttgccggtcagatcggcagattccgtggggagttggtttcggattgttttcgtggaatttctatgttacttcatgtttatgacttctagattgtttctatatgtatgtaatattgtttgtgtgttgatgtcagtcaatttagtgtgaacttgtactcaaatatggtatttctttgttagttcatgtgcaaatattgcttgaggccataggagtatagccagtgatagattaggactaggcttgggagaagctgagatccaaacaatcaaggatatcacgcgggatgtctaggctagagaacaatgcacgtggagatgaaagtttccatatatcatacacgaggtgttgtgcaagtatagaaagagtagtcaaatttggattggaatccaagtttggaaagattagagtgtggagttgtacggggatgttgtttctctggtttcttagatttcctatgtgattagaagtctagttctagttggattcctagttaggggcattcacgttatggtataaataaatagggcatatttgtcacttgtttgatccagtattgtgaatttcctattatgggttaattggatcatagcattacaaatttgtctgtttggaaatatgctattataattcatctaattgaaaagatgccattgcaatacttctaaaatctggttcatgccattttatacgcttgagatgggttttgaattgtttttatatattgtattttcgtatggaccaaactaccgttggtcttcagtcttcacagcttaaaatcatccccaaatgtagctccaaaccctagccgagcgagcgagcagtggcgatagcagagcaagcggcggtggcggcggaggctccggcaccggcaccgagggctttcgctgtggcgacgcaacaagctgcagcggtgaagcaagcaacggcgacgacggagccagcagggcctcggcatcacgcacaaagcaagtggcagcggcgctggcagcggagcaagcagcggcggggcaccgagggcttcggcagtggcgacgcaccacaagcagcggcagcggtgaaggaaacggcggcggcggagacggcggcagcggcaacgctggccgcggagaaagcagcaacggtcgcatcgacgacgaagcaaacagaaggtggcggaggcgagctagtcctagtcgcagcgcgacaagttcttggagacaacggcgagctccagtggcattttcctttcctttttcccttttttttctcctctctgtatttttttcaggatcaaatactgcatatcgattctgaatttttttttaacatcagcgatttcagtttatttatttgaaatattgtggttcaaatctgtttttttcattgcactggcacgagcgatttcaatcttgatttgaaatgctgtgggtcgtatggtgatttatttttacggtgcttgagtggtaggataaggggtagtttggtctgtacgaaaatacaatagacaaaaaccgattcaaaacccatctcaaacgtatagaatggcatgtatccgattttagaagtattgcaatggcatccttccaattagataaattataatggtatattttaaaacagataaatttataatggtataaatctaattaacccttataaaatatgtaactaacaaattagactaacaccgttagaaggctggttttcagaaagaataggataaggatacccctgcacacaaaaattcaagattgacatcatatttgccataaaaagcttacatattgatttgccctccaaaactgatatggtcaaatgagattcaactctaacaataattgtcaagaagccgaaccattcctacaacataagcaaaataaataaataaataacggtattgctaaaaatatgtcgccacaaattacgatagatttcagttggttgtttcaaccgtcggatgcagaaatcgcacgtgtacacatatccctccgattttgttctcttctgatctcttctgttgctttaatgttagtatttgctaagtaggattactaattaatcttaaaaactaaatattggtgtcatcacaaatttatagttttgggaattacatcaacttacacatgtaattttgagaattacatatgtaattttaggacttacatatgtaattttggaatttacattgtaaatacactaaaattacatatgtaatttagtgacttacaatgtaaatacatagcgactattttttaataaaaaatatggcgccataaatatagctactcccataaataaatgttctagctagtagatcaagaaggatcggttcagaacccacataaaaatgcataataaactagctagggggtcgcaagcattttcgatgtggagtatgtaatgttccatgttgctcctgctgttgccttgttgctcctgacgcgtgctgctgctgccgccgcccggctgttgctcttaacgccgccggcagctgctgctcccttgccgccgccacctcctgccgcctgctgctatactgccctgccgccgctgttgagggggtttggggacccattttttgggttgatttgctcttgatgtggagaaagtgacgaggggatttggggattagggttcctagagagaggagctgattcttcacggtggagtgaagagcactgatcagaacagatgggcagtgagggggatcatgttttttctttgttatgaattattttcgtccgtttatttgaactaaatcaaacggcagtggcaaatcgaaggagcacaaaccaagtgttttagatgcactttctaaacacatattgatgcatataaagtcaatatactttcaagagtttcgccgttttgtttttttcttgatcctgacggtctaactggagtacaacggacggttggactggcggcggtagcaacaacatcatcaagcagacaaggagatcgacaggcggtctgaccgacgacgtcatcacaacgatctgaccggtgcaacttcgtaaagtttgagggtaatcttttaattttgcaagaagaattgattttggtgtttctaccatacaaccgcctccggttggcttggttcttatattcgaaccaaccaatattttgctaacattttgtccggttgtcccagtaaagagcaaatatctattccttaccattgtattattttgatttgttcaaaaaattttcatccagttcgtctccaagttacaatgtactactgatttatcaattgcttctactccatgacatattgacaatggattggatagtttttaaaagggttaattggatccatgttactgcaactttgcgaaattaaaaaaatgccactactattcatcatatcggccacatgccactggaaatttctataattaaaactatgccactcccgtccctttttccgtctcctctctcacgccgtctccgttgccgtcctcatcccctccctccttcctcatttccgttcctgacttcatccccctctccggcgagcggtagagcttgaggagggagttggtaacgacagggtcccgttcctgcgcacgccttccctttccctctccgtcgccgacacggtctcctcctccccgccactacatattcctcttgctggtgaacttccattgcacgcgcacaagcacagtcatcacagacttcggcgatctccatggctccatcaggtggggtgcgcgagcgcatcgcacttgaatgcatgctcgtgggcgaggcgcgcaaagcctgtggatggggaaggggcgggaaagacgacgacgcgagggcggcgaggaggagggagaaggtgaacggggtgggcggcgaggcctcgcggatgcggtagtagagggcgagggaggcgaccgcgggcgcacagcgctgggacagcgcggcgtggagcgggcagcctcgggagggggccgacgagaaggcaccggcagaggaggaggaaggtgggctccggagccaaaggagcaggcagcggaggcggtgtgggagctcgggcatggcgggagggagccgccaccgtcgttgtcctctatccgtgacaggaggtctcgggagctgccgccgtcgccgtcctcgacaccatccacggcgggagtgctcgggagccactgccaccactgccgtcatcaccgctgtcctctttgcagtcgcagggatggaggaatagatggtgaagaaagaggagggagatggaaacgattaaacatgggggaacgagatagtgaaaaagtgatgggagtggcatgtttttaaaataaaaggaaaataaaaccgctccctttgccgtatgtgggagttcaaaaaaacttccactaattaaaaacatgccactcccagtatccttttattttgtttttggctctaattaattcaccctaaggtagcactatctttctttttctaatatacgacaccattgactttttgtttacatttgatcatttgttttattaaaagaatttataaatataaaaatatttaagtcatgtttaaagaatatttgatggtaaatcaagttataatgaaataaatgataattatatattttttaggagtagttttttttaaaaagacaaatgatcaaacgtatatcaataaatcgatggcgttatatattaaaaacggaggaagtataaaaagaatctatccatcagacgcacgatgcccaaataatcggacggtcaaatattccagttgaccaacgagcgaaacatcaagttataatgatgaaaaaaccatcaattggaacatttaaaagttatatgaaacttggtaaagatatacgttgaaacatgtcgctgtcacatatgaaacaactagtattaacggattgaagcatacgtttttctttcattaaaatataatcatgtgatatcttattgtaaagatttaattacaacgaatacaacggtgtaatcagatcgtagattggataattagtttaggagaaaaatcattttgaagctcaatagaatgtgcatgtatggataagatggagagagagtagtggtaggtagtttcgggaattttgtaaaatacactgaagacacatacgggtatatatcactatcacgtataaaacattaggttctgacaattttaaatatatatattttttattataatataataatgcgatatcttgttataaagatttaattacaacaatacaatgatataatcggataagcggttaatgagaaaaaaacattttaaatcttgagtagtacactggtcagtctgagcgttcgataaaattttgtgaaatcggtagaccgatcagtagattttcgggaagtatatgatcgacattcttcatgcaagttgccgcgcgactgcctttttcatggggcccgaccgcgcgaaggtgcaagcactcccgtgaccaataatccattgctcctaaattttactccctccgtatttcaatgacaatgttgactttttgacaaacgtttaacctttcgtcttattcaaaaactttatataattataatttattttattgtgacttgatttatcatcaaatgttctttaagcatgatataagtatttttatatttgcataaaatttttaaataagacgagttgtcaaacgttggttaaaaagtcaatggcgttatacattaaaatatggagggagtattaattatatattgagttctacaagtatcttgtttaatactccgtacattttaggagctaattaaacatgtcgaaacagcggctacggggaggtttcccttgagactagtcacgatcagctttgtttatttccattccccttttcctttcagcaactgttatctatcatatcaactgcgtccatgcatgcacgtgggttttgacaagtaagtaagcgaaagtaatttcattttatgcatatcatataaatagttaaaaaaaatttaaaaacatttgataacattgattaatacgaaatatatcactccacaaacatacgaacttaaattcaattaatttctataagttctaaaaaaatacagtaacaaatatagctgcgaatgtacgataattattttcagtttaattttttttacaacttgtagaagttgaatttggttttacatatttgtggagtgatatattttatattagtatatgttgtcaatttttttagaaaaatttaataactatttacttcagatgacatataaacaactagagtaagtaacggggttcagtgaattcagtctgacctgtggtggggccatcgcatgccaagttggccacttgcccagagctgtcacatccaaaatgatacgcattccagctcaaaaactcaaaacgaatgctgtgccattgctacatcgatcgagcttactagctttccatcatcccaccactgcctctgctaagctactctgaccggccggcgccatgcggcggcgctcgtcgctcgtccacgccgtcctcctcgcggtcgcggcggtcgcgctgccgctcgccgccggccagccgtggccgagctgcggcaccggcggcacgtacgcggcgaacagcacctacgaaaccaacctcctggacctcatcagcgccctccaggggaacgcctcctcctcccccaccctctacgcctccggcgccgtcggctccggcggccgcgacgccgtctacggcgtcatgctctgccgcggcgacctgagcacctccgactgcaacgactgcggcaccagggccggccaggacgtggggcgagtctgcaaccgcaccagggacgccgccctcgtctacaaccagtgctacgtccgcgtctccgacgccgacttcctcgccgctgccaccaacaactccggcgaggtcgccctcatgagctccaccaacatcacccgcgccgccgacgtcagggcgtacgacgccgcggtggtcagcctcctgaacgccaccgtgcggtacgcggtggagaactcgacgaggatgttcgcgacggggcagcgggtggggagcgacccggggttcagcgacatctactccatggcgcagtgctcgccggcgctgtcgcggccgctgtgccggagctgcctcgacggcctcgtggggcagtggtgggacacgttcccggtgaacgtggagggcgcgaggatcgccggcacgcggtgtaacctgaggtcggagctgaaccagggcacgttctacactggccaaccgatggtggtgctgcgggccgacggactcgcgccggcgcaagggccggcgccggcggctacgacgggaggtgagcatacaacatactccctccgtttcgaaatgtttgacgccattaactttttagtacatgtttgaccgttcgtcttattaaaaaattttaagtaactattaattctttttctattatttaattcattgttaaatatattttcatgtaggcatataattttacatatttcataaaagtttttgaataagacgaacggtcaaacatatgctaaaaagtcaacggtgtcaaacatttcaaaacggagagagtatttagttggagatgtattttcaatcctcgcggagaactggagatatccgctcatttcttacatatgccatccaaataatctatttaaattaatatgaaaaatatcagtccacaaaaatacatggttaaattcaacttctacaaaatccaataaaaaaaacaaattaaattgaaaatagttaacgtgcattcacaattatattttgtttgttgagaagcagctagcagcctagcactgtgttgttgtaatgaggtgctacatagaagaaaaggtacagtactttggatacttgaactgatcattttctatgcaaaagtgcaggtaagaataattcagcaagcaaagttctggtaatcgtcgtgccgatagtggccgttgcaatcgtagctgcaacttccttttgtatatggaatgtgcgtaggaaaagaagatcaagaaaagcagaacatttctctgaacgtgagtcctctacaaaatttagcgtagaattcttcaaaaattccatctaacattcgaatatcaattaactatatcaaattcatgtaaattttccagttgacgcatctgaggaccttgaaagtgtcaagtcgaccttgataactctagcgtcattgcaagtagcaacagataacttccacgaaagcaagaaactcggtgaagggggatttggtgcagtttataaggtaaactagcatgctggcccgcgcagattgcgcggctagcatcattatattttctctcatataatagcatatttgctttctcattatatttttcaaatatattaaaatgaaacataattttaaattttacaataactttatgaaactactaatgtgtaatattcatattgtatttttatatacgtgttagttattaattatttttaatatcaaattttagttatttgtaaattatatatattcctatatgtactatagacctgtcttttaatatttctttttttattccgaattttctgtaaattgtatttctatatagactctaagctcttcttccaatattatttatttttatttctgaatttttattatttctaattgtatttctatgtggactctaaactcatctttcaatattctttaatttttaatttcgaattttagttacttctaaatcgtattcctatattgactttaaactcttcttcccgtgtttttcttaatttcgaattttagttacttgtaaattgtatttttatacggactctaaactctacttttaattttattatgtgtattctgaattttagttagttttaaattcctatatggactctgtactctacttctaatattccttatttttttatttccgaatttctattctttttcttaattgtatttttatatggactctatactctacttctaatattccttatttttaattccgaatttcagttacttcctaattgtatttctatatggactctagtctcctcttctaatattccttatttttaattctgaatttcagttatttcttaattgtatttctttatggactctagtctcctcttctaatattccttattttttaattccgaatttcagttatttctaaattgtatttctatatggactgtactctcctattctaatattccttattttttaattctgaatttcagctttgctttttctttttcttcgattaatgtgagaatttctatgccatgagagcggactgtactctcctattctaatatttcttattttttaattccaaatttcagctttgctttttctttttttccgattaatgtgagaatttctaggccatgagagcgaacgtggaggctactttttctattcctttaataatataatagatggtactccctccatcccaaaatataaaaaatttaagtgaatataatacattccagtactacgaatctgaacaggctaaaatatatcacatccacccataattctttatattttgggacgggagagtagtagttcacaggtaacttttgaacaattgctgatttccttttagaaaagaattattgatttgaaggtatgaatcgagaacggtaaaaatatgaaattctaaatatgtcttgattcctgagcgcactagtactccattgctaatttgttatagtttatttttacaaaagatctttgatctggctttattggaaaaaccaaatattgtaaattagtagcatatgcatgttagagtcttaagtcattacaaaattcaccatttctgtccatatctccatgtataaagcaaattagctaataaactaagaattattcagggacttctttttggacaagaggtagccgtgaagaggctggcaaagggttcaaaccaagggctagaagagcttaagaacgagctagttctagtggccaaactgcatcacaagaatcttgttcgtcttgtggggttttgcctagaggagggagagaggttgcttgtctacaagtacataccgaataaaagccttgacatatttcttttcggtacaattataattaccttttaatctacatatatatacccctttcgtttgctgacatgcaataattacaataatctcttcatcacgtgtcaattagactcggagcaaagcagacaacttgattgggcaacacgattcaagatcatcgaaggcattgctagaggactacaatatcttcaccaggactcacagaagaagatcatccaccgtgacatgaaggcgagcaacgtcttgctagatgcagacatgaacccaaagatcggcgacttcggcctcgctaggctctttgggcaggatcagactagagatgtcaccaatcgcatcgttggaacattgtaacgaagtcaaacactttatctgtttgtgcttatatgtagctaacaaactaacatgtacatttttttcttgttgttgcatgcagtgggtacatgtctcctgaatacgtgatccgtgggcagtactctacaaagtcagacgtgtttagctttggcattctcgtcatagagatcgtgacgggacggagaaacagcggcccccatttcttagaacaaaacgaagatttaataagcatagtgagtatcctgctaactcatagacaaatacggagtatattgataccgcttacattttaatatttgcatttgaagataaccatgcaatatatgatctgcaatattaacatataactcacaatatgtaactgattctaggtacggaggcactgggaagagggaaatattgtagagatgactgaccactccttgggaagaaactaccctgaagctgagctgctgaaatgtgtaagcatcggtctcctgtgcgtgcagcaaaaccctgtagatcggcctacaatggcagatgtcatggttttgcttaacagcgatgctaccagcactctgccggcttttgcaactcatagcccaacaatttccatcgaggggaactctggttactctcaaaccgttacacaattgtctcctagatagcagggggctaaaacatagttggtactagaaaataccccgcgagttgctgcgggatataatgtatctaaacaaaatgaagtgaaattctaagagaacaattgatccatcacatttagacatagtgcataccaataaaagaaagcgaaattctatgaggacatttgatccatcacatttaacatactatatgggttggataggtccaagtactccttagcagagcttcatcctgtttcatcgattataggaaaatgaattttcttgactacaaattttggaaataatacaaactcatcttatgaggagattgtgaaacttgcgtaatatatgtgtaaggacaggaaaggtgtataacaatcaaagacctgtttattgcgctatgctacaaattaaatgaggattagttgtactattctttttagcaatatatgacagactgatagagatatataagagatggcgttatattatttgattggaataaataatattacaataataaataaaataatagagtgggctaagctgatgaaacaaaatggagaagcaaagacggagttattgaaatggatgatcctgggagctgcaacttctttctgtgaaccaaagaaatggagtcgactgaaggtgataatcttgaactttgttttgtccttttccccctactcaagaagagttacatctaagttcgcatgttttctttctcgtctgctacctactatttgtgttgggccaaagtattggctgaaaacgctcctttcttgtttgagctggtctccccagcctgtggatgtaaaaactctctttatataaaagctgggccatctggccttctatcaaaaaaaaaaagttccagaaatcattctcgttgaatcgtagtatagctcaaatatgaatagaggtagaaattaatgaccagaatttactttcccaattagctagtaagagcatctatgataaaatccatcagcatgatataacatgaatggaggggaaatgtgacattaaattttatgaaggataaaaaagtgatatcatgcagatctagccaatggctaggcagatgaagacaaacaggagcattgcctttttctatacaggaggaatgagtacaaccaataaactcatcccaaagccatctgtttcaaccttgtgagccaatgagctgatcagctgaacatgggaaaatgagggaagagaagcacctgattcagcaagaagaccccatgggaacagaaaaaaggtataggccaggaagacacgaatgaatgggctgcttgtgtgcaatgaaacaatctcactgaaggagaaacaattgtgtcggtttgtgtccaataaatcaatatgaagattggcgaatccagctgttgtgctgcaacaatttgtttcatagcaaaaggggaggctaaaatgcctgctaaaatgctgcatcgaaccgaagccaccagatgagttggacatgattacatgagcccttttacagatggaaaccgcgctaacaggggaaatggatttgatggatctttgtatctggaccaggaagaaacgttttcgtgggtatggatgaacaacttgttagtgccattgctaccaggtatacatgtatcctgtaggatagtagttggacgtgggtgtagctgcgtaggcgaacagattgattcgttgtgttgttgcttgtttgtgggagctcagcatgcaagaagatcctttaatagctacccttccagttcttttcctcttatattccttgagaagtggaagaggctgttggtttcgcagagggagagaccgtgggatggtggaaccatggaagatgaaccaaatgacagtttttgatcgagccatcaaggaggaggcgaatcgatgaggggaagaggactcgacaacgcacgatggagaggcctggtgatgcgccgcctacgacactagtcggaaggaggaagaggaaaggttcactggctggcccaggtgggaaaattgggctggcctcagcgagcaagagaaaaggcctcgaggaagcaatttgcaccgttaagaacgtgaatccaacggatggaaataagtggtgacgtggctcaacctcaaagcaggaaattgctaataactacactaagtggggatgatttgtataggtatataggatttgctcgttgatgcttgttttgttttccgttgaaattgtatcttttatcagtttgtaatcaagaattgtaaagttaaattataaacatggagatacgaggaaaaccagtagtatgtcactttctttttcccttttgacttcaattaattagtttctcataagatacttttagcgtaggagtaatggatatccatctgaccatccatgcaagttgttgcagctaccgcggctggttttttccacgggggcgccaggtgcacgcactccacacccaaccatttgattatttctagttaagaatgggtcaagtgttccaatcgattaagtgcgtgctaattactactagtactcgcatgttgaaacagctgctgcgtggtggtttccgctcacctttattttcgacaacgaatgatcgatgaaacgtcccccctgaatgaacgtactttacgacgtaagcatctgtctaaaaaaacacgaataatagaaaatgacctaatatcaaataattagaagagtgacttcgaattcaggtcgtctacctcaccaccttgtgaagctagctggaagactctgggtgtttctcatgaacatctgcctaacgttgtgtggtgacctcagtctctgtgggctatcgccatggcaacttgccaacaccatcgtacgtacgtgcacgagaaaaaaacatttcaatgccgcgcgaaaattctatcctcttttgctagcttccatcccactgtgcatcctgctgactgtgacagctgcgtccacgggcgccatgcggcggcgctccacgttcgccgttctcctcttcgcggccgccgcgctcccgctcgccgccggccagccgtggcagctctgcggccgccgcggaggcggcggcggcggcacgtacacggcgaacagcacctacgacaccaacctccagagcctcatcgccgccctccagcagaacgcctccacgtcgcccactctcttcgccgccggcgcgctcggcgccgccccggacgccgtctacggcctcatcctctgccgcggcgacgtgagctcctccgactgctacgactgcggcaccagggccggccaggacgtcgccccggcgtgcaaccgcaccagggacgccatcctcgtctacaaccagtgctacacccgcttctcggcggccggcgacttcctcgcctccgccaacaactccggccaggcgccgctcatgaacagcgacaacgtcaccaccgccgacgtcgccggctacgaccgcgccgtcacggaactcctcagcgccaccctgatgtacgcggtagtgaacaccacgaggctgttcgccacggggcagcgggtgggcgccgacccggggttcccgaacatctactcggcggcgcagtgcacgccggacctgtcgccggcgctgtgccggagctgcctcgaggacctcgtcgccaggtggtggaagacgttcccgcggaccacggtgggggcgaggatcgtcggcacgaggtgcagcttgaggtcggaggtatcccaggacaagttctacaccggagccccgatgctgaagctgtgggccgacggcctctcgccggcggcggcggcggcgtcgccggatgctgcgccgggcactacgggaggtgacaataccgcgtcatttcgataacatatactccctccatttttaaatataagatatcgttaatttttaaacatgatatttgaaaatttgctgggttcaaatttactgcaaatatgagaaaatataagtcattatacttttttatggttcatggatttctgcattgtttatgttataccggattacttttgaactgataagtctgacttttgttactcgtcacattcttggtgttatgtcagataatcaccgcgcagacagtcaagacccatagtttagcatggcaaatgctgtattacatcatgtcacgtatatatattagtagtatgtcaattaacgatgactatcttcatagctcattgttttcattgagtcttagaaaaatcataaattggcacacgaagagacagagacggatccagaaagaattaatatgagggtctgaacaaactatacaaaaattataaacccatcttctaattaatgtatgataaaaaattttagtggggtcttcgtgggggctcctatggttacgacacgggtaatggagggctcgagacccccatagacccatgaaggatccgccactgcgaagagaaagtcaattttgttcgttgagcagctggtagctcaataatcagctgctcagacaagaaaacaggtgctctgttttgaatacttgaactgattattttccctccaaaatgcagtcaagaataattcagcaaacaaaattctggaaatcgtcttgccgatagtggcagttgcaatcgtagctgcagtttccatcctcttgtggaatatacgcaagaagagaagacgagggaaagcagagcatttcaccggacgtgagtgatccttctcatcattggcataaaattcttatcaaattccactatacattgttaatcatccgtattcattaacagtttatcaaattcatgaaaatttgacagctgatgcagctgaggacttcgaaagtgtcaagtcaaccctgctatctctggcatcactgcaagtagcgacggataatttcaatgaaagcatgaaactcggcgaagggggattcggtgctgtttataaggtatggaagtaaccttttatgtgttcttttgaggaaataattttttatttcacggggcgaattaagcatggtaaaaatatgaaatgataactttttactatgagtgtactgatccttaattgttactttgataatttaattaattaatactatttggcaaatatcattcaagatcgcctaatattgtaaattagttacagcaccaagcttttaagccattcaaaattcagttttttctatccatatctccatgtaagaaggtattaaaccaaatttttcaggggcttcttttcagacaagacgtagcagtgaagaggctagcgaagggttcaaaccaagggttggaagaggtgaaaaacgagctagttttggtggccaaacttcatcacaagaatcttgtgcagcttgtggggttttgcctagaagagggagagaggatgctcgtctacgagtacatgcccaacaaaagtctcgacacctttctttttggtactactgatatcacccctgaatttagatatgttaccatcttttcatgtttctgcaatgaacatgattcatgctaattagatgaagagaaaaggagacagctagattggactacacgatttaggatcattgaaggcattgctcggggccttcaatatctccatcaggactcccagaaaaagatcgtacaccgagacatgaaggcgagcaacatcttgctagacgcagacatgaacccaaagattggggactttggacttgctaggctcttcggacaagaccagactcgagagattacaaaccgcatcgttgggacattgtaattagttcataaatatatatgtaataaaataattaactatgcaattctcattctaaccatgtgattattcttgttggatgttgatgcagtgggtacatgtctcctgagtacgtgacgcatgggcagtactccacgaaatcagatgtgttcagcttcggcattctcgtcatagagatcgtgacgggccggagaaggaacaacgggccctatttctttgagccaaacgaagatataataagcatagtaagtatatactacctccattttctaaatagatgacgtaacttagtgtaaatgtgctgaagtataagtcttacgtaaagcttttttaatgataaaacatgtcacaacagaacaaatgatatttatataatttttaaatatgacgaataatcaaacattatgtcaaaagttaacaatattatttattaataaaagagggagtatatattttgctaattcaccaagactaatgcaccattgattgccacttgcacttttagtactttctaacatataaccatgcatactgattactgaagatatttatgtatctaatactaggtatggaggcactgggcagagggaaacattaaggagatcatagatcactccttgggaagaaactaccctgaaggcgaggtgctaaaatgtgttaacattggtctcctgtgtgtccagcagaaccctatagatcgtccaacaatggccgatgtcatggttttacttaatagcgatgctactagcactctgccggcccctgtagttcatattccagtagcatctttctccgatggaagctctggttattctcaaaccgtgacacaattgtctcccaggtagcagggcctaaagcagagcttgccatcgctagtgtagttggcttgttgcttgtttttgtttcgagttggaacttgaaactgtatatattgtcattttgtgataagtggtcaagagcttggccacacgagcccaatgctacagaatcacctacagaagcgtaggacacatcactgtatattgggattccaaaaatctgcttatctgagaaattactgcagtacacacagctcgctagtgctgtagaatgcagattgctctggaccgttaacttaaaagaaagtttccattacagagtgtaatttgtgaccaagtcagtagcagattgagcgaaaatgagcgaaaatgggcaaatggccggc

SEQ ID NO: 6336 - DNA, 57928 bp, Oryza sativa
tcatcacggcaattggcctcctcgacctcgacgccatggatggagcaccgcctggatggtgtgaaaaaagaagagaaaaaagaaagaggaaagagagagttgacgtggtatgctgacatatggggcccacgtgtatcccacgctgactcagccgccatgtaaaccaaaccggggtcaaaaccaccaaagaacctcggttgaccgattttgtatagttaagggaccccgcatatctggttttgtggttcgagaacgttttttatcccaataacaagttgagggaccttcggtgtactttttcaaactaataaacagaactcttctaccccgttatccggtattatattgcctgcctgccagggagtctggggccgagcccgccgagctaccgcccacggtttgtggcgaacaccaccgttttcgcgggtgctgatctcgatcgtcgatcatatagacaggtgagcatatatgcatatgtcatgtcagcccccgtgacgggtgctgtggcgtgccttgctcgatccactcatcatgaccgatcgagagagctgaccgccaagtggccaaagttgatgccgcgttgatcgttcgtccgcccacccccggccgtcgtcggtcgcgacggagccttttagagcaagtataataatagcgagctataagtctactataagcttataagtttatgtggagaagagaggtagaaaaaaattaaaggggttggctctcatgtaaaagctagcttaacacaatctccaagataaatgcattaaatgtataagtgagagatagagagaggaaaataaaattatagctaacgttatagctaatctattatatatgttggttttaaaatgagctaatagtaagaagtgagctatactattatccttgctcttatgtggtcttggtctcttgttacggagattcgtgcgctggaacttggcgacatggactcacagatcccgctagttgtttttcttgccccatcaaagactatatattcttccccttctccaacccacatccctcatcgcacacacgtttttaatctgctaaacaatgtgttttttttaagttttctatagaaaaattaatttagaaaatcatattaatctatttttcaagtttttttactaatacttaattaatctcgctcatttgctttatttttcgtgctaggaaacagggttgggaaccttgcctcccgaactcgtactcagcctaattgtttggttcacatgccaaacatggctagatgcgtggctcataaattgattggtcacaccttaagtaaggtttggctaaaagataaatgtataatatataggcctttgaattgaaaaactatgacatatgccacaactttgttgtatcctgcagctgaagctcgcacgtggtgtatacatcaggtgcactgtgcttcatctactgtctatgcacaattaaatgagttccattgcaaaatgaaaagaatccaaatatagaagcataaatatatctttattgcgtactttatatttaatttgtcctatgaaatgaatcgatgtatatactgtcagacgtttgaggtcacgacaatagtatttgcatggtgtggagatcatcgatatcaagatatatacgggattgaggtaaaagaaatggagacaaggtttttatacaggttcgggccccttatctgacaggtaatagccctactcctattggccgtagctggtgttactctatattcatcagaatcacaaaagtacaatatttgggattgtctatctagccgtcgttgacatggcggtatgaacaccaatacgtggtcgacgacgtggtagtcttcctcctcgaatataaactcgccgagatcagagattgcactagatctctcttattggcctctgtaggcactagattgggtctgtctaggctaatctttgatgtcgacgtctggcttgtcttggcttgtgttggtctcctccttctcctcctagagggtcttgtatttatatccatagatgtccccttgtccaagtagaactagagagaccaatatggatacaatccgagtggtccatgtagtttccatatagaactctacttgtccttccttatctggaactccttctatatacgaggtatgattctgtataagacttggtatatgatgggtcctgccgaggttagtcgattaccattgggtatgtggtgtccataaccaggacaatagcccccaacttcaactaaaatgaattcacattgtcatgctgacttggtcgttctcgataacattcgagaagacatggagtactcaacatctctgaaaaagatcaacggtgcacaagtgtatttaaattgaagtctaaacaactgccagaaacgagcctgaaatcaacgcaaatgaacgagttgatcttatcgatcgaagaccttggaataacaatgtcgtgcttgcttaaccgttctcggacgactgagaaggtacggagtatactactaaattttctgtcttgccgtaatcgagaatttgggttgaagtcaagaattttcatctcggtggatacaccatcacttcattccataatccttgtcaaactccaccatctgttctcgagtaatcgagtagttgtccaactgttctcgagtaatcgttcaaccgttctcgagtagtcgagtagttgtagaatctgtgacaaagccctaaaatatgattttcctgaaatcaatacctagaacaaattgttatatacaaatagcccagaagcaaatgctcaagggtaacataatataatatgaatttaaaaattaaaaataaattgaatctgcacatggcaataaaagagtactctcgctaaagctgccctcagcaattagagtctggtactcttcctagccctagctatttttatggaaaaatggtttttcggcaaaggtagcttaaatcttataacaaaccaagctaaagctgacgaaatcctagctcctagccgtgaagttgggaaaccaattcccgattacacgacttagttaatacgcattcagaatagcgcaaatggacaataggattgacttcaagatagggcgatataagaaaataggatcaacggacaaatattgcatatacaaacacttccagaggttgtcggagaatccatctcgtcgaaacattgaagcaccaaaatctccctaccaggcgtgccactgtcgacgtttgaggtgacgactacggtatttgcatggtatatatggagatcgtcggtaccagggtatatgcgaaattgaggtaaaagagatggagacaagggtttttatacaggttcgggccccttatctgacaggtaatagccctattcttgttggtcatagccggttgtcacaccctaaaaatcctaaatatataaattgttgtttaattggaattattaaaattgattttaaaagcctagaagagaagatctaatttttaattaataaattccaatataaaatggggctagataaaatttcattaaatactttgcttaattctataattcctagatttttctgggatttatttgagctaaggaagtatttttaataaatgaaattgcatttcatgaataatttaaattgaaaaaggattttaaaagtctcttttggctttgggccgaaagtcggcccaaaaccttctctctctctcggcccaggtcggcccaagccgagcgcccgcccgcgcgcgcgcgttcccgtcgctgacaggtggggcccgcctgtcggggtcgtcgtcttcctcgcgtcggccgccgcccgaacctagccaagccgtgccgccgtctccttccaaattcggccgcgtctttccttctccggtgaaatcaatagaggggaaatgatcttcgggatctcctctaccttttctcttttggaatcgtcggctaatttcgtttggaaatccgtggattcgagtttgattcggatcgaaccctttcctccgaaccctaatctttccttcttgtcgccggtcgccgtgggccttcgccgccgcctccttgcccctataaaaggatccccaagcccgccgctacccgtcgccaccctcgccttcgtctctcgccgtcggaagagccctagcgccgtgtgacctagcgccgccgtcgtcgccgccgctccagccgtgcgccgccgtcgctccagtcgtcgccgtcactcgggaagaccgccatcgtggtcgccgtcgcgtcgccgtcctcgtccgccccttcgccgtcgctgttgaccgccggagcaccgccgtcgtcgtcaaaccgaaggactccgccgccttttcctcgacgccgccgtcgtccgttcatcttccaccgccgttttggtcatcggtgagttcgccgcgtcgcgttctacgtgctggtgccctccgttcgcgtcctcgcgccgtcgttcgccggcgagcatgcgcgcccgagccgccgagccgccgccggaggtgacgtcaccgctgacgtcatcgtggccgcccgtcgtgatccggtcgtggaccgcttgatctcggccgttcgttttggataagatcgatctcggccgttcgttcccgtgaaccgccgccgtgcgcccggtccaccgcaaaccctagccgttgacgcaataattcctttttccttttcaaaagtaattcattatggcgtcataattcaattaaaatccatataagtgttttaatccgatttaatctttaaaaattcataactaattcatcttagctcagatttagttggttcaagtctctaaatttttctaaaattgagatctacatgttaaaaatatccacatgtactgttcatgcttgtttatgtgctgttttggtgattttgctcttttctgtttagattccgacgtttccggagagtccgttttcgcaggagaagaatttgaagagttccaaggccagcaaggcaagtcacacagatcccaaacaaccctttgagcatgttgatcccgtttaaagctactatttctattcaactattgcatttattttcgaatgtcattggatggaattaacctattgtttgttatagcccttttgttcttgattactttattccttgataccttgggttattataacttgactagttgggctatatatatattggttcagctagatattagatatgattgcttagccatgcttagaaacattagcacactattgggataacttatgactcactattatttaatgatggcttaatgatagttcacgatggtcaatcgtgattaggttaatcaattacttgccaactaaaacttgataatggtgggttgtgagcacatggttttgagagtcgtgctcatgacaattaaggaccggttcacgagtttcggttgtgaaacattaaccgtgccaaccacaagccagcgtgggcaacggctttaccttttgtatagcatggttcattgcagagcaccagactgagaagtggcggagataagcccacgggggtcgctggggagtccatgccttgtttataagggggtgattatgatccagaaaaggtgccctgtggtggattgtgttgtgcgaggggtattgtcacagctcctttccgaggtaccgtggtggtattgaggcacatggtgacatgttgtggggctgtgtcttgtgggtacagtggtacacctctagccagagtaaaactattcgaatagccgtgcccgcggttatgggcgggtctaacaatgtctttcgtgattagtctcacacctctcatcatgataaaagatgctataactggtaataatttgtttagctcctggtttggaattgtatattcctggtttggagatagatctgtacagccgggtatggttgttcagaatggttgggcctatacaacagggtatgttgtatagcgttggattaatattgtttaattattacttaactgttttattaaattctgaaatgtttattaaatgctgtttatgcaaatgaaaccctactatgccatcctttgttatcctgtgcacttgcatatttgctgcgtggcttgctgagtatgtcatatactcaccttgcaatcattcatcagaggaagagttctacagtgacgctgatggtgtggaggattaggtgtagccctggtcaagctgcctgtggagtggagccgtctgcgccgtttatcttatttttccgctgcttagatctttattgattgagaggaactatctacctctgtaatgacattttattcgcctattaattagagtaataattgtactctattatcaatttgttattgtgtgcctcggctgactcctggacgagggttcacacacatgtaagcgtttggaattttggatagaaattccgggcgtgacaccggtgttactgtggacccccgtttttataacaggaatcaatcgtgtaaatagtaccatttccctggatcaagtagtctggtacacacgagttcatagctgaaataccaagtgcacatacacgagggtctagtgcgcattattacatcataggcttgcaggcatagtcttagaacataggaccgaatggtccggaatacattccaaaagcagaagtagataaggcagcggagttaaggcagcggcacgccgttgccataggcaacgaccataactaagacctactgagcgccatcgtcttcatcaccctcttggtagtaagcgtagggatcctccgaagcttcatcttcgacctctgattaagtttgtatattgcaagggtgagtaccaaccgtactcagcaagccaccacagcaacaatgcacatgatagggggtattcaagggatggctatggttcttttgcgcaaagtaagttttgtaattcttttcacaagcctaagacctagcatgactgatcaaatttttagtaccagtgttcatatcaaagaacgacggttctgtccaccatccattgtgatcccaaggatagcttcccgccattgagtcgtcatggttttctgaggacgaccaccttccctcctctcaggaagtggctccatcagcataaaaatcatcatgcaatattccatcccacacaaattaagaatttagagtctagccaagtgtaatacatgtctcggtgctcaataaccgcgagcacggctattcgaatagatttggtttactcacactgcagtggatgtacactttatccgcactccgcgactgcccaacacatgagcctcgtcccaacacatgagacgcgtcacggcaaagctttttgataacctcgcattggcagtacccactccataaactttacatcctcatgcactctaggcggaatacgatttctagcagtgagaggagttctggcgcacccgggaaaggaagactcacacatgcattaaggtataattatgtttagattctcacatggcagtcctaccgatggcgacaccactgtaggcacccgcctcgcggtcctaccaaaggctgccccaccgtagagcccctgcctcacatatcaagaaaccactatgcatggatactgcctccgctcatctatctactccgctaggtctatacccatacgagaagtgtggttgtacgggggtcgtttcatgcttaacctcatggctcggtccttaactgaccagggacggcactagccttttccagacaccacccaaatcctacatccgccccagttgaaaatagttgtttcattttattttcctttcaccaaatcatgtcatcactatcatggcaatgtggcgctcatgtctccatatgccgcatctcaattaccttcccaaaggtaattgcccaggcatatagcatttgataaatatgagtatgcatgattctagaatagcatttctaagcaattgtcataattgactagggactcatacataaacatggttacaaatatttaagggtaaacaataatcaaggcatggcataatcacaagtgggatgttcatcattgcatgcaattttatttgtaaacaaaataatttcgcaattgggatcaacatgttcaaagaatagtgatgacttgccttgctcgtagtcttgcgggtcttgatccttgctcggatccacaactccctcgggctctaaaattacgtacgaagaaatgatttgaattcaattagaattcaaataaaatccaaataaactcaaataaaagtcgaacgcgaatcgattactcctaagaatctccaaaataatctacgattatataaaactttgcaattctacggctaacaataatctacaattaaattctaattattttaaattttctaaacctccttaatctctctctaattttttatttatttttccttttctttttctctcttcttttctttatttttttctctctttttccctcttcttctttctttctttttctctccctcccggcttctcccttccctctcggttctctgcctacccgagcggcaacagcgaccaaacaggggggggagcggcggcttactgacgacggcggcggcaacggcgacgcaaggcggggcgacgcatggcgcggcgcggcggcaccgagggcggcggcgcagtggagaggaagagaggagaaaagaggggaatggggtgggggtatttataggggagagggggaagaaggagagggggtggccggcttaatggcgacacgatggcggtgcacggggctcggggtgacggcgacgcgcggcgatgcgacggcgcggggctcggggcggcgacgcgatgggcgggcggcagcaacgatgcgacgcgcgcggtggcacggggctcggcgcgacgggacgtgtggcccggcagcggcgcgagtgcgacggcgacgagacggccgcgcggcggcgcgtaggcgcgagggcgaagggcggcgatgcgacggcgagcggtgcgcggggcgcgagggcgacgggcatgcggcaggggcgcggggcgcgaggcggcaggcgcgcgacgggacgtcgggccggcgcggcagcggcgatggcgacggcgcgcggcggctcggggcgcgaggcgcgcgcggcagaggagggggcatggctaggaaacctcgtcgagcacctactgcgcaatgaacagtgctagctcctatttaaccctaatttagcctattccctatataaattttattctataaatcctaatttttgcacaaattaagtttactcaatatttgtgttatttcaaccaatggattcaccctggattaatattacccatattttatttttatataatttatttgaattttaattagggctaattcttattccatcgcacttaaatttaattattaccaatatggtcgcggtaatattctatttatttctatctcgcctaatctttattttaaattatatttcaattatttattttgccaatttatttttagggtttattcctaattgattattctttactcacgatcaatgaactccgaaatcaaatccaaataaaataggcgaataaaaccggcatgatgcaatttatttaaaaagtttttaaagatccgtatttttagggtttcgattttgtcggtcgaattttcagggtgttacagttactctatatttatcagaatcacacaagtacaatatttgggattgtctatctagccgtcgtcgatatggtggcacgaacaccaacacgtagtcgacgacggggtagtcttcctccttgaatataaactcgtcacgatgagagattgcactagatccctcttgttggtcttcacaggcaccagattggatctgtctaggctaatctctgatgtcgatatctggctttgtcttggcttgtgttggtctcctcccccttctttagggggtcttgtatttatacccatagatgtcccattgtccaaacataactacaaataccaatatggatacaatttgagtagtccatatagttttcatatagaactctacttgtccttacttatctggaactccttctatatacgagtaataattccatataagactgtatataatgggccccgccgagtttagtcgattactattgggtatgtggtatccataaccatgatatatacactgtttaacaaaatgaatagaccactaaaaaagttatagaagtaatttgcgaggactgtaaataaaataaaaaaatttgctccatgacactttgaggcatttgctctataaaacctactttttacagctttaccctaagatactctggttatacggttatctgtcaaaagacactccgataattaatttatatagagagataaaatcttttaaaaaaggttttacctttggacaacttgcaagctttaaatttcaaaattttggctgactttaaacattttatgcaaattaaaaattttcccaaataccggaaataaaaaacagttatttaaatccagaaaatattggtataaattttattttatctttttttttttgcaattgtcatttagacaatttgggacaacttttgaatttgcaaaaaaatttaaatattagctattatttgtttgaattcaattcatacgaatagtcaatctttttttcaaagttatatatgtctctattggaagatggtattggaatagggtctctttttttttaaacaatagcgtgcttgacaatacaccacaaccgaataatgttatagcaaataccatgaatctagagtatcctgaagtcaagagacctcaatcgtggttcctctcgtgcgtaaactctgctaatcccataggatcaatagccttgataaggacagattgagcatatataaggctatgtttagctcttagggttgggcattaatcccttgtacatgtaaaataaagcgacttgaacaacttttttatagaaaaaaaattgtaaaatacacaccgtttaacagtttataaaacgtgcttgcgggagagtggaggttacgaaaaataagaaacacacacagcctaatacatcatttaataataggcaacaactaggagctacaaatatcatgctcccttcagcttttaatatttgacgtagttgacttttgaatgtacctttaactattcatgtaatcgtgttatttaataattttgtgcaaatatgtaaaaatacgagtcatacttaaaagtacatttagtgaaaaaacaaatcacaacgaaaataatattacacatatattttaaaatttaatgacgttaaatattaaacataagagggagtactatatactccctccttatttcttattttaatgtatgacgacgttgactttttaaccaacgtttaaccattcgtcttattcaattttttttgtgcaaatataaaaatacttatgtcatacttaaaaaatatttgatgataaatgaagtcacaataaaataaatgataattacataaattttttgaataagacgaaaggtcaaacgtttatcaaaaagtcaacagcgtcatacattaaaatacggacggagtattatgtagtgtgtgcaaggcacatttctttacgtagaaacaaatcttgtttttcttatttcactcatcatcaatgtcaggcaaaattcacccccattatttacctttgtacatggcctaatacgattgttttgaatcgaaagaggttcaaataattacacttgactaaatgctagtagtagctatcatgttgatccagggatcgtggcttggggtggtttccatgagaatactctcgaccaacttgcattattcctcctttttcctctttcagacgattcagacaatgaaacggacgctacctacgggctatggcagcattgcatgcatgttgccaacttgccaaggaggcttgtactacttccgcagtatcttatcctaaaatgagttacttttttacctaccatattttctcaactaatcattaatattcttcaattaatttattcaacaatttttttctcaatcaaccataatctttccttcaattatttatacctatttccttaaaatttatgttcatattaaaaatacttacaattttgaaggaggaagcatccttttttagcccgattcccgaagctagctaccgtgttaattcgagctactccactatttagagcaggcacaataatagactataaatcagttataaacatattttaaagagataaaaaaaagagaaaagagcagcagactatagatatgtaaccagctgcagcacggattccaagacgtaatgtgtatatgccagttgggattatgtattaatagtgtagtaaacaattattatatgaattggctattatattggctatagatgatttagagctagtagttagctatactattaaacttatactattaaacttgctcttagcttcattccatcccactgcccccaaactgctgcatctacggcaaaaaatgctgcgacgctctttggtcgcccatgccgttctcctcttcgcggcggtcgcgctcccgctcgccgccgcccagccatggcctgtctgcggcaccagcggcggcaactacacggcggggagcacctacgagtccaacctcctgcgcctcgcgagcaccctccgcgcgaacgcctccgcctcccccaccctcttcgcctccggcgtccgcggcgtcggcccggacgccgtctacggcctcctgctctgccgcggcgacatgaacccctccgactgcttcgactgcggcaccaacgtctggagggacgcggggccaacctgcaaccgcaccaaggacgccatcctcgtctacaaccaatgctacgcccagttctccgacaggggcgacttcctcgccgccaccaacaactccggcgaggtgagcctcctcataagcggcaccaacatcaccagcaccgacgtcgccggctacgaccgcgcggtcaccgagctcctcaacgccaccgtgcggtacgcggtggagaactccacgaagctgttcgccacgggccagcgggtggggaacgacacggggttcagcaacatctactccatggcgcagtgctcgccggacctgtcgccggcgcagtgccggagctgcctcgacggcctcgtgggccagtggtggaagacgttcccgctcaacgggaagggggcgagggtcgccggcccgcgctgctacctgaggtccgagctgggccccttctacaccggtaatccgatggtgcggttgccggtcaaggccgacgagctcacgcaggtaagaataattcaggaagcaaaattctagtaattatcttgccgatagtgtcagttgcaatcatcatagctgtaatttccctctgtatctggaatgcacgtaagaagagaagattggcaaaagcagagcgtcaccccggaagtgagtcctctgcacacaattaggcataaattcttgttaaacattcttataccacgagcatccattaacagtttagtcaaaattatgcaaacttgccagctgatacaaatgaggactttgaaagtgtcaagtcaaccctgttatctctggcatcactgcaagtggcaacggataacttccacgaaagcaataagattggtgaggggggattcggtgccgtttataaggtatggcatgagtactcttaactttttaacttttgtatcattgttgatttctttgagaaaaagttgtgtgatttgatggtgtgaacccagaatatggtcaaaaatataaattctagatggctagaagtacgattgcactactgctcaattgttaattaatcacaaattgtggtgtacttctcttcttgaagtatatcgcagaggtttggtgcactactgctccagcccttggttttagataaaaaaaaaatgtgacgtcccagaataattagaggaaataataataaagcaggacgagaccttagtccttgggcctccagcagtagtagagcaattggcccggttgaccttgggccttcttgacccccaggacgagcagcggcagttgggctaggcaagctagctagctagctggcagatcacacgcagcagcaagccagcaacagcacatcagaaatgttccatatgctgccaaataggattaaatgatcagccaccctaaatctaaatcaaaagacaacatccacgcaaactccaagtaaaacgtgagagtattatagatattactatttgaacattatatgtgatatagtggatatgttgccaataaaagacataaataaaattagaagtagtagtcacatctattataacacttgctcttagtttcaacttaggagtttaagctgatccatgactataatattggtttaaacttattgcgtgaagcgagaacgtaaaacatgatagtgttacagtgtagggtgtattccatttagatgagtcgggtctaaaatcgtttttatctagtcgggcctagaattattttgggctataagcgttatatagtaaaatatatgcatgtgtgtagtctaactaaataagttgagcctagctataaccttttttttttcataatggacgttacaaaaagcaagaaaatatgaatgtctggttgttaaacttattaaaaagtcatctgagtccataaaattacaaaatacacatctctatccataactcttggtttaacgtatcacatgggttccaaagcgcacctataaatatttaagaccaaatttggtcaaaatttcaaattttgtatcatcaataattccttaaatgattaattagtttaaaggattggtatatattgatttgccttaaaattactactctcgtgatattataaatttactagtactaatataaaataaatggtccaaaatacaaaagttgatcgaaacttatcctaaatatcaaatatttatatccaggaggagtaagatactaagccaagtagttaaattattcagggaattcttcatggacaagaagtggctgtgaagaggatggccaagggctccaaccaggggctggaagagctgaaaaacgagctagttcttgtcgccaaacttcatcacagaaatcttgttcgtcttgttggtttttgccttgacgagggggagagattactcatctatgagtacatgtccaataaaagcctagacacctttctttttggtactattagcattaccctttttaacctacatattttgtcttttcactccatcaataacaatttttttcttttggtaattagatgcagagcaaaagagaaaactagactgggcggtaagatttaagataatagaaggcattgcccgggggctacaatatcttcatcaggactcccaaaagaagatcgtccaccgtgatatgaaggcgagcaacattttactagacgcagacatgaaccccaagattggggactttggccttgctaggctctttgggcaggatcagactcgagaagtcacaagccgtatcgccgggacattgtaattaagtcgaaggaacactcattatttttcgctcatatatagataacaaactaaaatgcaattcttctttgatgcagcggttacatgcctcctgagtacgtgctgcgcggacagtactctacgaaatcagacgtgttcagctttggcattcttgtcatagagatcgtgacaggccggagaaggaatagcgggccatatttgtctgagcagaacgatgaagatatattgagcatagtgagcatccctactaattcattgaggaatacatgcctattgtaattactgctgactaaacacatatgtgtgactaatgttgctaggtacggaggcactgggaagagggagcaattgcagagatgattgatcattccttaggaagaaactacagtgagaccgaggtgctgaaatgtgtcaatattggactcttgtgcgtccagcaaaaccctgtagatcgacctacaatggcggatgtcatgattttactcaatagtgacactacttgcactatgccagctcttgcacctaggccagcatatttgatcgatgggacctctggttactcccagaccgtaacacaatggtccggcaggtagcagggggccgaagcagatctagcaccgttgttggcttgttgctgcttgctttgttttatattgtaagtgtatcagttctcaatttgtattccatgataaccaagttcaactaataaagagtaaatatataccattgaccagtttgtctcgctcaatgtttatcatcgagtttgtgtccatccatgacatattccaattacatgctactagttattactccctccattcctaaatgtttgacgccgttgacttttttaaacatatttgaccgttcgtcttatttaaaaaaattaagtaattattaattctttttatatcatttgattcattgttaaatatatttttatgtatacatatagttttacatatttcacaaaagtttttaaataagacgaatggtcaaacatgtttaaaaaagtcaacggtgtcaaacatttagggaagtagggagtacaatataattacgttatactccttataaaatatagtagtggtggtgatgattttgtcaccacctacttttgcgggaagaaaaaaaaaagtggagctaagagcatcactaatagaatgtgtaaattcaatcttcaaaattctgaatttgggaatcctaaatgaaatttgataagttacagaagtgatccttccaatagattgtgtaaaattgactctctaaaatagaaaagtggaccgcatagtaaactatcaactaaaaaaaatcagttatatattcctcctccttccgcgacggcgaaggcaccatcacatcgattgttgtttacaaatacacgagtaatccaggtcgagcatgtttaactcaaaagaatcagttaattacgcacatcaatttacggagagatgggcatgatcatcagatcatggaggaagaaagaagtctagactctacgacgcaacgacgtgttcgtcgaggcccccgatctgtttctctcatacacgatcgggtgctacttcggcgcctcgatcaccttgattaattgtgcgctagctgccgcttcgcgtcctctgcttcttgatacacttcgcggagcttgcgctttgcagcgatcatggccttctcgtcggtactgcacgacgacgtggcactctcgcggcggctcatgttggccgtcctcttgggcggcgatggctgcaggattttggcgtgatggtcgtcggtctcatcgggttccagcacctgagagagcttctccatgacggctgcagacttgaggagctcgtccttcacggatgccctccacccacggacaaaaacatttcgcccctcgcccgggaacgggaggagagaggcgggagcgtgagattgggagtggtagaggcgagatcgtgcgccctcatatcaaccgagctaggatttgggagatggaactccagaactggatttttcaccttttagttcttttgaaaaaaaacttattctacaaataaatccttaaaataacttattttagaaatggtgcttttcgcggcgccaatgtagttggtgccgtggtccaacatgacagcaccaaggacgttggcgccgtcctctccaccctcgggtgaaagctaagtcactaatgtgaaggagaacggcaccaccaacattggtgtcgaggaaatttgcaaaaaagaaaagaaaagaaaaaggacctagttgtaataaaaagtgactcatttgtaaataaaaagaactcggaaacttcggcaggagagtagcggatccgttggagctgtgttttggactaaaatctctcaaattcaattttcgaaatgaaatactctctccgtcccataatataagggattttgactttttgcttgcattgtttaaccattcgtcttattcaaaaaattttagaattattatttattttatttgtgatttactttattatccaaagtactttaagcataactttttgttttttatatttacacaaattttttgaataagacgagtggtcaaacagtacaagcagaaagtcaaaatcctttattatataggataataagacggagggagtaggtggatagttggtgatgctctaacaagattcacatataagtaacaaatacgtacaacaattaagagataataataacatattaataaaaattttctttaattggaaacccgttgccatgcacaggcaatatgctagtatactagagtaatatttgaaagattttaacaaaaactgtcggaatgttatatagtttctcccttccacaggcaccatgcaggcaggccggcggttggtgatcatatactcatatcatgtcatgtccttttgctcctcaccgtgctcgtacgtacgtgctgcccgacgctgatcacaccggccgagccgaacgtgctgggatgcgcgcgcggaggacaccggcacatacgtgccatcgcctcaccgcgcgctcatgtaggagttatatgttgggtgccggccggcccgcatcgacgagagaggcggccatgcatgcgtgcgtgcgcgcgcgtgtgccgcgcgcgacccgcgaccttgctgcctctctccagtccaaatatagtccagtgactgattcgtcgcgctgcgcgtgctctcctgactgaaaataggcgtatattggcaaatcctaccctttattagccgaaaacctggcacggggtcatagttgaatcacgacgtacagcgcgcgtggttacacgcctccaagtttgaacgtatacgtacggtaaaaagtggaacggtttacacatagccatgcaccgatttttctcgatatcattccatacgcgaccgcaacagtcattttgagttagaaatgggtcaagtttcatttgactaattaagcgatatatagcatgcgtgttccttttttaaggcagggtgcaaacagctgctacagagaggtttccgtgatgtcgacgaatatataattagtccctgtcccacgtgccatttgacatccaccagacgggttcactgaattcagtctgacctgtcggcctcggccaatcggccatcgcatggcaattgccaagttgacaacttgtcaagagccatcacttccaaaagtataggtagtactgtactaaaagcttgtaaaaaagagaaaaaaaacaagaagatatgatacggagatggattctaatagctcgagtggacgtccacccgtttattgcatgtcaattagatggttacgaaaaattttcaaaaaaactaacaagacagatcaatatataatatattactccaacgaacatgcaaattcaaattcaacttctacaagttgtaacaaaaataacaaatttaattgtaaacatacctataataatttgagttttttttgttatttttattacaatttgtaaaagttaaattttaatttgcatgtttgtggattgatatattacatattgatctatcttattcatatttttttaatttttttatattcatctagataacatgcaataaatgggtggacgtccactggctattaaaacagtttaccgatatgatactgcagtagtggagtaggtaccattagcagaggattgcaaatttgcaattgcaatgcaaagcccgacgatcgaacaagcttgctctgacggcgccatgcggcggcgctcctctgtcctccatgccgttctcctcctcctcctcgtcgcggcggtcgcgctcccgctcgccgccgcccagccatggcctgtctgcggcaccagcggcggcaactacacggcggggagcacctacgagtccaacctcctgcgcctcgcgagcaccctccgcgcgaacgccttcggcttccccaccctcttcgcctccggcgttcgcggcgccggcccggacgccgtctacggcctcctgctctgccgcggcgacatgaacccctccgactgcttcgactgcggcaccagggtcggcgacgacgtcgcccaggcctgcaaccgcaccaaggacgccatcctcgtctacaaccagtgctacgcccagttctcggacaccggcgactttctcgccggcaccaacaacttccggcgcgtacagcctcctcataagcggcaccaacatcagcagcgccgacgtcgccggctacgaccgcgcggtcaccgagctcctcaacgccaccgtgcggtacgcggtggagaactccacgaggctgttcgccacgggccagcgggtgggcgccgacccggggttccgtaacatctactccatggcgcagtgctcgccggacctgtcgccggcgcagtgccggagctgcctcgacggcctcgtgggccagtggtggacggggttcttgttcccgcggaacggcgagggcgcgagggtcgccggcccccggtgctacctgaggtccgagctcggctccgggttctacaccggagctccgatggttctgctgcgagccgacgggctctcaccggcgtcggcgccggcgccggatgttgttccggccactacgttaggtgagcagcataccaattactctacccatcaaagtgatcacgtcacgtctcttcagtcttcacgtcatctgcacctaatgtttactcatctccgatgcttgaactgattatttttcactgaaatatgcagttaagaagaattcagcaagcaaaattctgctaattgtcttgccgatagtagcagttgcaatcgtagctgcaatttctgtctgcatgtggactgttcggaagaagagcagagcgacaaaagcagagcatttgtccgaacgtgagtcctctgcacaaatacaatatggcatcggattgtttacaaaccccacttaaaattcttaatcatcagtatgaattgattgttctatcgaatccatgcaaatttttgcagttgatgcatctgaggaccttgaaagtgtcaagtcaaccttgctaactctgggatcactgcaagtagcaacggataacttcgacgaaagcaagaaactcggcgaaggaggatttggtgcagtgtataaggtatgccagtagtctttatgtgtaacttttgagtcattgctgacttctttttcaaaaataattgttgatttgatggtgcgagtcaagcatggtcaaaagctcaaaatatgaatatctaaaagtttttctccattgatgatgatgatgatttttattttctacaaaagatctttcgatctttctttattagaaacaccaataattgtaaactattttacagcactcaggtttttaaaccattacaaaatacagtatatcaatgaaaagtaaaaaatatgcaggggcatctttttggacaagaagtagcagtgaaaaggatggcaaaaggttcaaatcaggggctagaagagctgaaaaatgagctagttcttgtcaccaaacttcatcacaaaaatcttgttcgtcttgtgggtttttgcctggaagatggagagaggttgcttgtctatgagtatatgcccaataaaagtctcgacacatttcttttcggtaatattaacacctcctttcagtatatatggtcatgcacttctttctcatgtgatggtgtgcaacaattacaatgatgtcttcatttggggctaattagacgtggagcaacgaagacaactagattgggcaacacgatttaggatcatagaaggcgtcgctcgtggattgcagtatcttcatcaagactcccagaagaagattgttcaccgcgacatgaaggcaagcaacgtcttgctagatgcagacttgaaccccaagattggggactttggccttgctaggctcttcgggcaagaccaaactcgggacgtcacgaaccgtatcgttgggacattgtaattaagcagaacacttgaagcttatgtgccaatatttcacttaaaaactacgtactaacatgcaatttcattcttactgcatgcagtggatacatggctcctgagtatgtgattcgcgggcaatactctacgaaatcagacgtgtttagttttggcattctcatcttagagattgtgacagggcaaagaaacagtgggccctattttgcagagcaaaacgaagatttagtaagcctagtgagtatcccttctaattcctacaaatcaatacactaatattgcttatgtttccagaaaaccactcatatgtaccatctatattactgataactggagatctatatataactaatgctaggtatggaggcactggacagagggaaatattgtagagatggtagactattccttggacagaaactaccctgaagccgaggtgctgaaatgtgtcaacatcggcctcctgtgtgtccagcagaacccagtagatcgacctacaatggcggatgtcatgattttgctgttaatttatagtcatgattagttataaacaaggtgacaccaatgaggtaaatcaagaaactgttgccaaatttcaccgttaacagaaactcatgaggtcaaacccgtctattcaaaagctattattaggccttgttaaatgggcttcaatccagctcaccaacatttgtaggccggtaatttgaactaaagttcaatgcatgcaccagaatctgtcaagattatgacccatccaatagaggtttaacatgatggattgagaaattatcctctgaaacaagaccatcaatgggaacacaaaatgggcttatggcgttgtatgacacattttcacgcagctgcgcaaggcatgagtctatagtgtgacttaacgagaacgaaaaacctatcgagcgatcgatcgcgaggggcgatcggttcccctcccccccacgcagtttccatttttggcaccgctttactttcctcttttagtaagtttatacacctaaagtttacacatctaaaatttatccacctaaagtttgtagagcgaatatttatgcgtcaaaagtttatatacccgattcaaatttaaattcggattcaaatattttatatatagaatatttctatacgtaaagtttatgtgtgcattatttttctcttttagtaagtttatacacctaaagtttacacatctaaaatttatccatctaaagtttgtagagcgaatgtttataagttaaaagtttatatacccaatccaaattcaaattcggattcaaatattttatatatagaatatttctatatataaaatttatgcgtgcaaagtttacggtataaagtctatgcacatgaatgagagtattaattttttttctattttttttactaactttgtttttttaaaaaaatatatgatgaaaagagagaagggagaggagtataggggaggggcgggtcccattaggggcgcccgagaaggaagaccagacaagcaattatattgttaaacagtaacctcgagattagggtaggtaccagtcttccaagctaacatattgtttttctttgtaaatacttgtttagcttaaaaaagtgcatgcacgcctattacaacctgctaatcattaattgcgaatttcaaacttaagttagtgaagtagttaagtgaagatttgcatatgttacatatttatatttggattcgtagtactaggcatgtatattttgagatgggtggagtaatttataatttaattattattaaattagggatttgctacccatctacctgctattgtttttggttttgtaagccgaatttgtggccgctagatcactccaagatttgtgttgatttggctcaccaagataacctttgatgtaccttgttcatacgcctacattactcgcgagggggggggggggggggacacgcaccaatccccccttcctatttaaaactctactctcctcttcccttcctcctcctcacctttttttttctctgtctaggtacattccatagcttcgtttcgtgagatcaatcgattgagctagatgttagctgcaggagaaaggtttctaggttgtagaggagtagcgtgagggtgaggaggttgtggatgaggtaggcattgtgacggggagggtggagctgaagcggatcgagaacaagatcaacagacaggtgaccttttccaagcacaagaatggtctggtcaagaaggcgtacgagctcgtcgtgctctacgatgccgaggtcatgctccaccttctacatccgaggcaagctcaacgattttgctggttggggtcctagtatgtgcggctatgcgtgcgaacatgttgacaataatcccattctaaaatgttttgtagccatgcatgtagatgcatattgagtcaatgttgttatgctagcttttttccaaactttaaatgtggctagatatattatgtcgtcaataaataacaccagaattttgtggactagttttgttaggacctgaacataataaacaagaatagtcactagacgggaaactatatattttaatccctcgaggggacatcgttatttgcatgttactcaaatggttacgaaaaaaattggaaaaaattaagaagatgtattaacatgtgatataacactccacaaacatataagttcaaattcaacttttatatctcgtaacgaaaaaaacaaattaaacaacatctagttaacgtatatttacagtcaaatttgttttttcgcctattttgttagctaaaccaaatatcttaatgtcagttttgtcagtgcttggtggtcagttttgttaaagttttagtttcgactgaatttgtataagccaaggagcaatttggtcaacagttagttttgtcagcaattagtacctgattttgttagttttgtctgaattcatatataactaaatgcagttttgttagcagctagtttaatcaataattaattagttcatggtgttgttagttttgttggctactaaatatgacttgatctaattttgtcagcagttagttttgtgaatttaaaacttggttcagcttggttcaacttgaccaacttgaccttggaaggggtccccttgggatccttttgtaaccttgcttgtacaagctcggtttccctctcttctccttttatgaaataggcagagctcctgcttttacccctcaaaaaaaaacttggttcagctagctctagtaatttcatggaagctagttaattgacttcttgatttgattatatttttgtgagcaatcggtatctagttttgttagtttgtcagctagctagttttgtctgaattctactaatagtaattaggtcaataagccatttcaatcaaatacaagttgtcaagctgatctgcccatttcactagttcaaattcctgcagttgatttgtattccctgctttagtatatagatttatcagttacatatatatgtcaacatttcatacacgtaggtagtatagatttattttattttattttagtgtagggttgtaatcttgtaattttttttcctgctatatcaatatgaactttgcactgtctagtgcgagctgtaaaaaataaaagaaatagcggctatgagttcgttcccaagatactgttaatctcgacgaccaacttgaataattccatttccctttttcttcgttcaaacgatgaaacacgtctgcatgcacataagtacacacgtacctaatggtgatcagagaattcagtctatatggactatgcatggcatgcccaacttgccaaagacgagatcaatatccttctttttttttgacgcgatcgaatatcctttttaaggggatgcaccccgtgttagttttatactgccatctatcccacgcccctagctagctgcatcctagctctatcggcgcaatgttgcgacgccgacgctcgtctgtcgtccatgccgttctcttcttcgcggcggtcgcgctcctcgagtcgctggccgcccagccgtggccgaaatgcggcaacggcggcacgttcacagcagggagcacctacgaaaccaacctcaagaacctcgcgctcatcctccgcacgaacgcctcctcggggtcctcgcccaccctcttcgcctccggcgccctcggctccgccccggacaccgtctacggcctcttgctctgccgcggcgacctgagctcctccgactgcgccggctgtggcaccaacgtctcgagggacgcggtcgcggggccgacctgcaaccgcaccaaggacgccatcctcgtctacaacgaatgctacgcccagttctccgacaagggcgacttcctcgccgccaccgacaactccggcgagtacagcgccctccaaagcggcaccaacatcagcagcaccgacgtcgcgggctacgaccgcgcggtcaccgagctcctcaacgccaccgtgcagtacgcggtggagaactccacgaggctgttcgccacgggccagcgggtgggcaccgacccggggttccgtaacatctactccatggcgcagtgctcgccggacctgtcgccggggcagtgccggagctgcctcgacggcctcgtggaccagtggtggaaggggttcttgttcccgcggaacggcgaaggcgcgagggtctccggcccgcgctgctccctgaggtccgagctggggccgggccccttctataccggcagaccgatggtgctgttgccggtcaaggccgacgggctcacgccggcgccggatgttgtgcctgccattacgggaggtgattaattaaactacagtattatacttcctcgtctcgctcatgctgtcccatatttttcccgggtaattttgcacggggcttgattttaactgttaacttaaatttgatttatactcctcttagtttatgttacatatataaagggagaatagccaatatgatccctaaaattttgctcctagatcattttagtccttaatatttcatagtgtccaaacaagtcctttaaatttgtcacgtgggctaatattgttcttggtcctaccaaaatcactatatggacatgccatgtcaccctcctatgtaaaatctatatgatttgtctaatttactcttacgtatatcatagaaaaattagaaaaaaggaaaaaagttaaaaatatatatatggtatatgtaagagtaaaaatatacgtaaaagggtgaaaaaaatgggaaaagtatttgttcctatggttatgtctaattcacccttacattctttttctatgatatacgtaaaagtaaattgggtaattcatcatagattttgcatgaatgatgacatggcatatccatataatgattttttggacccaaggattattctaagccttatgaaaaagtttaagggttttttagaccattaaaaggttagggactaaactaatcctacattgaaactttatggactatagtagctattctcccttacataaatatgattatattacatatgcaactagcgtacagtctgtgtgttgcaacggttttcttttaaaaaaagagcaattttacggtacttgagaaggtaccatgaggtacccttttttctattgtaaatttggattctctcggtacctaggtactatgaggtaccatgaggtaccaaattttacactaaatttttggtacctcatggtacctcctcaaagaccgtagtgtattgtatatatttttaaagccttaaaaaactatttctaccgtgtaatatatcaaggagcgatgaaaattttatattgaaggaattcgattattttttaggttttctctcactttttgcgtgcacatattgttgttggtggtgggtatcttttactttatgtttttgtatatacaaattaatttatatacaactattgtcgatccatttataccatttatagtcaaaattcttttcttttcttttcttttctcatgagatagatagatagattgatggattattatcaagcgaaaaaataactaaaatttgttcactgagcagcagctagaagcatagaactgtattattgtgtaatccgtttcatatttagttcttcacgtacttgaactcattatttttcactgcaaaaatgcaggtaagaataattcagcaagcaaaattctggtaattaccttgccgacagtgacagttgccatcgtagctgcaatttccctttgtatctggaatgtgcgtaagaagagaagattggcaaaagcagactccagacgtgagtccctgcacataattttggcataaatattaacattcttatacactggcgtccgttaacatttcgtcaaattcatgcaaatttggcagctgatagaaccgaggattttgaaagtgtcaagtcagcactgttatctctgacatcactgcaagtggcaaccgataacttccacaaaagcaagaagattggtgaggggggattcggtgaagtttataaggtaataggccagtagtctttacgtctacttctgaatcattgttgatttcttttgagaaaaatgtgtcgatttgatggtgtgaattgactatggtcaaaatataaattctaaattaaagttgtgtttagttgagcacaaagtttggattttggttgaaattgaaaatgatgtgactgaaaagttgtgtatgtatgacaggttgatgtgatggaaaaggactgaagtttggatccaaactttggatctaaacacagcctaatactcccttcgtccctaaatatttgatgacattgattttttttaaacatgttggaccgttcgtcttattcaaaaacttctatgaatattattaaaaacttaagtagtagtagtatatgtaacaatgaatcaaatgataggaaaataattaataattacctaaattttttgagtaagacgaatccggtcaaataacggcgtcaaatatttatggacgaagggagtacctagaagtatgaatgcactactgctcaattgtgagtgagtcgcaaattttgtgttctcttgaaacaaatggcgaagctcctgcctcttgtttagaaaaactattagtgcaggttagttattgtattttattaatagtgaaaatatattacatcctcgactttagccatataatacataggtaacaagttaacttgaaaaagacataggtgatgggacaaatcctcaaatacctttggaagaaaaccaattgatagacttaaaaagacacataaattctagcaaaaagtaagcctatatgtattacgccacccatagaaagtaaaagacctttggtaactaactctaagaatatagcataatatactgctcctcccatcgtaataacatagaccaacatttggatcagttggacgataagaagataacctgcattgcagagttagacatcatttttctgttataaaaatcttttatcattttttttcaatgccaaattgatgaatttcaagtgtctaggcactccccgaagcgagttactatttttttttgggcacctcaggaggaggcatattgtaaggaaaagaacacattgtcgtgcaaaatgagcaacatggcaataaaaataggtcttgaattgtttcttgcacattgtagacactatattgcttgtctcctctccaattccttttatgaaggttatctttcattaagattgctttttctataaagaaatcacatagaaactttgattttttatagtaacctttaaaattagttatgttatattattatatttttaacccattacaaaattttgtatttctgttcatgtctccatgtataagttagtaagaaagtaagatactaagctaaattatttagggagttctttccgggcaagaagtggccgtgaagaggatggccaaggactctcaccaggggctacaagagctgaaaaatgagctaattcttgttgccaaacttcatcacaagaatcttgttcgtctcattggtttttgcctcgaaaaaggggagagactgctcgtctatgagtatatgccaaacaaaagcctcgacacccatctttttggtactattagcattatctttgatcatttgttactcctgtaatcatttcactccaccaataatagtgacattttttttacatttggtgaaaaaagacacagagcaaaggaaacagctagactgggccacacgatttaagatcatagaaggtaccgctcggggactccaatatcttcacgaggactctcagaagaagatcatccaccgtgatatgaaggcaagcaatattttgctggacgctgacatgaaccctaagattggggactttggcctcgctaagctcttcgcgcaggaccagactcgagaagtcacgagccgcattgctgggacattgtaattaagttgatggaatacttcatatttttgtgcttatattaactaacaaactaatgaaatacaatcctccttgctgatgcagcggttacatatctcctgaatacgtgatgtgcgggcagtactctacgaaatcagacgtgttcagcttcggcattctcgtaatagagatcgtgacaggccaaagaaggaacagtgggccatatttctctgagcaaaatggtgtagatatattgagcatagtgagtatccccggtagttcacataggaattcatgatattgctttgcattgcaatatttgcatatttgtggatagctgcacatgtctatcgtaattactgctgactgctgaagacatacatatttgtgactattgctaggtatggaggcactgggaagaggggacaacagcagagatgatcgaccattccttgggaagaaactacaatgaggctgaggtggtaaaatgcatcaacatcggactcctatgtgcccagcaaaaccctgtagatagacctacaatggtggatgtcatggttttgcttaacagcgacgctacttgccctctaccggttcctgcacctaggccaacatcttcgattgatggaagctctggttactcaacaggttactcaacataatggtctggttggtagctgggagctagatttgtcaccgatgttgttgctttctgttgtttcatattgaaactattcattctcgatttgcaatccgtagcatccaacttcaattaatgaagagtttcgggggactattactcctcaggggttatatatagtttaactagttgataccccgtgctttgttgcgggatatgtgaatgaatgcatgttatacattataaaaatggtaaatgtatatgtttaaataatgtgaaaatgatgagtagataataatttgccattgcttgtatattgagttctaataatacagcaaaattgtaaatgatacgtaatgtttgcatgatatttaaaatactctagataataattgctagtgtgggtgatgatgtcgcacacttgcatgatgagttttaggagttaatgggcatcaattttatagtaagaaaggattaatgaaaagtgtccacattgggagattcctatcccattcaatctctcaggcagctcgctccatgcttttcgtctcaactccttctctcctctttatgtgttaaagattgggttcagagatagccctttccattgtgaaatcaagttgttagattcaacctatatgatgaacaaatagtcaaaagtgagtgttttagaaattatggtgaatactgttttcgcgggtaaacagtgcagggtggcactaggttgccggtcagatcggcagattccgtggggagttggtttcggattgttttcgtggaatttctatgttacttcatgtttatgacttctagattgtttctatatgtatgtaatattgtttgtgtgttgatgtcagtcaatttagtgtgaacttgtactcaaatatggtatttctttgttagttcatgtgcaaatattgcttgaggccataggagtatagccagtgatagattaggactaggcttgggagaagctgagatccaaacaatcaaggatatcacgcgggatgtctaggctagagaacaatgcacgtggagatgaaagtttccatatatcatacacgaggtgttgtgcaagtatagaaagagtagtcaaatttggattggaatccaagtttggaaagattagagtgtggagttgtacggggatgttgtttctctggtttcttagatttcctatgtgattagaagtctagttctagttggattcctagttaggggcattcacgttatggtataaataaatagggcatatttgtcacttgtttgatccagtattgtgaatttcctattatgggttaattggatcatagcattacaaatttgtctgtttggaaatatgctattataattcatctaattgaaaagatgccattgcaatacttctaaaatctggttcatgccattttatacgcttgagatgggttttgaattgtttttatatattgtattttcgtatggaccaaactaccgttggtcttcagtcttcacagcttaaaatcatccccaaatgtagctccaaaccctagccgagcgagcgagcagtggcgatagcagagcaagcggcggtggcggcggaggctccggcaccggcaccgagggctttcgctgtggcgacgcaacaagctgcagcggtgaagcaagcaacggcgacgacggagccagcagggcctcggcatcacgcacaaagcaagtggcagcggcgctggcagcggagcaagcagcggcggggcaccgagggcttcggcagtggcgacgcaccacaagcagcggcagcggtgaaggaaacggcggcggcggagacggcggcagcggcaacgctggccgcggagaaagcagcaacggtcgcatcgacgacgaagcaaacagaaggtggcggaggcgagctagtcctagtcgcagcgcgacaagttcttggagacaacggcgagctccagtggcattttcctttcctttttcccttttttttctcctctctgtatttttttcaggatcaaatactgcatatcgattctgaatttttttttaacatcagcgatttcagtttatttatttgaaatattgtggttcaaatctgtttttttcattgcactggcacgagcgatttcaatcttgatttgaaatgctgtgggtcgtatggtgatttatttttacggtgcttgagtggtaggataaggggtagtttggtctgtacgaaaatacaatagacaaaaaccgattcaaaacccatctcaaacgtatagaatggcatgtatccgattttagaagtattgcaatggcatccttccaattagataaattataatggtatattttaaaacagataaatttataatggtataaatctaattaacccttataaaatatgtaactaacaaattagactaacaccgttagaaggctggttttcagaaagaataggataaggatacccctgcacacaaaaattcaagattgacatcatatttgccataaaaagcttacatattgatttgccctccaaaactgatatggtcaaatgagattcaactctaacaataattgtcaagaagccgaaccattcctacaacataagcaaaataaataaataaataacggtattgctaaaaatatgtcgccacaaattacgatagatttcagttggttgtttcaaccgtcggatgcagaaatcgcacgtgtacacatatccctccgattttgttctcttctgatctcttctgttgctttaatgttagtatttgctaagtaggattactaattaatcttaaaaactaaatattggtgtcatcacaaatttatagttttgggaattacatcaacttacacatgtaattttgagaattacatatgtaattttaggacttacatatgtaattttggaatttacattgtaaatacactaaaattacatatgtaatttagtgacttacaatgtaaatacatagcgactattttttaataaaaaatatggcgccataaatatagctactcccataaataaatgttctagctagtagatcaagaaggatcggttcagaacccacataaaaatgcataataaactagctagggggtcgcaagcattttcgatgtggagtatgtaatgttccatgttgctcctgctgttgccttgttgctcctgacgcgtgctgctgctgccgccgcccggctgttgctcttaacgccgccggcagctgctgctcccttgccgccgccacctcctgccgcctgctgctatactgccctgccgccgctgttgagggggtttggggacccattttttgggttgatttgctcttgatgtggagaaagtgacgaggggatttggggattagggttcctagagagaggagctgattcttcacggtggagtgaagagcactgatcagaacagatgggcagtgagggggatcatgttttttctttgttatgaattattttcgtccgtttatttgaactaaatcaaacggcagtggcaaatcgaaggagcacaaaccaagtgttttagatgcactttctaaacacatattgatgcatataaagtcaatatactttcaagagtttcgccgttttgtttttttcttgatcctgacggtctaactggagtacaacggacggttggactggcggcggtagcaacaacatcatcaagcagacaaggagatcgacaggcggtctgaccgacgacgtcatcacaacgatctgaccggtgcaacttcgtaaagtttgagggtaatcttttaattttgcaagaagaattgattttggtgtttctaccatacaaccgcctccggttggcttggttcttatattcgaaccaaccaatattttgctaacattttgtccggttgtcccagtaaagagcaaatatctattccttaccattgtattattttgatttgttcaaaaaattttcatccagttcgtctccaagttacaatgtactactgatttatcaattgcttctactccatgacatattgacaatggattggatagtttttaaaagggttaattggatccatgttactgcaactttgcgaaattaaaaaaatgccactactattcatcatatcggccacatgccactggaaatttctataattaaaactatgccactcccgtccctttttccgtctcctctctcacgccgtctccgttgccgtcctcatcccctccctccttcctcatttccgttcctgacttcatccccctctccggcgagcggtagagcttgaggagggagttggtaacgacagggtcccgttcctgcgcacgccttccctttccctctccgtcgccgacacggtctcctcctccccgccactacatattcctcttgctggtgaacttccattgcacgcgcacaagcacagtcatcacagacttcggcgatctccatggctccatcaggtggggtgcgcgagcgcatcgcacttgaatgcatgctcgtgggcgaggcgcgcaaagcctgtggatggggaaggggcgggaaagacgacgacgcgagggcggcgaggaggagggagaaggtgaacggggtgggcggcgaggcctcgcggatgcggtagtagagggcgagggaggcgaccgcgggcgcacagcgctgggacagcgcggcgtggagcgggcagcctcgggagggggccgacgagaaggcaccggcagaggaggaggaaggtgggctccggagccaaaggagcaggcagcggaggcggtgtgggagctcgggcatggcgggagggagccgccaccgtcgttgtcctctatccgtgacaggaggtctcgggagctgccgccgtcgccgtcctcgacaccatccacggcgggagtgctcgggagccactgccaccactgccgtcatcaccgctgtcctctttgcagtcgcagggatggaggaatagatggtgaagaaagaggagggagatggaaacgattaaacatgggggaacgagatagtgaaaaagtgatgggagtggcatgtttttaaaataaaaggaaaataaaaccgctccctttgccgtatgtgggagttcaaaaaaacttccactaattaaaaacatgccactcccagtatccttttattttgtttttggctctaattaattcaccctaaggtagcactatctttctttttctaatatacgacaccattgactttttgtttacatttgatcatttgttttattaaaagaatttataaatataaaaatatttaagtcatgtttaaagaatatttgatggtaaatcaagttataatgaaataaatgataattatatattttttaggagtagttttttttaaaaagacaaatgatcaaacgtatatcaataaatcgatggcgttatatattaaaaacggaggaagtataaaaagaatctatccatcagacgcacgatgcccaaataatcggacggtcaaatattccagttgaccaacgagcgaaacatcaagttataatgatgaaaaaaccatcaattggaacatttaaaagttatatgaaacttggtaaagatatacgttgaaacatgtcgctgtcacatatgaaacaactagtattaacggattgaagcatacgtttttctttcattaaaatataatcatgtgatatcttattgtaaagatttaattacaacgaatacaacggtgtaatcagatcgtagattggataattagtttaggagaaaaatcattttgaagctcaatagaatgtgcatgtatggataagatggagagagagtagtggtaggtagtttcgggaattttgtaaaatacactgaagacacatacgggtatatatcactatcacgtataaaacattaggttctgacaattttaaatatatatattttttattataatataataatgcgatatcttgttataaagatttaattacaacaatacaatgatataatcggataagcggttaatgagaaaaaaacattttaaatcttgagtagtacactggtcagtctgagcgttcgataaaattttgtgaaatcggtagaccgatcagtagattttcgggaagtatatgatcgacattcttcatgcaagttgccgcgcgactgcctttttcatggggcccgaccgcgcgaaggtgcaagcactcccgtgaccaataatccattgctcctaaattttactccctccgtatttcaatgacaatgttgactttttgacaaacgtttaacctttcgtcttattcaaaaactttatataattataatttattttattgtgacttgatttatcatcaaatgttctttaagcatgatataagtatttttatatttgcataaaatttttaaataagacgagttgtcaaacgttggttaaaaagtcaatggcgttatacattaaaatatggagggagtattaattatatattgagttctacaagtatcttgtttaatactccgtacattttaggagctaattaaacatgtcgaaacagcggctacggggaggtttcccttgagactagtcacgatcagctttgtttatttccattccccttttcctttcagcaactgttatctatcatatcaactgcgtccatgcatgcacgtgggttttgacaagtaagtaagcgaaagtaatttcattttatgcatatcatataaatagttaaaaaaaatttaaaaacatttgataacattgattaatacgaaatatatcactccacaaacatacgaacttaaattcaattaatttctataagttctaaaaaaatacagtaacaaatatagctgcgaatgtacgataattattttcagtttaattttttttacaacttgtagaagttgaatttggttttacatatttgtggagtgatatattttatattagtatatgttgtcaatttttttagaaaaatttaataactatttacttcagatgacatataaacaactagagtaagtaacggggttcagtgaattcagtctgacctgtggtggggccatcgcatgccaagttggccacttgcccagagctgtcacatccaaaatgatacgcattccagctcaaaaactcaaaacgaatgctgtgccattgctacatcgatcgagcttactagctttccatcatcccaccactgcctctgctaagctactctgaccggccggcgccatgcggcggcgctcgtcgctcgtccacgccgtcctcctcgcggtcgcggcggtcgcgctgccgctcgccgccggccagccgtggccgagctgcggcaccggcggcacgtacgcggcgaacagcacctacgaaaccaacctcctggacctcatcagcgccctccaggggaacgcctcctcctcccccaccctctacgcctccggcgccgtcggctccggcggccgcgacgccgtctacggcgtcatgctctgccgcggcgacctgagcacctccgactgcaacgactgcggcaccagggccggccaggacgtggggcgagtctgcaaccgcaccagggacgccgccctcgtctacaaccagtgctacgtccgcgtctccgacgccgacttcctcgccgctgccaccaacaactccggcgaggtcgccctcatgagctccaccaacatcacccgcgccgccgacgtcagggcgtacgacgccgcggtggtcagcctcctgaacgccaccgtgcggtacgcggtggagaactcgacgaggatgttcgcgacggggcagcgggtggggagcgacccggggttcagcgacatctactccatggcgcagtgctcgccggcgctgtcgcggccgctgtgccggagctgcctcgacggcctcgtggggcagtggtgggacacgttcccggtgaacgtggagggcgcgaggatcgccggcacgcggtgtaacctgaggtcggagctgaaccagggcacgttctacactggccaaccgatggtggtgctgcgggccgacggactcgcgccggcgcaagggccggcgccggcggctacgacgggaggtgagcatacaacatactccctccgtttcgaaatgtttgacgccattaactttttagtacatgtttgaccgttcgtcttattaaaaaattttaagtaactattaattctttttctattatttaattcattgttaaatatattttcatgtaggcatataattttacatatttcataaaagtttttgaataagacgaacggtcaaacatatgctaaaaagtcaacggtgtcaaacatttcaaaacggagagagtatttagttggagatgtattttcaatcctcgcggagaactggagatatccgctcatttcttacatatgccatccaaataatctatttaaattaatatgaaaaatatcagtccacaaaaatacatggttaaattcaacttctacaaaatccaataaaaaaaacaaattaaattgaaaatagttaacgtgcattcacaattatattttgtttgttgagaagcagctagcagcctagcactgtgttgttgtaatgaggtgctacatagaagaaaaggtacagtactttggatacttgaactgatcattttctatgcaaaagtgcaggtaagaataattcagcaagcaaagttctggtaatcgtcgtgccgatagtggccgttgcaatcgtagctgcaacttccttttgtatatggaatgtgcgtaggaaaagaagatcaagaaaagcagaacatttctctgaacgtgagtcctctacaaaatttagcgtagaattcttcaaaaattccatctaacattcgaatatcaattaactatatcaaattcatgtaaattttccagttgacgcatctgaggaccttgaaagtgtcaagtcgaccttgataactctagcgtcattgcaagtagcaacagataacttccacgaaagcaagaaactcggtgaagggggatttggtgcagtttataaggtaaactagcatgctggcccgcgcagattgcgcggctagcatcattatattttctctcatataatagcatatttgctttctcattatatttttcaaatatattaaaatgaaacataattttaaattttacaataactttatgaaactactaatgtgtaatattcatattgtatttttatatacgtgttagttattaattatttttaatatcaaattttagttatttgtaaattatatatattcctatatgtactatagacctgtcttttaatatttctttttttattccgaattttctgtaaattgtatttctatatagactctaagctcttcttccaatattatttatttttatttctgaatttttattatttctaattgtatttctatgtggactctaaactcatctttcaatattctttaatttttaatttcgaattttagttacttctaaatcgtattcctatattgactttaaactcttcttcccgtgtttttcttaatttcgaattttagttacttgtaaattgtatttttatacggactctaaactctacttttaattttattatgtgtattctgaattttagttagttttaaattcctatatggactctgtactctacttctaatattccttatttttttatttccgaatttctattctttttcttaattgtatttttatatggactctatactctacttctaatattccttatttttaattccgaatttcagttattttctaattatatttctatatggactctatgctctacttctaatattccttatttttaattccgaatttcagttacttcctaattgtatttctatatggactctagtctcctcttctaatattccttatttttaattctgaatttcagttatttcttaattgtatttctttatggactctagtctcctcttctaatattccttattttttaattccgaatttcagttatttctaaattgtatttctatatggactgtactctcctattctaatattccttattttttaattctgaatttcagctttgctttttctttttcttcgattaatgtgagaatttctatgccatgagagcggactgtactctcctattctaatatttcttattttttaattccaaatttcagctttgctttttctttttttccgattaatgtgagaatttctaggccatgagagcgaacgtggaggctactttttctattcctttaataatataatagatggtactccctccatcccaaaatataaaaaatttaagtgaatataatacattccagtactacgaatctgaacaggctaaaatatatcacatccacccataattctttatattttgggacgggagagtagtagttcacaggtaacttttgaacaattgctgatttccttttagaaaagaattattgatttgaaggtatgaatcgagaacggtaaaaatatgaaattctaaatatgtcttgattcctgagcgcactagtactccattgctaatttgttatagtttatttttacaaaagatctttgatctggctttattggaaaaaccaaatattgtaaattagtagcatatgcatgttagagtcttaagtcattacaaaattcaccatttctgtccatatctccatgtataaagcaaattagctaataaactaagaattattcagggacttctttttggacaagaggtagccgtgaagaggctggcaaagggttcaaaccaagggctagaagagcttaagaacgagctagttctagtggccaaactgcatcacaagaatcttgttcgtcttgtggggttttgcctagaggagggagagaggttgcttgtctacaagtacataccgaataaaagccttgacatatttcttttcggtacaattataattaccttttaatctacatatatatacccctttcgtttgctgacatgcaataattacaataatctcttcatcacgtgtcaattagactcggagcaaagcagacaacttgattgggcaacacgattcaagatcatcgaaggcattgctagaggactacaatatcttcaccaggactcacagaagaagatcatccaccgtgacatgaaggcgagcaacgtcttgctagatgcagacatgaacccaaagatcggcgacttcggcctcgctaggctctttgggcaggatcagactagagatgtcaccaatcgcatcgttggaacattgtaacgaagtcaaacactttatctgtttgtgcttatatgtagctaacaaactaacatgtacatttttttcttgttgttgcatgcagtgggtacatgtctcctgaatacgtgatccgtgggcagtactctacaaagtcagacgtgtttagctttggcattctcgtcatagagatcgtgacgggacggagaaacagcggcccccatttcttagaacaaaacgaagatttaataagcatagtgagtatcctgctaactcatagacaaatacggagtatattgataccgcttacattttaatatttgcatttgaagataaccatgcaatatatgatctgcaatattaacatataactcacaatatgtaactgattctaggtacggaggcactgggaagagggaaatattgtagagatgactgaccactccttgggaagaaactaccctgaagctgagctgctgaaatgtgtaagcatcggtctcctgtgcgtgcagcaaaaccctgtagatcggcctacaatggcagatgtcatggttttgcttaacagcgatgctaccagcactctgccggcttttgcaactcatagcccaacaatttccatcgaggggaactctggttactctcaaaccgttacacaattgtctcctagatagcagggggctaaaacatagttggtactagaaaataccccgcgagttgctgcgggatataatgtatctaaacaaaatgaagtgaaattctaagagaacaattgatccatcacatttagacatagtgcataccaataaaagaaagcgaaattctatgaggacatttgatccatcacatttaacatactatatgggttggataggtccaagtactccttagcagagcttcatcctgtttcatcgattataggaaaatgaattttcttgactacaaattttggaaataatacaaactcatcttatgaggagattgtgaaacttgcgtaatatatgtgtaaggacaggaaaggtgtataacaatcaaagacctgtttattgcgctatgctacaaattaaatgaggattagttgtactattctttttagcaatatatgacagactgatagagatatataagagatggcgttatattatttgattggaataaataatattacaataataaataaaataatagagtgggctaagctgatgaaacaaaatggagaagcaaagacggagttattgaaatggatgatcctgggagctgcaacttctttctgtgaaccaaagaaatggagtcgactgaaggtgataatcttgaactttgttttgtccttttccccctactcaagaagagttacatctaagttcgcatgttttctttctcgtctgctacctactatttgtgttgggccaaagtattggctgaaaacgctcctttcttgtttgagctggtctccccagcctgtggatgtaaaaactctctttatataaaagctgggccatctggccttctatcaaaaaaaaaaagttccagaaatcattctcgttgaatcgtagtatagctcaaatatgaatagaggtagaaattaatgaccagaatttactttcccaattagctagtaagagcatctatgataaaatccatcagcatgatataacatgaatggaggggaaatgtgacattaaattttatgaaggataaaaaagtgatatcatgcagatctagccaatggctaggcagatgaagacaaacaggagcattgcctttttctatacaggaggaatgagtacaaccaataaactcatcccaaagccatctgtttcaaccttgtgagccaatgagctgatcagctgaacatgggaaaatgagggaagagaagcacctgattcagcaagaagaccccatgggaacagaaaaaaggtataggccaggaagacacgaatgaatgggctgcttgtgtgcaatgaaacaatctcactgaaggagaaacaattgtgtcggtttgtgtccaataaatcaatatgaagattggcgaatccagctgttgtgctgcaacaatttgtttcatagcaaaaggggaggctaaaatgcctgctaaaatgctgcatcgaaccgaagccaccagatgagttggacatgattacatgagcccttttacagatggaaaccgcgctaacaggggaaatggatttgatggatctttgtatctggaccaggaagaaacgttttcgtgggtatggatgaacaacttgttagtgccattgctaccaggtatacatgtatcctgtaggatagtagttggacgtgggtgtagctgcgtaggcgaacagattgattcgttgtgttgttgcttgtttgtgggagctcagcatgcaagaagatcctttaatagctacccttccagttcttttcctcttatattccttgagaagtggaagaggctgttggtttcgcagagggagagaccgtgggatggtggaaccatggaagatgaaccaaatgacagtttttgatcgagccatcaaggaggaggcgaatcgatgaggggaagaggactcgacaacgcacgatggagaggcctggtgatgcgccgcctacgacactagtcggaaggaggaagaggaaaggttcactggctggcccaggtgggaaaattgggctggcctcagcgagcaagagaaaaggcctcgaggaagcaatttgcaccgttaagaacgtgaatccaacggatggaaataagtggtgacgtggctcaacctcaaagcaggaaattgctaataactacactaagtggggatgatttgtataggtatataggatttgctcgttgatgcttgttttgttttccgttgaaattgtatcttttatcagtttgtaatcaagaattgtaaagttaaattataaacatggagatacgaggaaaaccagtagtatgtcactttctttttcccttttgacttcaattaattagtttctcataagatacttttagcgtaggagtaatggatatccatctgaccatccatgcaagttgttgcagctaccgcggctggttttttccacgggggcgccaggtgcacgcactccacacccaaccatttgattatttctagttaagaatgggtcaagtgttccaatcgattaagtgcgtgctaattactactagtactcgcatgttgaaacagctgctgcgtggtggtttccgctcacctttattttcgacaacgaatgatcgatgaaacgtcccccctgaatgaacgtactttacgacgtaagcatctgtctaaaaaaacacgaataatagaaaatgacctaatatcaaataattagaagagtgacttcgaattcaggtcgtctacctcaccaccttgtgaagctagctggaagactctgggtgtttctcatgaacatctgcctaacgttgtgtggtgacctcagtctctgtgggctatcgccatggcaacttgccaacaccatcgtacgtacgtgcacgagaaaaaaacatttcaatgccgcgcgaaaattctatcctcttttgctagcttccatcccactgtgcatcctgctgactgtgacagctgcgtccacgggcgccatgcggcggcgctccacgttcgccgttctcctcttcgcggccgccgcgctcccgctcgccgccggccagccgtggcagctctgcggccgccgcggaggcggcggcggcggcacgtacacggcgaacagcacctacgacaccaacctccagagcctcatcgccgccctccagcagaacgcctccacgtcgcccactctcttcgccgccggcgcgctcggcgccgccccggacgccgtctacggcctcatcctctgccgcggcgacgtgagctcctccgactgctacgactgcggcaccagggccggccaggacgtcgccccggcgtgcaaccgcaccagggacgccatcctcgtctacaaccagtgctacacccgcttctcggcggccggcgacttcctcgcctccgccaacaactccggccaggcgccgctcatgaacagcgacaacgtcaccaccgccgacgtcgccggctacgaccgcgccgtcacggaactcctcagcgccaccctgatgtacgcggtagtgaacaccacgaggctgttcgccacggggcagcgggtgggcgccgacccggggttcccgaacatctactcggcggcgcagtgcacgccggacctgtcgccggcgctgtgccggagctgcctcgaggacctcgtcgccaggtggtggaagacgttcccgcggaccacggtgggggcgaggatcgtcggcacgaggtgcagcttgaggtcggaggtatcccaggacaagttctacaccggagccccgatgctgaagctgtgggccgacggcctctcgccggcggcggcggcggcgtcgccggatgctgcgccgggcactacgggaggtgacaataccgcgtcatttcgataacatatactccctccatttttaaatataagatatcgttaatttttaaacatgatatttgaaaatttgctgggttcaaatttactgcaaatatgagaaaatataagtcattatacttttttatggttcatggatttctgcattgtttatgttataccggattacttttgaactgataagtctgacttttgttactcgtcacattcttggtgttatgtcagataatcaccgcgcagacagtcaagacccatagtttagcatggcaaatgctgtattacatcatgtcacgtatatatattagtagtatgtcaattaacgatgactatcttcatagctcattgttttcattgagtcttagaaaaatcataaattggcacacgaagagacagagacggatccagaaagaattaatatgagggtctgaacaaactatacaaaaattataaacccatcttctaattaatgtatgataaaaaattttagtggggtcttcgtgggggctcctatggttacgacacgggtaatggagggctcgagacccccatagacccatgaaggatccgccactgcgaagagaaagtcaattttgttcgttgagcagctggtagctcaataatcagctgctcagacaagaaaacaggtgctctgttttgaatacttgaactgattattttccctccaaaatgcagtcaagaataattcagcaaacaaaattctggaaatcgtcttgccgatagtggcagttgcaatcgtagctgcagtttccatcctcttgtggaatatacgcaagaagagaagacgagggaaagcagagcatttcaccggacgtgagtgatccttctcatcattggcataaaattcttatcaaattccactatacattgttaatcatccgtattcattaacagtttatcaaattcatgaaaatttgacagctgatgcagctgaggacttcgaaagtgtcaagtcaaccctgctatctctggcatcactgcaagtagcgacggataatttcaatgaaagcatgaaactcggcgaagggggattcggtgctgtttataaggtatggaagtaaccttttatgtgttcttttgaggaaataattttttatttcacggggcgaattaagcatggtaaaaatatgaaatgataactttttactatgagtgtactgatccttaattgttactttgataatttaattaattaatactatttggcaaatatcattcaagatcgcctaatattgtaaattagttacagcaccaagcttttaagccattcaaaattcagttttttctatccatatctccatgtaagaaggtattaaaccaaatttttcaggggcttcttttcagacaagacgtagcagtgaagaggctagcgaagggttcaaaccaagggttggaagaggtgaaaaacgagctagttttggtggccaaacttcatcacaagaatcttgtgcagcttgtggggttttgcctagaagagggagagaggatgctcgtctacgagtacatgcccaacaaaagtctcgacacctttctttttggtactactgatatcacccctgaatttagatatgttaccatcttttcatgtttctgcaatgaacatgattcatgctaattagatgaagagaaaaggagacagctagattggactacacgatttaggatcattgaaggcattgctcggggccttcaatatctccatcaggactcccagaaaaagatcgtacaccgagacatgaaggcgagcaacatcttgctagacgcagacatgaacccaaagattggggactttggacttgctaggctcttcggacaagaccagactcgagagattacaaaccgcatcgttgggacattgtaattagttcataaatatatatgtaataaaataattaactatgcaattctcattctaaccatgtgattattcttgttggatgttgatgcagtgggtacatgtctcctgagtacgtgacgcatgggcagtactccacgaaatcagatgtgttcagcttcggcattctcgtcatagagatcgtgacgggccggagaaggaacaacgggccctatttctttgagccaaacgaagatataataagcatagtaagtatatactacctccattttctaaatagatgacgtaacttagtgtaaatgtgctgaagtataagtcttacgtaaagcttttttaatgataaaacatgtcacaacagaacaaatgatatttatataatttttaaatatgacgaataatcaaacattatgtcaaaagttaacaatattatttattaataaaagagggagtatatattttgctaattcaccaagactaatgcaccattgattgccacttgcacttttagtactttctaacatataaccatgcatactgattactgaagatatttatgtatctaatactaggtatggaggcactgggcagagggaaacattaaggagatcatagatcactccttgggaagaaactaccctgaaggcgaggtgctaaaatgtgttaacattggtctcctgtgtgtccagcagaaccctatagatcgtccaacaatggccgatgtcatggttttacttaatagcgatgctactagcactctgccggcccctgtagttcatattccagtagcatctttctccgatggaagctctggttattctcaaaccgtgacacaattgtctcccaggtagcagggcctaaagcagagcttgccatcgctagtgtagttggcttgttgcttgtttttgtttcgagttggaacttgaaactgtatatattgtcattttgtgataagtggtcaagagcttggccacacgagcccaatgctacagaatcacctacagaagcgtaggacacatcactgtatattgggattccaaaaatctgcttatctgagaaattactgcagtacacacagctcgctagtgctgtagaatgcagattgctctggaccgttaacttaaaagaaagtttccattacagagtgtaatttgtgaccaagtcagtagcagattgagcgaaaatgagcgaaaatgggcaaatggccggcacaaaagcttgggtaaaacggaggaaaaagttcactcgaggtccctcgtcgcatcgccgagttacaaaatcgttcctgaacccaaaaaccatatacaacgtatgccccaacttccaacttccaaaaccagtttaaaacgagatcccttgacagtattgtcccccgattttggctgacatggcacccacgcaggggtagatctacccattaagcagggtgagtcgaccgacccagctacaacctgtaaagccccacacccaccaagaccccctaccccttatagtaatcatgggctaacaaggtgtgaacgcccaacagattagtccgtttcttcacaatgcacgcccgctacaaacaatgattcagacagttatgcgattgaactataaatacgatatgtgttgttttcgattgtttttatcgagtgaatatctctgttctccgccccatctataatttaaagtcgtgtctaccaaacatggctcctttgacaaggtcttcgtcctaggtggcatcttcctctctttgttgcgtcaggcagggaggaaaggtagaggaggaggcacggctccggccgttgtgggtgatctcaacggcggcaggaggtggtcccagctgcgacggcattgggaattggaggcagccaacagtctagttgcagcgggaagagttttaggggagagagaaagagtggaggaagctcggcaaagaaagcgggtggcacgtcgactccatgccggtctccagtgtcgccactggctgcgcccaggacaacgaagggctcttcgtcggtgtcattgggctgctctcctttccctcccagatcttcgccccctctactccggctctactaagctctcatcgacaccgcccctgcccgacctcctccgtgagcggtgctcgcgggtcactgccagggcgccccctctgctggcgccagattccatagaccccatcgccgccagggggatgggttgggcaccttgcccctgggctacttctactgaccattgtcagcctcatctttcaccaccactcccggtgctccgcctgcctcgtcgccaactagggggttgggcccctcctcaagctacccatggcgcggccaccaccctcgctgactccgtccgatgggacgccggccttgacatcctcctccgggtcctgctcctgctttctcaaccgctagcctcagtgttcttcaccgcgaagaccccttatcccgtcggcctccatgcgtggaccgacgcacctccaccagcttgagtgagaacggggggagagcaacagagggagaagaatgagagtttgtgtcattgatatgtgggtcccacgttgactcagtcatcatgttggacaaaatgggggtcaatagcgtgtaagaacctagagtggtctggttttgtaaagttgagagctgacatatatctggtttttcagttcagggacgattttataactcggtgacaaggtgagggatctcatgtgaactttttcctaaaacgtgagagggccaggagtccagcacgacagaaatgaggccaggcgacccagcgatttcacttcaggttgggggctcggcctgctggctctggtgaaacagaagcaggcccatttctttcaggatatgggcttatgctaaacgatcgtcctcgtgtagcaggccaatttttcaggacgtacaaaaccaacatccggcctgcaaggggagtatccagcttgatgtaagttggatttataggaacacaaatcttgatgtaagatcccatagataaaaagttgaaagacaggagcatccaaaaatctatcgcaagtaaaataatgaattcgaagaaaaaatgattgcctgcaaaattaaggggaaggaacatgcgaaaatcgtttctccagtggtgaccaatctcgcacagattttgacttggttgctatccagctggcaagtgcatcaggggtccagtcacacagtgaaattaatcatgtttagacacaatgcaagttttcttgtactgtcctatctgcatgctaattaagttgccaagtgtgaagccaagaacagttgtctccagtaacgatcgattggcaacaaaatcaaagtccaagtcaatcaacgagtcttccaattttaatcggtactagtatctatccctatctcttaagaatttctttaattaggaagatctggtcgttgatttagatggtatcattatgaccgtatagagaactcatattgaacgaaacatgctattgtatagctgaactgtgcgtgagtgatgcgagagaaaactgatggatgatctacaaacaatagggacaaaaaaatagtatgcatactataaagttagcaaactgcttggaaaaaattatctaaaccatgctaatggagaaagttttggacaaattgtacctttcgaagcgtgacacaaataataggtcgaaattgtaccttattagtctttttaaatgttattctaaaattaggaaacaataattatcaagcgttaccattttttactcttaatttactgttttgttattataattgtaaaatccaaatgtgatattagttagttgtaaatgcggtggaatcaacttctagtttaagcctgtattgctaagaaaataacagtggtcaatatatgattaaattcaaatagatgtgatatcaacaacaatagaaatctccgttcaagtaaggtttggttactagtaatttcaatccaaatttcaaattaaaaattaattgttcttcaaataatcctcatggtgagatcaatccacacattggagaagcacaagaggtgttatgcaatccaccgttagggtttaaatcctggttcacaaaaaaattatatatgtgtgggtgtattttattaaagaatacattacaattatataaaaataacttggcaacaacttaataggtcagtgccatctaatataagaacttgataattgaacatccaagtacaatactgtgacatgtgggtccattataatataaagaacttgacaatttagtattttggcgtaaaaacttagctaggtatgtgctgttttgatttatgagtgcttgataagttaattatttcacgatatcagtatgccataacatagccatactgcagatattatcttatgttgttcatcccaatttagcacgactggtatagattttttcttcaccttattgatctcaactgaaatacaaaacattctactagtaaaatttaactgacttttaattactaaaatgaaaaaaataagtatgcttatacaatatagacaagtatatatgttgacaaaataagaacttaaaaattgaatgtgtataaaaaaatgctcgaaataattcagttgttatattaactcttaagttattataccaaaacatacccatcatgcaagttgatgtaattgtatacttattaagttcctgtactagattgtatacttactaagtaagttcttgtactaaatttcactcacccattaagttattgtattaaaatgctcatttctcaggttattgcactaaattacacccgtctgctaagttaatataccatgattgtttattaaaagtttagtgagatcatgtcttgatggcgcattcgtatgtgatgcgtatatatgtttcgcatgtagtgaaacatgaaaaatgttaaaccgcatgttgggttaataactaaaaggagatcaacaaggagaatattttggcgtccagatctctaaaaaacgtttcaatcatttaatcatgcgcgtgtacgtgaattacgtccaattttgttatatattgtgaacaattttttaaaaaaatttaacagatgtaattacattgtaacttgcatataactataatataacttttacataattttgaaccgttagatttgtttcaagatttgtgcaatcaatgatgggaaaaaaatcacaacacacacaagtgaaaggatttagtccatgacctccgtttcacgcaaatagcatgccacgaaaagatttttaaatgttacatacaattaagtcacattatagctaatataattacaccacgattacactataattgtatttgtcaaatttttaaaagaaaaagttattgaaaatgtataggtgatcccattacgtcggctggtggaaggcggactcagcacgtactgcagcaggcgctcccgattcttcatgcggttggatacgctggatgccatgtcagatggggagaacagtggattttcttcaacttgaaagattaatcgacgttaaataaacatttaatcttaatgcattgggtgaaagatcttgagctggttgctatatatccaggcgacatgcatgcatcacggtccagtcgctatacctactataccatagactgaaaaataaatatgaacagatacaaagtaacaaacataaagtaagttttcctttctgaatctgttgattctagttttcctttttgggtctgtttattctaccctgttagtttctgacagagaaacgactggttatttcactgagaaacgactggttatttaacttataagaatatggagaagttgaaaaacccagtttactaatttatataagaaaatacaaactagttgtaaatcagtgatgtttggaaaagttacagctttttctacacaaaaacagaatatatatcttgttgctagaagttttccaaataaacatagcccacatgcctttagctgagtcgtgacttataagacaatgaatagttgaatagttcctcaattgataggtcaagtgatcaagcccacttatgaggccatgaatagttgcctcaattgattggtcacaggctcaaccacaagtcaatcgaccagagtttctactagtttctttcttcattattatataacactgttaacttccgtaccattcgttctatctaggggttttataaatataaaaaaaatataaatcaggtttaaaagtcatttaatgagaaaacaaatccaacaaaataaataataagtacataatttatttagtaaaacaaactgtacaacatcgtatattaaaagaaataaaagtagttatcttggcaggataggtgaagaaacgccaacggaggaaagagggcaaacatggggatgtggattttcatcgaatttgtagttacatgtttgtgtaataacttatattatcacaacacatcgtaccaaatgttttcacatttttatttaactatttatatcatatgcatgttatagaaaatactttcccgctaaataggttactggttacaaatacacaacaacataccgttgttgagagagagtatgctaaactctcaagggggtgtcacatcgtctcttgcatgactgtgaatatacacatatactaattagagtttaatttatcttttttttacaacttgtagaagtcatatttaagcataattatttgtgaagtcacatattaatccatcttactattttttttagtttttccgataactgtttagatgacatgtgatagacgatgaaatattccttgaagaatttagaatcctagatgatgcaacagtctgaatgccacaataattaagagggccgacagagcatgggaaaaactgaaaaagaaaaagacctactaaggcccggtctagttccaaaaaattttctcagaaatatcacgtcgaatctttggacacatacatgatgcattaaatatagattaaaaactaattgcacagttaggggggaaatcgcgagacgaatcttttgagcctaattagtccataattagccataagtgctacagtaacctacatgtgtgctcaaaagatttgtctcgcggtttccaggcaagttatgaaattagttttttcattcgtgtccgaaaacccttccgacatcaagttaaatatccgatgtgacacacgaaaaattttcttttcacgaacgccgtatgtacaaacacaacaatatggcgctagctctccctactagacctgccaacttcgtccaagctcgcccacccttcgtcaagctagctacatgcaccacctacatggcgtacttctacctcgccgccgcagcatgcctcgtcggcgtgttcctcaacgcgcctcacgccaccgacgcgcagcccatgccatggcatcgctgcaacacgagcagcggcaactacacggcgaacagcacgtaccaatccaacatacagtacctggccacctccctcccggcgtacgcctcttcctccccctccctcttcgcctccggctcctcgggcgcaccccccgacgccatctacgccctcgcgctctgccgcggcgacaccaccaacgcctcctcttgcgccacctgcgtcgccgcggccatccaggccgcccagaagcactgcgcgctcgtcaagaccgtcgccatctacgacgacccctgcatcgtccgcttctccaacctggtgttcccggtcagccctccctataacaaaggaatgttcgtcgcgtgggacgacaacaatgtcagcgcggcggcggcggccgcgttcgacgccgccttcgcccggctggcgaacgccaccgccgagcacgcggcggcggactcggtcaggcgattcgccacgggggaggaggcggcgctcgccgtcgccggcgaggtctatcccaagatctactcgctggcgcagtgcacgccggacatgtcggcggatgcctgccggagctgcctcgaggatatactcgtgaggatggtgcccacgtatttagccgggaggaagggcgggcgcgtgttgggcgtgcggtgcaacttccggttcgagacgtatcctttcttcttcggccagccgctgttgcaactcccgggctcgccggcgtcgtcttctgctccggtgaacggaggtatgttggatgaacacgagtgaagcttgcagtgttaatttcttttccactctttctatttattattagttgtatgatatttgctcttggggttatgggtaaaatcgtttttacccaactatttattctttcccatcacctaaatttgcataacacactatcactacctctgttattttttacttcacgttttggacatcgccatatatagtctctagggcacgtgtttcattcatattttttttctaactatattttatataaattattaaaaaatattgttatatgaaagtatttttcataacaaatctactaatattgcatattagatcataatattttttatcaatgaattatttaaaaaggtttgagtatacatccagcaaaaaagaaagatttgactatgtgtatttctaggaaataatctatttgcagtaagaggtaaacactactattcgcatgtgttttggaatcattcccacgatatatttatttccaagcagcgcctggccctccctttcactgactaccaagtctaccactaccaatgagttggggacacaacccctgtgtacaaggtcctgtttggtttcatgggctaattattagcccccaccttttagccctgaattagctctcaaggatccaaacatgtgggctaatttgaggttaaagtgcattagcccccctcaaaacattagcccctttaagtggtgctaatggagctaattttgggtggggacaatcaaaaagcagctctctctctctctcctctctttctactctctctccaccatttagccttcaattagcccatggatccaaacataccaccttaggctaatgtttagcctaccaattcatgactaaatattagctctcaagattagtcttgggctaatcttccaaacagggcccaagttaaccttttctcaaagctccatgatattattttgagtaaaatatgttattgttaatccgtccgtttcaattacttttcgttttacctttgtcgtaaatcaaacattcttaactttaatcattgattttggaaaattgtatagttgaatatcataagatttatgtttttagagcaattttcacaaaaccgcaagttttgggccatccgtaacgcataaccctaggttttggggcaaagtgtttcataaaaccccagctacaagcttatatcttctatttgactaatatattgtaaaaattgtatgtgatatttttagtacatatacacattagctgcttttcaataatcgttgttcatcgcggtctgatcatttatgtgtatatttaaccaattattatgacattatcacttaggattatgtccatttttttatatagtgacaaattgagaaaaaaatataaactagacaagaggaatgtgtactttgagtcaacaaatgtaaatttatgcaaaaaaaaaacataatcatatgtaatatgagtattttacataaatatactacatgaaagattttcatggacgccggatccttttgtttccaggcggaccgtatgtggaacagcacaggaaaatggagggaccggcgctaagccatcgtccgtataagaaaatcattttttgtgtgcg

SEQ ID NO: 6337 - DNA, 33523 bp, Oryza sativa
ggcccaaagcccatgacaaataagcatgtcaaatgtaacatttcattacactttcagcttaaaatggaatgaaaataatccaaggcaggaatgtctagcttgacagttgctcatgagtttcaagggaagatggaaagagaacatgacaaatagcattatatcagtcctagaatagtcttgtgcactataatggaaaagttgcataaaaatatggaaggtttctttagaaccactggactgaaccatttgaatccattagaaatacattgattttatttatttctatgttattttcatcatcatttgcagcatctaggcacccagaattagcagagcttctggacacagcgccacacatgtatgcatcaaaaacaagaaaaagaattgcagagtgcagatatacaaacagagacagttattccatatgaccagatggtccttacaagtacatacttgtagaaacacttcagttttctataatgattcatttatttgtaattttggagctatcttataaagaaaaattggatgcatagcgatattacggatggagactcaccctttctgtacagctacatcagatactctcttgcaatagtgtgtacacgacattacgacagtacctgaaatgaaaaaaaaaagttgggataagtatgtcttaatttaatttgattctgagaaaagaatcacgtttaagtcccttctggaaattatttacagttcacttaaacaggacgctctggatcaacccaccagctatacttcttccaattgaaaccaaaaaggtatatacagattttacacatagcgtgagcaactcaagacaaagttggttcatgacacattcatacacaaaccagcaacatagtatcattcaaatcaatcagtcatccacaattccacataaattagcgatctgattggagctaccataatctgcaatctgctgaattgatggagatgtaccaagcaactactgcattgattagccatcattttctgtatcatcaaaacccaccatggtagggagtctaccctctaacgaagaactaacgaagaacaacccgaaattcacagatcgggatgtatactctactatatatatatgaactgtacacctacaaatgcggccacacacaaaaaatgtaccataataagctgaagaaattgcagcagttagttcatcaaaagctcaccaaatttgacaggcaactacccctcctcccttaccccctgccgggacgtcgtcgtcatcatcgcctccgccctcctctgccagcagcgatctcgaggaacgccaccgcgcaggggggctcgatccggtgggctccgcgctgcatgcagggcacgctcccgccgccgtacagggtggcggttctggaagccatcgctgcctccagcagcggccggcggagggtctcggcctctcgggagagggggtactggatcgagaactgaccggaggttttcggcggcgcagcgtggacaattcggcctccccgcgaatccggcagccaccggagcggcagccgagggtcgccgccccggcgaacttctccgcggctgcctgtcagtgtccgccgctgtcttctgcagcgccgccagcgtaagattagttgggccgacgtaattagcagcccatctaacaacatggggcctaattcggttatcgacgtaaaattagcccttgtcatatcccggttactccgtaacctgattaggccgttaacatagattcggctcagattgaaaaatcttcagtacattaaaaaagaaaagcaagtagtcgattttacttctcaactattgggcgaaacaatttttttttaacaagcagaaaattttttattcgcccgaaaaagtaaagaccatgtgttagaaaaaatagtggttatgcactgtagtgtactcccaaaaccacgtgtcaaccagacagaaacaagcctctcggagggaaacctagcacccaatcgatcgttgctaagattggtcgatggtcacagacatacaacaacactatagtgtagagtctccaaacacgacgtgtctccataaaggttatggcatcaaggacacagttgttgtgcatccaaagactgacatgttttcacccattgtttctcaccaaaagaagagaagggaggtagatgacaccccaagggggtcacgcccgcgggcgtcgccgctgctagcttaatgaatcataagactagacttacacttgcaagctctacaggctacaaccttgatcacggtctatcaggctacaaccctgatcacagtctatcgtgcaccatctcagtgcgacttcctgccttccagcgtgagagaaggaatgggaagagaaaaggtaaggatggctcatgcctggtctttggaagggaggtggccaagcaggtcggaactttctacaccgagctggtcctgctcaccgtcggagctcgtactcacactctcgtccactccggtgcggtgccactagctaggaataagttcactttaggtttcttgatttatcgttgagttcaaattaaatccgtccctaaaccgtaatactaggtataacgtgtccctcaatttacaaaagcaatgtacttgaggtcccaaggtagtatagtgcctggtttcggctgatgtggcggctgagtcagaatgggatccacatgttaggacaattcagtataaattaaaaaaaaattggtggctccctctctccttttcttggcagcatcggtgtgggagcaggcactacatgtggcgagcaaggccacaggtcacgggcgacggtgaccggcgatacgtggaggagggtgttaacagcgacggcaaaggagggatggggatcgaacgatgcctccagtggcccagccaaccgattttcccttatctgctctaggccacagctgcagccgaggtaggggaggtagcctaggtcggatgcatcagcggcaccgccgagcttgaggggagaggtggtggcatcgttggagttagtcaccgacgccgagatgctcccaaatccccacgtgacgccaacgagaacgaaatggcaagcgaagagggtggggcaccgttgcaagggagtagaaggcctcgccaatggaggaagggtgggaggatagcgcctcgccatcaagttagggagaggatgggggtggagtaaaggcctctgccgtcgagttagttcctccatggcgatctcgtcctcgcgtgccgcacctactccgcctcgtagcggacgccacgcacataaccctatgttggcaatcgtacctcctaccgctactggagctcgaggcggcgatgtcctcccatgcatagatctcgtcggctcgggcggtctcgtcccctgcgtcgtcgggagcactgccatctgggagtaggcccgcgaggagtgcgctctaagaccaaatgttgagctgcacttgtggcgcggcagagtttagggagatcaagggtgcccccgacggcttgctcctggagctactcctctttctctccccacacgctctcccactgggccatgacactcgcacggagatcaccacgccagcctccgcagtggctacagtgggggtagggatgctacaagaggctgcacatggtggtgcccatcctcgccaccgacgttgccctccaagttgccaatgtcctcgtcatcgtgttagtggagttcctctacccctaattgttgtctagccgggctagacattcgagcacgcctgcatcgatgcgtgcgccgtgctcgccttgtctccgccagtcgtcgtcgctaaaggcgccacgctcaccttctccctgccacctagctatcagatgcagggaaggagaagaagcaagaaaagagaaaagagaaataaagaaaataaggtggggacccactacaattttttatttgtaaccagacactcactaacatgtgggtcccatcaatttttttatattataagtgccacatcaacaccagctaaaacaccatccaaaccgtcttaagacattatttgtactggttttgggagttgcgagagacgtgtcaaatctgatattgtgattcaggaacgaaatttagacgcgccgttgagggacctatagtgaacgcattccccactggctatgctactacccgcagcgatttttttacattttttattaaaatatttacaaacataattttttgtttcaaaaatttacaaatctaattgcctctcaccctctaggagggcgatttttaaaaatcgcccttccaaagggcgataagggacctaaatgcaaattttccagcacagcttgtttgctctatgattttataatttaaaattatattatataaagtcagatgaaataaaaatttatatcaaaattgtagagctcaaggagatctacaactttgtagttaacattttttcatttaagatgttttagatatccaaatattcattataaaataaaaaacctattttaaaaaatctcagatctacatctcaaacgacatcggatggagataaactttatataaaagttgtagatctcgatgagatctataactttgtagtttatcacttttccatttaaaatcatttagagtatcgaatacgtattattagtttttaagcaattaaaaacggtggaaagggtttaaacacaaataaaaaaattgcatttaggtcccttatcgccctctggatccagagcaagagacgactagattgtaaattttctagaaaaaaaagtattttcgtaaatattttaataaaaaaaatgtaaaaataaaaaaaattccaggctcgtttgccaggtgccatcgcctacaggtccgctatatcacgtaaggcccatatcgcgctcctcgtcttgccgtccaagacgtctatagcatcgtgggcccaacccgttgtcgcctactcgcctcctttggatgacggaagacttaccaatccttctcaaagacctttgacccaagcgagccgcgagccgcgacacgcgatgacaaaatggacaaacaacagtgctcacttataaactagcggttaaaaaaggtgaaaccaagtaaccaacatctgcatttgagcagctagctagcaacaaggatagaagaaacgggagctgatggcggacaccgtcaccgtcggcggcggaggagagcaccgggtgcaggtagcagcagccaagccctgcggcgggcagcaacagcaaggcaagaaggcagccgcgccggagaagtggctgaatggcttcgttagcttggtggcgctggtcgagagggtgggcaacgcgctcggcacgctggccttcacctgggctaccgtcgtcctgctcggcggatacccgacgtccctgacggcactcggctcgtacaacgatttttggttcgcgacagccataatcttcctagaatccgccaggttagggcctatttgttctgtttccattgtgttgatttccaatggattggggattttttttctttttttagagaatagtatttttacccggcctatacatctaacatgatacatgtatccttttaaatcgggaacttagtccctcaaacaactcaatctgaattcgctcttatggggatttaaagttggagtgtttctcaggtcactgcaatcggccaatcactagtctgcatacccttttgcaatcgattgggaatacatggcgatcgccgatcagctggaggcggctcctctgccgtcacaacagacaatatgcatcgccataagtttctggattactatatatgatttcatttgctccatacttctaaaaatactatttctcaaaaaaaacactttttatatattgattagaacatttatatctttttataagctatttattaggtttttaacgtatagtaagacttaatctttcctataagcaaattgataatccattaagttaagaaatggtaatccattatttttcattcacaaataatctaaaaggaactctgccttgcacattctttattgtttgaatgattttacagttcttgaggagatatcgggaggtatcacattttttaacgtaaaatttagtatctctcagttccttcaatgctaggaggtataaaaatttctctcaatgcttctcaaggactataaaatttatcttaatgtttacttacacatcctatatacttcaggatgtttagtggcagcaacaacaggtccgattaccaattgttcttccgaaccaaaggtgctttcagacctcttgactggaactggctgatcgccatcgtctgcattctggatgtttggaagctgttgattccccttccccataagaatgttatggcagctgtagtgctttatgctatgataattctgcttatacttggcaagagtatgactccaaagtttcagccatcactacgcaacccgttacgccgtgccatatcactatggagccccttagctgcgatactgttgatgactccagccatgcagcatgaccattcaagggactttgtcaggaacattacaggaaacggatcgataaccacaagaacgggtggcttcgctccaactaggtccacagtagttgccaaatggatagtatttctactattgctggtatccgtcctcgtggtgacaatcagcaggctaaagttcccaagaatcatcaaattgttagatagtgcttggggcagaaaactagtgtcttggcgtcgatctattcagaacatttgcatgcttgctgcgctagtgatggtagtactgactactgatggcttctttcggttcatgataatcgggatgctagtcattgttgctgtgatggtgtcgtcgggcaacttgcagataccagcagcagtcttgcgtgttgtgttcgcaggcctcgcactgtcacaccttatggcactacataagaacaacaaagaagacgaagagactaacctggtaccatctctcattgtcttctatgcgatggtgacggcccaaggaatactctacaccgtggcatgcaccctcgagatcttctcattcatcccccggagatccctcatccggcgtgctggattcagaggtcagctgggagtggaatatgtcaatctgtattatgcatatgccttggagaaatgcatggaaaaggctgtgtttgctccgaagaaaaccagcctgggcaactttgccatggattccctgaactcagactctcccaagaatcatctctatgggattcaactgatgcatagccttctggagaaggagacgacaagggcgcggctccttgaaaagctcatcacttctacaaagaccatggctaggataataagtatgttgggctggactagcccaaattatatgatggtcagattatatgccgcgaaagtaactgctgagcttgcgaaggacctccaagttatcgctgttcctagggcaatgcagcttgtgtctgcccttctggacaccgatggcaaacttaaaaagggaaatccacttctgcaggtagacgatgaacaagaggagaggcaggatcccattctcagcacagcaaatagccaagaggaaagaccgaatgcaattaggaatgcagatgatcccccaaagcaaagacaacaagagacacttcaaggcactgataacctgccggagacacaaactcgatcagcccacatccatgaacagaactgcataatcagaagcttgcagaagatttcagagtactggacagttcccaaggagcatccattgacataccatgatcaacttcctgcacttggcatgttgattgttgacaagcttgctagttgtgatcaaaataactgtgtggaaattgatagagtaactgacctcattccgaagatcataggatttacaagcttcagaagtgacacaatgaacagtgaagcacagcaaatggtcctagtgaagtcatcactgaaggtgttgcagaggctgacaagcattgaaggggaaatcggcaaagcactgcggtacaagatatcgaagcatcccttcttgttaagaaacctcgcagatatcttgggagacaacatcagagaccaagaattaaaaaagcttgcagtaggaatcctcagaaacatttccattgatggtaacacaaggcaggagattgggaacatgaaggtgctcataaccagactgatgaaggcattcctcgacttacatagaacctccaacacagatgttgatttcttgctaccaaaggtcgccgggcaagcactagcaatgctagcaatggataatgtgcacaactgcttagttatgttgaaggaaccagagttcattactaaactcaaaaatatgatcctgatccaagatgaaaagtacatatatgtggcgccaagcctgttacgtagtatgtgccagcatgcccaagctaagctcacagaattagacctaaaagaactatctcacaccttacgagaggtgagccctgctacttaatgctacagatgcaatatttgaggtggatagtgtggtatgcttttttgcataaattattttatgttagaggagggaattccacctgcatttttttcaaactgggtcatttattactagtaaaatagagtataatataccgtgttttgctgaattatgttgttaccaatcatgctacattatccactacaggtgttggaaagaataatgaatgctgaaggggcagaactagagattctcattggccttagttcacagatatgcaaagtcaatcctgaagaatttgcccaagagctagatcacggacatattaggcaaagatttgtgaagaggctagtggatgcactgaatgcaaacatgaaaccaagtgctcactgccctgggatccggagggtgatacttgagcaatccatatacatgatggagtgcaattctcactatgccaattgtttcaatgaattccggatgatggacgcactgtcaattgtagaagaaacgccctcaaaggttgagaactacatggttttcttgggtgatgtaggctttatggaatgcggcacacctctctttgctctagtggacagagcaaaagaactgatgggtcgtcaatggttgcaaggaatcaacaactaaaagtaattgtatgagatgatttctcatttacagttacagtgatttagtctattgtgcattgcaatccaaatgccgtaaatttttagttgatgcatgttgtggccatggtaaaagaaataaacagaaaatgatggcattggagtccgaaggccatgcatattactaacatgtggtaaaaagaaaaaagtgaatgtgcacatggcctttctagaaagaacacgatttgcctctgagatgagaaaatactattgtaattgtacctcattagtttctttttagaaaatggaataaacccgacctctacatccaaccggatgtacacggccaacctcattagtactgcattgtaatatgtttgcctgcttttctaatgatgatttgtcccattatcatctcttggggtgaacaatgcataactggtaatatatagattgcagttcctgtgccaggctctagcacgtgtactagttttggcatcaattgttttcttaaaatctgtggtttattttgacacctgaaaattgagttatcttttgtagcaactagccccattcaacgcaagccagtagcagcccacattgcacagcttatggagtacagtccctccctggcgaactcaactgaacaaccatgaatacatgaatcatgcgccatgtcaataatgcatgacatgatgcctgattttgattttagtagttggttttccatttttgtaaactacgatgcctgtttggaggcgagtgaacacaaaaccctcaaattcgcatatactgcgctggttatatacttatatattgagaccaaaactatggcgcattaaattttctgcaagtcgcattgcgattaatcagtacagcagcaatcgaagaaaactcccaaatttccacatccctaaaccagtcgattccagtataatcattgactctccctgttactattttcttacgcaaggacaaccatatataggaactgaaccaaatgacctaagcgacgagataaacattctgcttccttataagaaaagagacgagcaaaacgaagggatgcaaaagagaaaaaaaacgggggaaggagacaccacccgtcgacggaatgagctggagggggattcgccctctccgcggcggctgctcttctctccgcccaagatcctcccccgccacccagccgctaccgtgacgcctcgccgtcgccgcgtcggccgctcttttctccgccggagagcccctcgcccagcccaccgccgcgcccagccggcaccgttgcggtcgagggaagaagccagtgcccagataaaagtttgtacgtgggccaaatgtcaggcccttcaaaagacctagcgaaattgtttacggcccaaatgttggaacagctacaactcaacgtgggcctaattttagtcgacgtaaaatttgcacaatacccgaaatatgggcctaagtatatacttactccgtactatatttgaacgtttaatttaattatttagatcgtatatgaaaaataattatggatcataagaacgtttaaaaatatatagagcatatattccaaggagtattacactggtagtccaaccgaaaataaatgcttgcatgtaatactaaacaagcagctctgaacaaaagtaaccataataaagtaattaaggctgtgttctttccacaagtttcccaacccctttccctcgttttccgcgtgcacgcttttcaaactgctaaatggtgtgtttttttgcaaaaagtttctatacgaaagttgctttaaaaaaacaaattaatctatttttgaaaaaaaattaactaatacttaattaatcacacgctaatggaccgcttcgttttccgtgcgatggagttgggttcccaaccccaattatcaaacacagcctaagtagctttaacaacagccacatgacccaattccaccgaacccaaataaagcttgccgccgcctctctcaatcacctccgttggcctgacgttcttcggccccctcaactcctgcaagatcttccccttgcgaccgatccttacggcgaggaggtgggtgtccgagccatacggcgtctcggtcttctcgcggtgcagcgccacccagtagcctcccttcccatcgggcctcacgttgtccgggtagcccggcagctcggcgaacggctccgacgtaccggccttggggccctcgatccagtgcctcaccagcttgcacggccccgtcagcgccaccacgaggtgactccgatcggcgctaatggcgaggccgttcgggtacgtcattccggactggagcacgtcgaggtagcccgtcgtcgggtcgtacttcatcaggcggcccgtggagtcgccggtggccgtgaccatctcgtgctgggatcgctggaagcgcgtgctgctgtcggtgaagtagacctcgccggtgacctggttgacgtcgacgccgttggtgaacttgaacggcacgccgtcggcctccgtggcgagcaccgttgcctccccgccgcgcgggccgacacgcatgaggcccttgtacgcgtcggcgatgtagaggttaccggaggtgttgtggaaccggaggccgagcggccggccgcacttgctctcggtgagctccgcgggatggagcttgggagccatgcacttggcgacgttgtaccccggggcgtgggagtacgtcgtccagcctttgtcggcgccgtcccagcggaggatgcggccgtcggagacgccgctgtaggggccatcgccgaacttgtcgaacgcgacgctctctgggccgaccagcgtcgtgggcagcggcagcgtctcgaccagtgtggcggaggtgtccttcgcgacggccgcggcgagggcgtgcgacggcaacagcagcaggaagacgacgatcgtcagcgccacccgagtcagagtccccaccctcccggtgccgaggacggcccccatgaatgagaatcgccttgctttgcttcgtctcactatcgaaatttcttttttttgtcttggcgtgtttttcttaaatgttcttcgcttcttgcttgcactggtgccgcgcgccggagtgtgcctttatacccgtggccactgcaggcaggccacgtccaatttcggacgccgattccgattgtgtcgtgtaactgaacactaaagccgattcggagtcggagttaccaagattagtgaggtcgacgtacgtaattagcccattaatatgccaattcggaatcggcatatttttatggggtgacgtaatcaacccatttaatgtcctggacctaattagctcatccacgtaaattcagcccatctaagggcttgcttggaacatggaaattttatacacccgcaaaactttcacaccgattcattctggatttagtgcgtcgatgctgtaacaccattgcccccgcgtcgctcctagggcaggggcgacacgggaggcgacccagccgccgccgccacaccacccccactgccctccttccacctcgccgccgcccgagcgggccgccggaaaccgcgcggccgcaaggacggcggcggcgtggccttctccccccccaaggtcgcggcgtttggagcccacgactccgacctagctccggggcggcgacttcggcggctgcgatgtcgagatcaacggtggcgcatggtgtcggcgaggtggcggcgccgacgacggttgaagaggtgggcaaccgggccgacgacgatgacgaggcggcggtgctggctcccacgctctcctgcgcggatctggtgcggggggataggccgccggcggcggtgatgcgcgtggaggcggcggggtggccggattcggccccctcctgtccggatccggcgtgggaggccgagctctgaccccagcagcgaggcggcgggggcgcgcggcgctggggcggcggtggctgaaggcggcggggacggagctggccgagggcgcggaggcggcagcggtggtcccgtggctgcgacggcgcagtgcctggcggcggcggcggtgccccccagatccgcgcctctcgaccggatctggagggtggcggcagttggcgacggcggcagcggtgtggcgacgatggtggcggcaattggccggcggcagttggtgatggcggtctctctggacgccggcagcagttggcgacgacaaccgcggtgtgatggcgtcgggcagctagctgctcggtggtggagggcgacggcgcggcggcagtttgcggaggcggtggttggcgtcggtggcagcggtgacggcagctgcgactctggaggcggtggcaacgtcggcggcgaggaaggagttgggtgcgaggtgaggatgacgacggcgaggtggctgggtgtttggcagcagcggccacggtggtggtgaccgtgtttgcggtcaccgaaggcatggcggcctcgcttgactagccgagggcgtgggagacggctgcatctggccggcgtggcatcgtgcagtggaggggtcggaaaccggcttggcgcagagaagtgcagccgatggtagcggaggccggctcggcgcgagaggcgcaggcggcggagatggaggccggcttggcgcgagaggcgcggccggtggagggaggccggattggcgcgaggcgcgtccggtggaggaggccggcttggcgcagagaggcgcggccggtgatggaggaggcgacctaggtgtgaggaggagctgccggtgggtgtggcgcggtcttcgacgcatgaaggctggccggcgggggacgccggtgcaggggtcccacatgtcggcaaagcttgtgtggtggtggagcatcggtgcgtcagacgtggtttcgcagaatctcgtctgtgcccctttgttggcctagtggcggtcggtcacgcttagtggcggccgatccggtgctagccttctcctgggcgtgtgtgttggcgatgtcggcgtgtgggtggtggtatattttttccttttcctggttacgactctccagagttgtaatattgtatttttttcctgctctatcaatagaacttcgcaccgtctcgtgcgagtcgttcaaaaaaaaactttcacacccgtattttttctgtgccccaagggctttcctgggatcgtggaaattttatacgctcgcaaacctttacgcccgtattttttgtgcaccaagataacatgtaaaacaaaaataaatatatttggtaaaatgatgtttcctttcataatacaaaagtagacgcacacgccactacatgtgtaacacccacgaatgctcatcctagctaacaaacatctatgcgtccgtaatacttgtgggtgttgggattttgaactctagtggatggagtcatgcacccacgactccactcccgtatcacttactatgacaaaacataattttgcatggggccaaacgctttgctagtatttaaggtctgtgaaaattgatgagtttcgtaggccgctaccctaagagccccatcagcgcataattaagtggcttgactaaacaatgaattttagcgtaagaaaacaaagtgcacatccaaatatcgtccgattcgcaaaattcataatgcaatttcaacatttgaaattcgaaacagatttgtcaaattcacaaaaaaaaagccagccgatgatgtcagcatcggcatccctacgtcggtatcctctctagcttcttcaaccagtctaagggaagaaaccgaagtagcgcaccatcattgatgttggtgagggagggcgcggaggcccgccgcgacaaagtcaaccacctcagcgaggatggccgtggaacgaggatggccgagagctctccgcgacaacgagtgagagcttcttgaggccttgtggcaaatctgcatgctccaggcccaacgacggcaaatccacccgcgtcaggctcggcaacagtggatctagactcccaagaccctgtggttgcagacctgatgctcctgaggccggtgacggcggattcaagctatggaggtcacatcgctgtcttcacgatcgtggtcattgtcgtcatcactagtgtcgtggtggtggtggccacgttcatcgtcgcaggcccaattgatgtccctttgcctcctaaggcccaccaagttggtgtgatcgacggtgccgatttttataggcagggctaaatctacgggcttcccgttatttatacaagtattaacaagcattaatattttaagcccacctgataaaaataaaacgtaggtctgggcaaaattgtttttttagtgctagtacttccccctgataaatgtcgtttcgtttgggtaaaacataaaaaaaacatgtgaattcatgtaccgattctgaactcattaaaatcattgcatgagctgtagcagcaaaacaagctatgatgctgaaacgtgagagtattcacgcatcaaaaagatacaatgacgaaataggatgcaagtcagaatagattatagaacatgacttatgtgataaattctaagcataccagcaatactcgtgcaacaagcgtgtttggtggaccataacccctagatttatttattttttttttgggggggggggggggttgttgtagataatgagaaacagctcatgtgatttcagctagcataggaaaatctactttgtggttactagtttttttgtaaaattctcctattacagtttttaatcaaaataaaaggctaaattgtttaatttagaggagcttttagttttaagaaaagctgcaggttccaaaagttctcccaacattgccctatgttctaaactaattagcatattgctaattgttcttttagtgatagcaacttactcatcgagtatgaggtgtttataagtatgtggtgtgcaattgtccattcgagttgctcatagtaataggagtgtgtgtatgtgcatgtttatatggtcactagtaatcgtgcacgtgcaatgcacattttccacgttataaaaaaaacacaaagtagattcaaagtttattatattttcctacagtatacatcacataaagtatacttcctccatttcacaatgtaagtcactaacatcaatatgagatgtgagcctatgatagagattccaataaaaaaaataactaaatcagtgcagcaaatcaagaaagagtgtgcaacacgaatcgtccagaaccaaaaactaaaaatgccaagttggtagggcttccatcatattctatataaacatgttaccacgataaaatttcaatacgtacacaggttacaaccacaaaatttaaaacatgaggctttcacgaactaacgtaatatatcgtaatcctaacgtattattgtattctgatgctcaccccttgataaagtaaatgtgagaatatcaccttcagataatcccgaggaatccttattgttttggtggcccctttggtgctatgaaggtgtaacggcaggatgacacattagtcttcttgttggttgaatgaacttctgaaatcgtagaattttgggcactttcaattttgttaagtggtggcccatgaagatattgttgattaccacaaaccagtggaaaaacatctcatttgatttaatagcaaatcagaaaattcatatgttgttattttacatcaaatcaaaacccaaaaaaatcaagacattttaatatttcagtatgatatgaaatactttgacgcaaaaaatcaaccactgatcacttccaaatacaaaggattataataattatcttcctcatatattccccaagtagctttggtcttccacacttcaccctggaatgaaaaggcattatcatttaaaaatgttaaaagccacaaaaaagaacttgtcactataaactgaggcaggaagtgaaactgtccctcatcctaatgtaggcctcaatataaaaacataagactacacctaacctctaaacatgccaatgccttctagaatgaatagagttgtgcattgagatatattgaggcaaattaagaggaaaaaatacagaagaaatttgaatcctttgcttcagagaagaccagtgataacatttttccacccttgattctggatcctcaatttccatatgcttagaaagttggacatgattagaacaaaatgttatttagccctgcgtgatactattaagcaattgctgaaaacaagcacttgaaaatgaggacgtacatatgccaaaaatcccacagtttgatgcatggcattctagcacctattagaaatgtttcagttatcaacccgataattcattttgttgaggcattaaactaaaggttgataaaccgtgcatagctatatatcagtatattattcttcctctgccctccctccgagtgttaagtctagccattcaaatcggtggagtacatatcaaacatgcagaaaatatacagaaggtaaaaattatccaataattaattacttcctccgtttcacaatgtaagtcattctagcatttcctatgctagaatgacttacattgtgaaacagagggagtacatatttgtgctgctctatgataaaaagaagagatttaccttcccctaattcagattaccaataattaccaagccattacatcatacagtacacattcacttgacacttaaaactcacaaaatagtagactccctatcagttaactgaatggatataacgcttttaacagtacaacctacctcaaatggcattgtggatagttacaaatctctcttcctcttctgttgttgcaaatctgtcaattgtaattaaaaaagtagataaataagatgattgcgtagagatttctcaaatcgtacaagcttagcaaagaaaattatctgcttaaaccaaatgggatgtttgaaactgattcaaactaaataataagcaattatagaatcattcccattggtgtgttgcacacacatttttgttgttcatggatgcagtatttaggcacgcatggacagtgttggagaaaaaaaaaagacacaggtgccagggaccatcacatggccctcaagtgtaaattaagttgcagaggaatgggcaaggtacaggaggtgtttgtgagtgagccgaggccaagcagagagaggagaacaacaaaatttgcatcaataggacatgagctaactgacaacatatatgagtgaattttaccaatctgcaaaacaaaacttttagaacaatatgtgaacttatattgaacgtcatttaagttttattgtgagcaaatgaaagcataatgtataacgttaggattatacctcaccgttaagatacactctttctaatatggggatgaagactacagctgctgcactgaatcttgaatcatgtacaaaggtaaatcaaattgaaaattgcatttataattcttcatttagagtgcaaatgaaataataccgtgagatactgaggatagttctcaaaaatatactggggatatatttgttgccaaaccgtcaggacatacaacattaaaaacatctgatttctgcatcggcaaaaatatgcaacacatgcaatcaattttgggaagcaaagagttgccaaggtggatgtgcagatcatggaaagacaatacattcactggaagctgcatagcaccttgagatcaggtctgtgttagcaaaccgattactcctgcagttcaagaactgtgaacaccaccaaaggcggccgcatcaacagctgtgacctgctgcccttcttggaaaaacaaatatatgaagatgatagcaaagcaattcaacaacctgaatcatctcatcttcatgctgatgtatgtgtgttctgtacttctggtagaaagctggagcatccgaaacataaaactcaattaaatctctaaaacaaagggattattagtgcacctttgcattgaccaatatgagggggggagcaggcgacagtagagaaagcaccaggtcacatggtagagcaggaggtgagcagtgagggaggggattggcggtagaggcgaggtgagcgggctatcggcaatggagtacatcatctcagattctcagtccgctccccactttacgatggagtccgacagtcgacagaagcatggcagcataggcgacagcactgtggccttctccctcaccctccattgtctctgcatgtggactgagaaggaagaggcgatctagcacaaatggatgcgtagcaacagcggaggaatgtaaaattggcagatccagcactaaaataagcaatgtagtcacattttcaagttttcatttgcaacagcagcatcatgcaattgcttccatagccttaccaacaaatataccatccttatttcatctctaatttcatgagaaaaattgtctattgttattcttaatttgtgcacaatcagcaaaaattccgttctgctatcatcagtttgatgggtactacttgaattgcttgaataataatttaacaatgttattttcttctccattgaaaatctatgaataaatcaaaactatgatcatgaagctcaattcttgtaaatcacatcatctagatgcattactgaaatcagagacaaagattatgaacagaggcacggggcgaggactcaccacttgttctgctagctgctgctgctcgcccctcgctgtctgatgcccttcatggatggatggcctgatatgctagctcctcgccccctcactcctgctgctcgtgccttgctgttcgctgtcgccgccgagccgctgcagcctgccacgtggcagctgcttgccgttgttgccactgcatcgtcgcttgccggcccgccgtcgccggccacgctgatagctgctagggtttgtgggctgcacaccaacggagcagctatagaaactacagaagcggcgggtgatggggaggcggacgcggcggcggtggacaggacggcgcgacatgcgttggggatcgagcactggaccaccgttgccgagttcacccagtcggcggatctgacgacgacggctgcgctcgcgaaggggactcggggacggtgatggagaggagaaggacacgaaggaggtggggaggaggaggacgcggtggcggtggggagaaggcgatgcagcagcggtgagtgggaaggaggacgacacgaaggcgatggggaggaggagaggcatgcagcggcggtgcgtggggaggaggaggacgcggcggcggtggaaggtcagggagattcggtggcgcgggggagtggcaggaaggggatcgatagcggtagtagcgagtagcgcgggcggagtcctcgcgcggtgatgggagcgaaaatcacggtggagataggatgggattgctgtgggagggtgaatcgcactggacggtagggatgagagtgatgcggacgtggatacagatggatggtaggatcaacatgttgatttcacccgtacgattgcaaaaaggcaactcctactttttatattagtatagatatagattatcgcaagattagcctaattgtattctattcaattacatgattattagtgagtgttaacttcttcctccgtctcatattaagtttagttttagctcagtccatttgtcccaaaataagtttacttttgggaggaatcattgcatcagaattagtaaaagtaaagaataattgtattaactagctgggtggcccgcgcaattgcgcggctagcacccaaacaaaatcatatattttttagtataattttacttaaaatttattaaatagctacctagctatctcatagttttaagactttaaaataccaaatcttatcatcctcgtgtttttaattatatagttttaaaagttacaccagttgctaccccttatgtcatatccttctttatttgtttgtttgatctaccactatttctattcattcttcttagaacctttaaaaattgaattttatagtttttagagtttattgtcacgttaggttttatttttataatttctagatgtaccgtcaaacgttgccattatactcctctacggcccgtccactgtctcttctctttgttgtcattgagactttaaaaatcgaacataattatcgtttgggttcattttttactttttagaagtcccgcccaaccgtcagcggctttgccattgtactcttctatggctcgcccgttgcctcctttctttattgtcattgagattttaaaatcgaacatgattatcattgaatttttttactttttagaagttccaaacctttaaaaattggacttgtagttttattttttataatttttaaaagtcccatcaaacgatgccactatgcccctctacagcccgttcgccgccaactcttttttgtcattgtgattctaaaaatcgaacataactattgttgtaattcattttttattttctagaagtcccgtaaccatcggcggctctgcaactatactcttatacaccccgcccgctgcttctcctttttattgtcattgacattttaaaattgaatatgatcatcgatgttttttttttactttctagaagtcccggcaaccgccttactcatttttgccttactcatttgcttcatggcctgcctgacgtccctctttttaatcgtcattaggattctacttggtgttttattaataatttttatatctcgtatcaaccgccaccactctactcctttataggcatgttacttaatttatatcgtcatgtgttttttagatggtcttttctttcaataatctttatttttatcacaaattttagttatttataaattgtattcctaattgaaatcttatttttctttttctaattttagaatttttttaaaaaaaattagttaatatcgtattgtgttattttaatgtttttattttttattttgaatttcagttgtttcgaaattgtattcctacttgaactctcttttaatttttctaattttagatattattttatttttattctaaattttaattaatctcgtattgggttcttatatagattcttctttcattattgcttattttaattccgaatttcagctaattttaaattgtatttctacttgaactcttcttttattttcttttgctaatttcagatttatttatttttattccgtattttaattaatctcgtattgggttcttatatggactcttcttttaatatttcttatttttaattccgaatttcagctatttttaaattgtattcctacttggactctcatttctttttctaattttggattttattttatttttatttcgaattttgattaatctcgtattgggttcttatatggaaacttatttcaatattccttatttttaattccgaatttcagctatttttaaattgtatttctacttgaactctcatgtccttttctaattttggattttattttatctttatttcgaattttgattaatctcatattgggttcctatatggactcctctttcaatattgcttatttttaattctgaatttcagctatttttaaattgtacttctacttagactctcctttttcttttttctttttctccgattaatgtgtgattttctagctcccacagcgaacgtggggcctcctttcaaagctgttttaataatataatagattaggagtagataaagagatgaattgcattgggatttgatatattaggagtatttctttttattattactacctccgtcccatattacttgtctttttgagttttcgtttgtcaatgtttgatcattcgtcttattcaaaaaattttggaattattatttattttgtttgtcaattgctttattatcaaaagtactttacatatgacttatctttttttatatttgcattaatttttcaaataaaacgaatggttaaacgttgcaaataaaaagtcaaaaacgtcacctattatgagacggagggagtattattggtatgtgtaggatgggtaaaatattaacttatttgggacgtatgtagtagaactagtatatagatatactaatgtaggattttacactaagatgtacgctacattacaagaaacaaaaatgacaagtagtgctcaatcgcagttctatgtgagaagttatcttatattactaaaagaaatttacagctaacaattcacggtcgtgcgaatatactagcatttcaatacactatgtatcaaaaaataaagtccacgtcctaaatatcaggattgttgaacaggcaccgcaaaatgtgactatccgaagttagagttttatttgaaatcaaaatatacagcatactcctatattcccaggagagatgaaatgcaaactattacataggtagttcggccgaaaattgatacttgcatctaaaacaaaataagcgctctgaaaaaagcaactataaactaatcaagtagcgctagccttgacgacggcgacatgacccaattcaactgaacccaagtaaagcttgccgccgcctctctcaatcacctccgttggccagacgttcttcggccccctcaactcctgcaagatcttccccttgcgaccgatccttacggcgaggaggtgggtgtccgagccatacggcgtctcggtcttctcgcggtgcagcgccacccagtagcctcccttcccatcgggcctcacgttgtccgggtagcccggcagctcggcgaacggctccgacgtaccggccttggggccctcgatccagtgcctcaccagcttgcacggccccgtcagcgccaccacgaggtgactccgatcggcgctgagtgcgagaccgttggggtacgtcattccggactggagcacgtcgaggtagcccgtcgtcgggtcgtacttcatcaggcggcccgtggagtcgccggtggccgtgaccctctcgtgctgggatcgctggaagcgcgtgctgctgtctgtgaagtaaacctcgccggtgacctggttgacgtcgacaccgttggtgaacttgaacggcacgccgtcggcctccgtggcgagcaccgttgcctccccgccgcgcgggccgacacgcatgaggcccttgtacgcgtcggcgatgtagaggttaccggaggtgttgtggaaccggaggccgagcggccggccgcacttgctctcggtgagctccgcgggatggagcttgggagccatgcacttggcgacgttgtaccccggggcgtgggagtactgttaaactttgcactaggatcacctaggttagatctagtcgggtggttctatttgggtttgatgaacgacattgtagatgaaagggagagggtttagataccgaccggttgaggagatcgtggaggaagaggcgccggacatcgtcgttgtcgtcgcggcttgacgtggatgcggcggtggcgtttcccgtcactggctgcgccccctctcgatcggattagggttttgtggggtggagttggcggcggcggtgaatctcgtaccatgtgccgtgccggcctccacccctcttttatatggcgcagtgtgacgggggcccaccagccattgggctgggcgcccccgatcagggcgcggtcaaggcccccttgagccgttgggctcaaggggagagagatctatctaacattctcccccttgatctcactttttcttttagctttttctattccatcacagatttgtaaatagagcatgtttcatcgtcacggtcaatcgccgatggattcgacagccactatacacatctctattcagaaacagatactttacttttgggccctgtagtccaggattcataaggcttcccttaaacccatgccggctacatgttccttgaacacgttgggtggtaggcctttcgtgagcggatccgcgagcatcctttctgttttaatgtgctcgagactgattgtttgatcccggactttgtccttcacaacatagtactttatgtcaatgtgtttggcagcaccacttgactgattgttgtgagtgtacattactgcgggttcgttgtcgcagtataactttagtggtttctcaatactgtcaaccacctttaaaccgggtatgaacttctttagccagttcacctgccccgttgcctcatagcatgctataaactcggcatacatagtagaccctgcagtgatagtctgttttgagcttttccatgaaatagctcctcctgccagggtaaacacgtatcccgatgttgactttgtattatcttttgcaaagtcagaatctgagtaccccactatctggagtgattctgatcttctgtaagacagcatgaggccttttgttccttgcaaataacgcaagactttctttaccaatttccagtgctctaggcctggattactctgaaatctgccaagtaacccggtaacaaatgccaagtcaggtcgtgtgcacacttgcgcgtactgtaggcttcctacagctgacgcatatggctttgttttcatttcattgagctcatactgatttctgggacattgcgatgccccatacttttcgcctttcattataggagcaggtgtagcactgcatctgtacatgttgaatttcttcaacaccttttctatatatgtcttttgagaaagtcccaatgcatactttgttctatctcggtgaatctctatgcccaaaacatatgaagcctcaccgaggtctttcatgtcaaagtttgaggacaagaatttctttgtttcctgcagtagactgacatcactactagccagtagaatgtcatccacatacagaattaggaaaataaatctcccattcttaaactttgaataaatacagttgtcctcgacattctcttgaaacccaaatttctttattgtcccatcaaacttcaagtaccactgtctcgaatcttgctttaatccataaatggatctctttagacgacatcccatattttcgtttcctttcatgacaaaaccttttggttgcgccatgtatactttttcctccaaatctccatttagaaatgccgtttttacatccatctgatgtaattccaaatcataatgtgccactagtgccattataatcctgaaggaatctttacaagagactggagaaaatgtctcattgtaatcaatcccttctcgttgcgtgaagccttttgccacaagtcgcgctttaaacttttctatattccctctggagtcatatttggttttgtagacccatttacagcctactgttttggctcctttaggaatttcttctaaatcccaaacatcgtttagtttcattgatttcatttcatctttcatggcttccaaccattcagatgagcgagcgcttctcatggcctcttcatatgaggtgggatcatcctccatatgcgactcttctatattataaactttatagtcatcacggatagccgatcttctgactctttcagaccttctaggggcctgcacatttggcacatcctgtacctgaggctcttgatgagtctcctgtactggcacattatctatttgaggctgttgtagctcctcctctggcgtggcaaccatttctgttgaatcctgtataacaggttcctcactctcattcattgttgccacaggaggggtaacaacaggtgctggtacctcaatgacaggcattgcaggcacaacatcagcaggtagagagaagaaaggttcctgagtcgacggagcgggtacagacacccgcctctcctcaagatcaatttctcgaactaccgagctccccctaatcatttcgtcttccaagaagacggcgtgtctcgtttctacaaactttgtataactgtttggacagtagaaacgatagccttttgatctttcaggatagccaataaaatggcaactgactgttttggggtccaacttcccaatatttgggttaaatactttggcctctgcaggactcccccacacacggaggtgagttagcgagggtactctccctgtccatagctcatacggtgttttgggcaccgatttgcttggaactctgttgagaatatgaatggcggtttttaacgcctccatccataaaccgagtggtagtgtggagtagctcatcatgctgcgcaccatatccataagggtacggttgcgcctttcagctaccccattctgttgaggttcgcccggtgttgaatactgggctactattccattctctagcaagaaccttgcaaaaggtccagggacttgcccataaggcgtatgtcgaccatagtactcccccccacggtcagatcttactactttaatctttatatcatgctgattttcaacttcagctttgaatatcttaaatttatccaatgcttctgatcgctctttaattggataaatataaccatagcgggagtaatcatctgtgaatgttatgaacgagtcatagccatccacacttttcacaggaaatggaccacaaatatctgtatgaatgatctctaaaattcccgcgcttcgttttgcaccctttttgatgctctttacaaattttcctttaatgcattctatgcattgttctaagtctgagaactccaatggaggaagaatttcattcttaactagtctctcaattctccccctcgaaatatggcccaaacgacagtgccataatttcgatgagacatcgggagttcgctttcttttcttgttttcttttgtcaacgaggacacaacattcacattctcagaaagagataacaaataaagctcgtctcgcaacacagcaagaccaatacatgcattattatgccatagttcacatttgccatttccaaagcggcaatcatatccatcaaaatccaactttgatacacttattaagttcctttgcaaagaaggaacataaaagacatctcgaagtaaaagtatgaagccattcgagagctctagaggaagatctccaacagcttcaactttttcttcaactccattggcaactctaatggtgctttctcttctttgcgtagtcctcgtcgaacggaatgcctttaaacaattacaagcatgaatagttgctccagaatcaatccaccatgtggatctagagtaaccaacataatgagattcatttacaaatgtaataatgttctcacctttctttgccatgatcattttcaaaaaatcaggacaatctttcttgtagtgtcctgtcttcttgcagtggagacattgatctttctcaacagcgaactgttgttgctgaggcagatgctgagactgtttaccttttgaggtgggagacttgtggttctttttcttatctttaacatagtttattgaaccaccatttgattctttgattctctcctcctcttgcacacaattagcaatgagcttctcaaagttccatttctctggacttatgttgtagttgacaataaaattgtcaaactgctttggcaatgaggccataaccagatggaccagaaagtcatctgttatgcccaaatccattggcttcaacttggaagccatgttgctcattctaagtatgtggtctctaacaccacctccattgtacctttctgtcacaagctgcttgatcagctgtgtagcataagtctttgaagagccagtaaactgactctttattctttcaaggtactctgagacagcgtcacactctgggatcgagcccaatatggtaggctcaatcgtattctttaccacagccaaacatttcttgttggctaaggaccatttcttttgttcaatgtcatacgacatgacgagaggagcattgtccctatgtctcttttgccagtcagcatctgactcactttcacctctgacaaggtcagcaggttctataggacatggggtagtcaatacccagtccacctctcccaagataaaagcaaggtcgagttttcttttccattctgcgtagttatctccttttagggtcggaatatctttaatgcaacccatcaaggagtagccacctgaaataatcatgtgcggtgagaacaaaattaacattaaaatattatgcattaagcctacatcaccgttgggcagaattagacataacacatataaccataactataatattgcaattaacaacgttggtcagaaaattacaacatcatagcacataattaatgttcctaaaattaaattctcccgttggttcgaaatttaattttagaaacactaattttcatcaatttcatctatttgcagcggaagactatataaaatcatatgaacagtagcaaaatctctgtaattctctctctgtgaaaattctcccgttggttcaaatttaaacagaggtaaaacatgcaaaaatctattcaaaattctattgaaatttgcatgaaaaatcgacaaaataaaatggaaaaattgctactgttctcttttattcattttcggccccgagggacctaaattgaacttttccggcctttgccggtcggcctatggccactttgcgcgcgggcgagcgccccctcccctcccccaggccgcaacctgggcctgggccgggaaagccgccgccgcgcgctccccacttgggccgatttcggtccggccgccgccggccgtccgatcagctagggtttcgatcggacggccgggcgccgagatcggaggatcaaaaacccccctctcccggccggccgccgaaaaccctagcttctcttctcttctctctctcacgcgaccgcgtggacggcgtcgccatcgccggcgaccttcgcgccgccgcgccatggccggcgctcctttcttttctcttctccgctccccccaccgtctctaacccccaccgtgtgagagagagatggcgacgacggagatggcggcgccgccgcgggccccctcgccggcacgcgcgtgcaggtgcgcgcgcggccgtcgagtggctcctaggcggcgcctctttgcccctccccccctccgttgccggcgtcaacgacggccggcgacgaggtaagaattagggttagggtttttggttcttttgatccgtgcggatcttgtgcttttctttctttggatttctttccccgaaacgatctaaacactagggttgctctgataccattgttaaactttgcactaggatcacctaggttagatctagtcgggtggttctatttgggtttgatgaacgacattgtagatgaaagggagagggtttagataccgaccggttgaggagatcgtggaggaagaggcgccggacatcgtcgttgtcgtcgcggcttgacgtggatgcggcggtggcgtttcccgtcactggctgcgccccctctcgatcggattagggttttgtggggtggagttggcggcggcggtgaatctcgtaccatgtgccgtgccggcctccacccctcttttatatggcgcagtgtgacgggggcccaccagccattgggctgggcgcccccgatcagggcgcggtcaaggcccccttgagccgttgggctcaaggggagagagatctatctaacaagtacgtcgtccagcctttgtcggcgccgtcccagcggaggatgcggccgtcggagacgccgctgttggggccatcgccgaacttgtcgaacgcgacgctctcagggccaaccagcgttgcgggcagcggcagcgtctcgaccagtgtggcggaggtgtccttcgcgacggccgcggcgagggcgtgcgatggcaggagcagcaggaagacaacgatcgtcagcgccacccgagtcagagtccccaccctcccggtgccgaggacggcgcccatgaatgagattgagaatcgcctttgctttgcttcgtctggctgtcaaactagcttctcttcttcgcttcgcgctttgtaatggtgagatgttcttcgcttctgagatgcttggattggtggagagcggtggccgtgcctttataccggtagccacatccacgtcgtcgattcggataccgactccgatccgattccgactccgattttacaacgaacctaacctcagcttgttgccttgtttacagtccagactgtgcttaatttcggcctgtgtatgaatggatctggatctaatgtcagcccatgaaaaaaggttggatggttaggcctgcattgaatttgatatggatgtatgtttggcccagatataattttatatgggcttagtttccagccgacgtatgttatgtcgtgggcaatttacgccctcagttaggaataagttcactttgagtccctcaaaatatagctccatcaaatttatatccgtgaaccgcaatatcagatattttaaacccccaactattaaaaccggtgtaatctcactccctcagcaattttgaaggacaatttctttgacgtggcctttgacttggtccaacctgctgagttatcctgtaaggcccacccgttagtgacccttatataacttatcttccttcctttcccctccatttgatcggcgccacccctcttcccccttctgctccacgttgggccgccgtcaggaaggagaagtgcgttaggagcgacgtcgaatgcagtagtggcagtagggagagtggcagaggtggtgcaggtcaggggtggctctccggcgagataagctacggcggcttgacagaggtcgcggtttgtagtgacgatggcgtggttgtggcggttcttcgatgagataagctatggcggctcaacggcgcgcgcaatccttttggtgagataattaagctacggcagctcgacgggtgtggtgctctgcggtgacgataacatgggtaccgccgtgctcattcgcattgaggtggggtgcttagcaacgacaaggtgtctagtcggactagttccgtcccttttctttgctcttaactaaacataggagcttatgtgatggcaacaagaacagagaggaggcagggtggcggaaagacgtagccctgctttgtcttgaagtttgaagcaaggaggaaaagcttgaagctagtgttttagtttttctttattgtttgttatatatttcagttatgagattaagaatgtaacttatggttgtataaatatccacttgaggtcggatttctaaccgctcttaagcttttttttttgtgtgtgtctttgattactgctcaggataaattaaagagtgaaatacatggccggtctctaaacttgtgtagtggtatcacttaggtccgtaaacttaaaaattatacgtttaggtccgtgaatttggtttaatgtaccactccggtccaaacgtcctttgactgtgtttgaccgccaacgtggcatgccacataggcaacacttttgttatcagccccctctacatcacaacacgtcgcatatatctcgttgtagctatatagtgacaccagaatcccaccccccaccccccccccaaaaaaaaaaatcctcaaatcgttcttccctctcattcttctccttgcgtgtatagaaaatacggtcccaattagcaattgccattgcactgcctcccgccgctaatccggccgcactgtgccaccgctaaccccactgcactgcgctgcctcctgccgctaatctcaccaccgaggtcgccacagccgctacctctcggctccttccactaacctcaccgaagccctagtcgatttagggattatttttaggggatttgggttgaaatgcactggtcagggcaagttatgtgcgaagatatatgtggagggggctgagcataaaagcattgcctacatgacatgccatgttggtggtcaaacgtggtcaaaggacaattggactggggtggtacattaaaccaagttcacggatctaaacgtgtaattttcaagttcacggatctaagtgacaccacctcacaagtttaaagaccggccatgtatttcactctaaattaaattatttacttagttatcaaagtgtggagtaaataattcatttgaataatctgatgaacaataatcttttaaaaacacatagcctagtccgtaaaattatattacaagcagaaaacctacatgaagcgatcagaatgtcagatatagtatccctgacaaattcggatatcaacgtcccacttctaatcagaatatttgctatactacggagtacagagttactagttacgctaagaatccgaaattagactagctaaatgctacttcaacacccaaatcggaaccggtggtcactgttcagccccagatacgaaacggagtcggtgtccgaagcttggacgtggccactggtataaaggcacgggagcaccacgccaccaatccaagcatctcacatatctcagaagcgaagagcacatctcatctcagcatcagagaagtgccaacgcaaagaacagagtttgaaagcgagactatacgcaagcaaagcgatcatccatgggcgccgtcctgggcaccgggagggtggggactctgactcgggtggcgctgacggtcctcgtcttcctgctgctcttgccgtcgcacgccctcgccgcggccgtcgcgaaggacacctccgccacactggtcgag

SEQ ID NO: 6338 - DNA, 42607 bp, Oryza sativa
tatgcgggaaatgctagaatgacttacattgtgaaacggaggaagcacttttttttttgaaactgaactcagtacttgatgctgaaagggttggtctcgttgcaacgtgtgctttaatttgtttgcagtggcattcctggcttggtagttggtagcgaccgtttttttgacaaattgacccttttggaaaacttacttcgaaactaacccctgccaaaaacttcaaccaaaaataggccgtcgcctcagcgccaaacacattggcgctgacgttggtcgtgtcagcgccaacgggactggcgctgacattgtgccaccgtggcggccgggccgatcccctagctgacgtggcagctacatcagcgccaaccgcttcggcgcggaggtgcccaacctcagcgccaaccggactggcgctgaggtgggacttggccgcaacccccaggcccagaccagcaagcctcctggatggcttgcgggctgggatctcagcgccagccataatggcgctgactgtgggaaactcagcgccagtccacctggcgctgaggtgggacttggccgtttcggccgtggcccagcccagcaagccttctggatggcttgcgggctaggacctcagcgccagccataatggcgctgactgtgggaaactcagcgccagtccatctggcgctgaggtgggacttggccgtttcggccgtggcccagcccagcaagccttctggatggcttgcgggctaggacctcagcgccagccataatggcgctgactgtgggaaactcagcgccagccaacctggcgctgaggtggaacttggccgtttcggccttggcccagcccagcaagccttctggatggcttgcgggctaggacctcagcgccagccataatggcgctgagtttgggcatgtcagcgccagttagcatggcgctgacgtcccagccctgctaaaacttcagcaaaactttgcacacaacacaggcaaacatcaaatgacagaaatttacaggcagtaatatatccagagaaccatacaaaacatacatccatccatcaatcccaacatcattccatacatccatagaatccatcaatacatccatatatgaagtccatacatataagaaataaaaacatcccatcgatcctcgtctatacatccagtcgagtccatacatccagtccatacatccatcgaaccatgcatcaagtccatccatctatccatccatccattgaaccatgcactcacctcctcctacctctagtgcgaggacgaggcacgtcgggggtgtacctccagtcctgcgaaggagcccgccggcgtcgtggtcgagacgggccgggctgcgagatatccggctgtgacgactctggtgcgtcctctagctgcgagggaccgagctcatccgcctcctcttctctgtcctcatccccttcttcctcctcatctccttcctccgcctctttgtcttgctcgccctcctcgtcacccacctccccttcttcatccccctcttggtgggcatgagcatgttcgaccacatcagtcgacctgcagccgagccttgctgccaacttccgacatcgctgccgtagtctctgcataaaaaataagccatgttaagttatcgcttttggaagaaaacaccgtagtttcatctctttccaacgattacctgtagggcgttgcggagggtgccgccctctccttcggagccaggagccgtgcctagcgccactcccgcgtcgttgacggtccgcaagagctctcgagcctgtaggattgaaatgaagtaagtcacaacatatatggcattgaaattgaaataatatacaacattaatgctagaaacgaaccactctgtcgcgaacaggtcccgtctcgaccgtggtacctagacgggtacgagtatcgtactcgttctgctcctcaacatcctcggggtcatccgctatgtcggctagtgtccaagccggacgtaggacaagacagtaggtccaacatgttagcaagaaattgaaatgttatgaaacataacatgcgtgaacttacctgtagcaaccaaacacagcctgctaggttcgcgtccccgccttgccttcggcaagcatcacagagttgccggtacaaccaggctagggcagccgacccccagctgaaggtacccgcctcgtcccagtccgcgagcaacggcagccacatccaagaagccatgtctccaccagagtcagggaacagaatactgccgaagatgtacagcacgtacgccctgcagtatcgctgtactgtagcctcgtctgcctcagcgggacactgaccgaagttggctcgcaaccaactcaaaggaacccctgatgtcttcgtctgcctctgaccatcaggtgccactggaggctccagaccaaggtactcctcgaccctctccctccagttccccgacgctgtgtcaccttgtcggtgatatgggaccgggagtatcatgaccagaggcttgaggcagacgcaatcgcccacgtggcctggcaccttcggggacgtcgggcccgagggtgaggtgtccgccctcctcctgatttcccccgagggggggtcgggttgcgcttgccccggccccgagggccgaggcaccccgaccccttaaggaagtctgcgccacatatatgggataagtgagcacagctgtgctcacctaacagcatttattgcagtctggtcaagcgtgtcatgctgcatgcaacgcagtacagcgcgttcctttatccggtctgtgaccagtcacagaccggtcagatcacgggttaggtggcgactggcggtctgacgcacgccttgccccatcccgtcaagacaaaagtctgtaggcactcgtctcaagccggagctagcgtgttatctcttagagatggcacgttagccctggtcagatttataccaggcttcatcctaaccattacaggcaaggtgttacacgaagaagggcaaacatgcacgttgttaagctgacgcgtggcggacaagaatgaccggtctggcactggtcgcgtcatcgacagacagccacggtcccgcgtcatctctgtcttcgggggaggtgggggtaggtgtgggctgtcccatcagaagggctcccggatggaaaccgtaccgatctccgcccattaaagagaaaaagaacagtccagtttggaaagagaaaggggcatgtggtatccccttgagatataaaaggaggaccttgcccatttagagaagggactttttcccttttggaaggctgaggggaaagggagttaatcctttgtaacttgtccatacacaaatccacaaaaacacaggagtagggtattacgctgagcagcggcccgaacctgtatagatcgccgccgtgtctcgcgttttctccgagcaagcgatctttccacatatagaaagagcttgagatctcaccctaagcccccggccgaaccggcaaaggggggcctgcgcggtctcccggtgaggagccacgagctccgtcatctggcgcgccaggtagggggctcagcgtgtgttttctgagctctcatactcttccgtgtgcgccaagtttcccttgttctgcctaatggccgagcaagcaaaggcgcacgatctctctccgagtgtgagcggcgacgacggggaaccaaatccacgccgtcgagctcgtactcccccacctcctccgcgccaaagccctaagcagggggaggcgcttgagagggtcgacaaatccgtggcatcaccagtcgcaggtgatgcaggagaacggcgagatggggagcgtcgcctcctcgtctacggcgacggcagcacgcctcagggcgcgcttcaggttgctggcgcgctcctacgacacccgcctgtcgtccatgacccggagtctccagcccaacgatggctggaagacgtggccaacttggtcatgacggctcagcagcgcttgggtgctggtggacggtccgccaccaccaagacctccggcgccgctaccaccggctccgtgtcgtcaaggcggagggcgcggcgagcggcggcggctgcacgtcattcggctgctactccctcgtcgacaccttcgactcggaaggatcagcatggggagccggatgcccgcctcaacatcgagcgccggcgtaatagccggcgtaccccccgtgcaacggagggtgcctcctcgtccagagtgtcacctcgacatggacgtgaggaccagccctccgtgcccccggctggtggtgttggctgtagagcctttgtggcgagtcttcggaatgtccgttggcccccaaggttccggcccaccatcactgagaagtacgatgggagcgtcaaccccaccgagtttctccaggtctatatgaccgggatcgaggccgctgggggtgacgacagggtcatggcgaatttctttcccatggccctaaaaggacaggcgcggggttggctaatgaacctgccacccgcgtcggtccactcctgggaagatttgtgccaacagttcaccatgaacttccaaggcacatatccgcgcccaggcgaagaagcggacttgcatgcagtacagcgaggcgatgatgagtcgcttcgctcgtacattcagcggttttgccaagtccgcaatactataccatgcatccctgcacacgcggtgatctacgcgttcagggggggcgtgcggcacaaccgcatgctcgaaaagatcgcttccaaagagccccagactaccgcggagctttttcagcttgcggaccgagtggctcgtaaggaggaagcgtggacatggaactcctccggttccggagtggcagcttcggccgcccccggatccgccgctcagacagggcggcgtgacaggaggaggaagaagaggtcggaccgttccggcgacgagggtcatgtcctcgccgtcgagggcgctccgcgggccacccgaaaggggaggcctgcgagcgacaaaaagaaagaggctggtactcccagcagggagcgccccgccggcaggtggtgctccgtccacaacacctccctccacgatctcgcggactgtcgtgcagtcaaaaacctggctgagcgaacgaggaagtgggaggaggacaggaggcaggaacgccgtgagggcaagtccccggcggttccttctggcaaacggcgaagtgaggccaagcagaaggcccccgctgttgacatcgatgatggtgaagatgacctaggtttccaagaacctggggccaccattgccaccgtcgatggaggagcgcgtgctcacgtctctcgccggagcttcaaggctatgaagcgagagcttctggccatggcccctactcatgaggcgatgcgtcgggcgcggtggtcagaggttgctctcactttcgaccagaccgaccacccaccgtgcattgcccggggagggcaggttgcgatggtagtttcccccaccatctgcaacgtgaagttgggacgtgtcctcatagatggaggagcggctctcaacatcctttcccccgcggcctttgatgctatcaaggccccggggatggtgctccagccgtctcaaccaatcatcggtgtgacgccggggcacacatggccattaggtcacatcgacctaccggtcaccttcggtggacccgccaacttccgcacggagcgggtgagcttcgatgtggcggacctcagtctgccctacaacgcggtcctagggaggcccgcgttggtgaagttcatggcggcggtccactacgcctacctccagatgaagatgccgggccccggtggccccatctctgtccgtggcgaccttaaagtcgcgctcgcttgcatggagcagcgcgcggaccgcctcgctgctgcgtccaagcccgagggtggtgacgagaggcttggcccctctgcccccaccgccccgaggcagcggatggccacatgcgacgaggtcccggtcaaggaggttgccttgggcgacggcccatccaagaccacacggatcggtggtcttctggatggcaaataggaagacgcgctcgtctccttcctgcgggcaaacgctgatgtcttcgcatggagaccagcggacatgcccggggtccccagggaggtgattgagcaccgtctcgccgtgcggccgggcgcaaggccggtccgacagaaagtgcggcggcaggccccggaacgtcaagccttcatccgcgaggaggtggcgagacttctggaggccggattcatccgtgaagtcatccatccggagtggctggcgaacccggtggtcgttcccaaggcgaacggcaagcttcggatgtgcatcgactacaccgaccttaacaaggcatgtcctaaggatccttaccccctgcctcgcatagatcagatcgtcgactccactgcggggtgcgaccttttgtgttttctagatgcatactctggttaccatcagattcgcatggctagggaggatgaggagaaaactgcgttcattacccccgtaggaacctattgttatacatcaatgcccttcggcttaaaaaatgcaggtcctacttttcaacgtactactcgaatttctttgggtagccaaataggacgtaatgttgaggcttatgtcgatgacttggttgtaaaaacgcgcaaccaagaaactttactttcagatctagcggaaacttttgagaacctccgctccgcccgcataaagctgaaccccgataagtgtgtgtttggtgtacctgcgggcaagcttctcgggttcttggcctctgcccgaggcattgaggccaaccccgagaagattcgagctatcgagcggatgcgcccccccagcaaacttagggatgtgcaatgcgtcaccggttgcatggccgccctaagtcgtttcatatcaaggctgggagagaaggcgctacctttgtttaagctcctcaagcgctcggggccgttcacttggacggaggaagctgacaatgccctcgcccagttgaaggcgtatctcagctctcctccggttctagtcgccccggagccaaatgaacccctgctactttacttagcggcgaccccccaagtagttagtgcagcgttggttgtggagcgcgatgaggacaatcctcattctgcgcacccccactctgtgccgacttggcccgggagcaggcagggaggagaagcccccgagtcggacggtggcctacggcccctgacgaccggagtcggccctctgcccgcttgtcagacggtgctgggtgcccccgacccacaggaaggccccgaggccactgcgggaaggccgcacctatcgccctttggccccgaggctaaccctgtgctgactcgacccgggagaaagcagggagaagaggcccccgagccgaacggaggccagaggcccctgacgaccggagctggccctttgcccgcttgtccgatgacaccaggagcccccgacccccaggacggctccggggccactgtgggaaggccgctcctgtcgtcctccgaccccgaggtcatcggcacagaagacgagtgcgccccaaggggccacttggacgaagaacgccccggggatacggcccctagcaaagaagatcggccccaccgaagggtgcagcggcctatctactttgttagtgaggccctccgggacgccaagacccgatacccacaggcccagaagatgctttacgctattctgatggcctcgaggaaactgcgccattatttccaggcgcatcgggtcactgtggttacgtcttaccccctcggtcaaatcttgcataatcgagagggtacaggacgagtggtaaaatgggcaatcgagctttctgagttcgatctgcactttgaaccacgccacgctatcaagagccaggccctcgccgattttgtggcagagtggaccccggctccagagaccgtctcaatgcccgaggctagcacgaacccctcacagctgcctcatgccgcccactgggtgatgcaattcgacggttctctgtctcttcagggcgccggtgcaggggtcacgttgacctctccaaacggagacgtcctcagatacttggtccgtctcgactttcgagcgactaataatatggcagagtacgagggactccttgccgggctcagggtggcagccgggttggggatccgccgcctcctggtgttaggcgactctcagttggttgttaaccaagtctgtaaggagtaccggtgctctgatccgcagatggacgcctacgtgcgccaagtacggcgtatggagcgccattttgacgggatagagcttcggcatgtgcccagacgggataacatgatagccgacgaactctcacggctcgcgtcctcgcgagcccagaccccaccgggcgcctttgaagaaaggcttacccagccgtcggcgcgacccgatcccttaggggagacggatgcgcctgaccggcccccgaggcccgtcggagtccaggcctcgggacccgaagggagcgctccaagctcccttagattgattgcttggatctctgagatccaaacatacctcacagataagactctacctgaggaccgcgaagggagtgaacgcgtacaacgcatttccaaacgctatgtgttggtagaagggaccctctatcggcgcgcggctaacggaatcctcctgaagtgcattcctcaggaacaaggcgttgagcttcttgcagacatccatgagggcgagtgcggagcccattccgcctcgcgtaccctggttggcaaggcctttcgtcaaggattttactggccgacagctctcaatgacgcagtcgatctggtccggcgatgcagagcgtgtcagttccacgccaagcaaattcatcagccggcccaggccctgcagatcataccactgtcatggccatttgctgtctgggggcttgatatcctgggaccgttcaaacgggccccgggcgggtttgagtatctgtatgttgcgatcgacaagttcactaagtggcccgaggcttatccggttgtcaagattgataagcactctgctcttaaatttattaagggcatcacggcccgttttggagtgcctaaccgtattattacggataatggcacccaattcactagtgaactcttcggcgactactgcgaagacatgggcatcaagctctgcttcgcctcacctgcccaccccagaagcaatggccaagtggagcgcgccaatgcagaaatcctcaaaggccttaaaaccaagaccttcaatattctcaagaagcacggcgattcatggatcgaggagttgccagcggtgctctgggcgaaccgaaccacaccaagccgagcgaccggggaaacgcctttcttcctcgtctacggcgcagaagcggttctcccatctgagctcaccctgaggtctcctcgggccaccatgtactgcgaggctgatcaagatcagcttcgtagagatgacctcgactacttggaagagcgaaggcggcgcgcggccctccgagctgcgcgctaccagcagagcctgcggcgctaccatcagcgccacgtccgggcccgatcactctgcgtcgacgacctcgtcctacgccgcgtccaaacgcgtgctggattgagcaaactctcaccaatgtgggagggtccgtatcgagtggtcggtgtcccccggccgggctcggtacggctggccacgggcgacggcacggagctgccaaacccgtggaacattgaacaccttcgtcgcttctacccttgaagggggggggggtcgggtgtcaggttttggctcgggctaaccccgcacccccctcgggtgtgccgggttagccgggggctaccacacatgcacagctttacttttcgtatttcagcatttcaataaaagaagtttcaatttcctaaaggttgtgtctgtgccgtttttccttctgaagaatcttaacttgaaataaggtcactcgtgctcaaccttaccctcgggggctcggttcggtcagctaaaatcgccaaacggggcccagaaccgagccgtgccccgggacgtggtgaactccgggggggaaccggcaaaaacccacaatcgggtcacccatacccctcggtcaccacgttcccggcctggccagtctcgacatgcggacttgggcacgagcccttatttcaagctaaggcgcaaaaggaccatggcacagatcatcctcatctcatatatagcaaaataaaactaacacaaaaattttttttcatcatttctcattgcagattgagttaatttatacaaaaaagaggcatgaaggccttagaagaaagaacaagaaaaaagttaagattggcgggggcctgggggctcattccaatgcgcccgggtcgccggcctcgtcgccgccgtcatcctcatcgctggcgtcgccctcctcgtcggagctgggggcgaacgcgagcagaggggccgacccctcgaagccgtcgacgatatggtcggcagcatcccggacgcgcgcgcgcgtcgtcctcggtcccgggagggaactcctccagcgccatccagggagagaaatcggggtcccgggcctggtaactcgctagcacgagttcgaccgccccccgggcgaggtccctcgaggatgacttgatggtcttgtcgagctccacggggagtcgttcgaggacccaggccatcctgttgaggtgcggagcgaggccttccaggttgctagggcgcgtcctcgtctggcctttccagaggcccgcttgccgaccggcgcgatccatgcgggagaccgagtcccaaagcatgtcgggccccatctcgctcgccaagcggagggcctcggcctccccgatggaagaatccagcgcgcgctgcatgtcagcgacggtgtgttcggcagccgcgaggcgagcggctaagtcgctttcgcccgcagccgccccaccgatgcgcgccctcgcggccagctctttctcccgtgcctcgaggttggcagcccgctgctccagcgcggctctctcggcacggacgcattcaaggttgcggcgcgcctgctcctcttgcgccgcctcccggagggagaggctgtccgccagccgttgcgtcgtggcctcggcctcctcgagagctcgctcccgctcagcgagtgcatcctcgcgaaggcggagcgcggactcctcctcggcgcaggcggcctcgtgcgccgccagcgtcgcctcccggagagcagtggcggcctcgcggtccgtgaagcccttctccacggtgccggcgtgttcttccagcgccatggcacgggcctcaagggcctcctcgcgccgccgggacgccgcttcggcttccgttgcccgccgctctcgggcagcagcggagtcgagaaccccttgggcggcgtcgagcttgttcttcaactccgcctcccagctcccgtgttgaaggcggagggagtcctgcgcctcgatcatcgcggtggtggcgacgagggcggcctctcgctcctcctccacctctcgggcgatctccgccagcgccgtcttgcgggcttcaagctccgagatgtggcggcggtgggccttacggcccacctccaccatggcgtccaccgagcgccgcccctcctcgacgcgcgcccatgcggcctcgagctccgctcgttccgctcgcaaggcctccacttgggcgctaaatccatctagcaccgcggtgtttgcggcggccaaggcctgcataatgggctcggcgctcaccggggcgacggaagaggaggagaagagccgccttggagaaaatgcgacgcggcttggccccccgaaggatgcgctgggctcggggatgtcccccgggcccgtttggtcctgggcgtcgcccggtgaggtaggcccaggcgatgtgcccgcggcctcgtcgcgagcctccccggaggctgtcgcctgagggttgcccgagggagtgggcccagttgacgcgccagcagcagctgttgcctcagcctggcgagcccgggcggcctcctccttagcggcttcctcagcccgggcggcctcctcccgagcagcttcctccgcttggcgaacccgggcggcctcccgggcggcctcttcagcttcccgaaggcgatctgcggcttcacgccggtcagcttctcgcctccgctcttctgcggccgccggatcttcggcctcggactggccggacttggggtggcgggaggagtgcgacgggacatcgctgaagcagaagaaaaaaccagaagacaaacaagatgggtaagagaaaacttgtttaatgggatagaagaaagacggtcgcaatgagaatggggcgaacctgcgaaggggtcggttgaatgaccactttggaggggaaatcaggtttccccggcatggttccgtctcccccgtcttgcggagccgtttcttcttgcgctccccctcgggctgcgacgtcggcgcggccccctccgggcgccgactgctggcacgcgccgccccgccccctcggggaggagatgggggaggtgttcctcccaacttcctcttcccctgggcgtcggcagggcggctgctccccgagcccccgacgcggggcccagaagcacgaccccctcctggggcagattgttccccccggcggcgctcgcccgcgccgtcgtggcccttaggggctctctcctctgaggccccgacccccaacataatggttagaatggagacgcggtcgggatcgatgcagagggggaggatctcctgaggaaggcgagacgcctccgcggagctaagattcagcaccctttggactacgatcttgaagtcctcgggagcccaatcccatctggctccctggtgggtccgcatgtagtcttcaggcccagtgtactcccaggcgctccgggcgcgccgttggagcggcgcaatccgacggcggaggtaatcgccgtacaccatggccccggtgagcccctgggatcgcaggcccgccaggcggtcgaggacggcgtcgtagtcctcccccagatctaccggcgcccgccagctggagacctgcgccgggggctggcttggaagtcggaggcgcgcttcgttggcgaggggggtgtagaaccagtcgctcttccagtcgtcccacttcttgcggaggacgcaggggatgtagcggttcaacaccggcccccgcggctggaagtagcagccgccaaccaccgacggcggtgacaccgactgcacggtgaagaaccaccggaacagctgaagagaggggcgcaccccaatgaacatctcgcacaggtgtgcgaagatggccaatgtcatcaccgcattgggggtgaggtgcgccatctggagatcgtagaactccaggacatccatgaagaaatgagaaaatggcgggaccagcccagccattgcgaaggggaggaagaagatggaccgccccgggtagtctggtgccgggcgcccctcgcccagcattactatctcccgaccggtggcggactccggcatgaagcggcgcggcagtccggcgtgcctctcgttcacgatgcgggaaggcggcagtacactgccgtcgagcagagcagagccccgtgccatggcggtggaggaagagatgattgggaacgagcgcgtgtggcgaaagtagggcgtagcagagaaagagttagagctcaggcggcgaaggcaagaggaacaatggcgaaaggaagggagcaaatccttttctcgatgcttttatacccttgccatcgctgggcctggctcctcgtttctcgcgcccactacctcgctccctcgtatctcgttatctcgctccctcgtttcccgtgcccccgcttccactaatcccattcgcccgcttacggcgcatgaagtggatatgcgttggtggcaatcgaaacggattgtatcgtgcgcgcgttaattacgctcgccgaccgaagcggcgttaccgtatctccgggcgagacaaatctgctcacccagattcgcgcgctgctcaagtggtgtggcagtcttgaatagaccgcccattatgaacaaccaaagttaccaatatcaatgtgcatgaattgagaccgttgggtattttgcccaactacggagaccggtcccacctgtcaccaggctttaggggtggcgtcacacctgaccgcttccctggggaagggaaattgctctggcataacgccgggggctactgtcggtgatatgggaccgggagtatcatgaccagaggcttgaggcagacgcaatcgcccacgtggcctggcaccttcggggacgtcgggcccgagggtgaggtgtccgccctcctcctgatttcccccgagggggggtcgggttgcgcttgccccggccccgagggccgaggcaccccgaccccttaaggaagtctgcgccacatatatgggataagtgagcacagctgtgctcacctaacagcatttattgcagtctggtcaagcgtgtcatgctgcatgcaacgcagtacagcgcgttcctttatccggtctgtgaccagtcacagaccggtcagatcacgggttaggtggcgactggcggtctgacgcacgccttgccccatcccgtcaagacaaaagtctgtaggcactcgtctcaagccggagctagcgtgttatctcttagagatggcacgttagccctggtcagatttataccaggcttcatcctaaccattacaggcaaggtgttacacgaagaagggcaaacatgcacgttgttaagctgacgcgtggcggacaagaatgaccggtctggcactggtcgcgtcatcgacagacagccacggtcccgcgtcatctctgtcttcgggggaggtgggggtaggtgtgggctgtcccatcagaagggctcccggatggaaaccgtaccgatctccgcccattaaagagaaaaagaacagtccagtttggaaagagaaaggggcatgtggtatccccttgagatataaaaggaggaccttgcccatttagagaagggactttttcccttttggaaggctgaggggaaagggagttaatcctttgtaacttgtccatacacaaatccacaaaaacacaggagtagggtattacgctgagcagcggcccgaacctgtatagatcgccgccgtgtctcgcgttttctccgagcaagcgatctttccacatatagaaagagcttgagatctcaccctaagcccccggccgaaccggcaaaggggggcctgcgcggtctcccggtgaggagccacgagctccgtcacacctgtaaccggaaattaaatggaatcattagtaattgcaaaaaaattaacaaatgaatacgaagactcgttagtaattccctgacgctgtgtcacctgtgactgcctgaccccggataggaagacccaggatcatggcgacgtcctccagagtgaccgtcagctccccgcacggtaggtggaaggtgtgtgtctctggacgccaccggtccactagggccgtcagagcagcggcgttgtacagaggcaccggtcgctgcgccatggtcacgaacgccaagagcttcgcccgccgtaggtacgggacgtaccggtcgtcgaacagtatgtgcgccgtgtgacctctgactcgaagggtcttcaagcgctgcatcaatagacaaacataataacatgttagtcttgttctatttatctgagctaaattacgatatttgtatgattttcattcgatgaaacagtatgttagtttaaacgatagttactttttacgagcagtgaaataaaaatgaaagagcgaactgagtaatcaagaataatataaaatcataaagattgaaaacaatccttggagcaatgggcagagttggcgatacttttttttatagtttgcaatcaatattatgacaatttcattttgtcctcgacaagcatttgattcagaaattgatcatgtacaaattccctgctaggtacagttccatggtaatagaagctctttgtgaaattggggatccaaatggttcggatgttgatgcaatttgccactacatagaggttgtgcatctgcacaaattttcttatttggtatcactatttgccagtagttatttttatttcttctgaattcattcaagttttgttcgttcttgatttcgtaataaattatgattcagatatgtgtacaactaacatgatcagaatattaacaaaatgcgattgcttgattctttttctcttctgaatcattgcctgattgactgtatggtataaagtccctcagttattggtatatatgtgtgccattgtgtttatttcagcttcctatactttaggaagcttctaaaagtgcctttgctactaccggagctttcactttggattttataataatttcctgcacaactaccatttcccatttcccgctatcttcctcgcataatcaatagctgggtacacatttagggcctctgcatgacgagttgatgactatgcataacattggttggaggatagggaagcctcactgagctgcctcactgagctatcttctcagcatttgttttgatttgagggaaatttgcgatttaaagattttgcaattataactctgcatcaagcccataattcagattcttcattttacttctcttttgtaaaattggcattcaataactcaatttacaattattcattgtggaactgtgcaagtggtagctatctaactacttatgttgacatttatctaactacattatacttttgacatgattcgatcataaaaataatggaatattgttgatgctaacctctccgctggcaatctgtggggcccggtgcttctcctcgtagaaatcctccaaccccggaaagtgctccatcctgcaaatgaaaatggaatcattagtaattgaaaaaatattaaatggaaaaatcacaatgagaacggaaaggaggacaacagaaagtaaacattgaagcaacaatatgaacttagcaaatgaatgtcatccaatcccacctggtaagatcctcgaattgagttatttccgggtttctacccaccagtttcgcaaacacagtcctttcatgctctgacatcttacgcactggacgatcatcatcggagtcggaagcggactcatccaattcatcctctgtatcatactccaaccagcctgggttcaatccactgcgtatcatagcctcctcacactcctctcgggtatagaatttcagcctagccaactcccttaggcccatacttacattcttagcattcgcttcttcctcaggcaactccacatcatctcctacctcccgaccatcctcaacatctccttcctctcttaccggcacattctcctccacattgacttcctcccttaacggcacattgtcctctgcatgtacttcttcccttaacggcacattctcctctacatgtacttcctcccttaccgggtcattctcttccctgacctccacatccgccatatcatttactccctcgcccccctccacgtcttcctcaatcaattcttccttcctactacacctctccgacagttcgtgacagctaatgggtgattctatgagtggactttcattagggtctataagttctttcttccctatcctaccatctttcttccatgcaaacacctcaagagatttgaaatgtgaccccaatactatatctatatatgtttgccattcgatctctccattcaagtctaacataaatttatgtgacatgacaccgccgcgcacatcgtatctcccttgcataccaaccgactcatcattccaatccaattcatgcttgatgcgagacattaactcctcaaaggtaggcttcgcaaaaaacactaattgtctaactgtcattccctcaaattggcttccatgtgtactttcatctaccacacaaccaccataatgaagccggaccaatctatccatctacaatttttaacccatgcataaacattaattacttgaaaataatatgtaattaccattgcaataccaatacttcaaaagctaacaacatgtctaatttttccaataaataagtacattactcaaatactacacattattgataaaaaaaaactctactcctacaaattacctacccttcaccacacatcaacccctttcaaaccctctcaatcaccacaaatccatcccacatcctaggccatcaccacacatccatctcccatcaaaccctagtgcatcaccaaacatccatcccaaatatattttgtcaaatgtatcaataacaaccaaatggataaagatatgccacctccacacttcatccccacccatattatccatctaataatccatccttagccaactattatcaaaccacgtctacaaccaaaacaatgcaaaatatccaataaaactttgggtaacttagggtttatagaggggtttaccttctcttccgatcccaaactcaatgccgcacaaatcaccttcgattagagaggtttttgggggagattgggcgaggagaactcggtggcgaccgaaccctaggcgggcggctggggaaaaaacggaggaagaactggctggggcggcctcggccgggctctaagtagccaaggtcagcgccaacttacttggcgctgaggttgggcacctccgcgccgaagcggttggcgctgagttagctgccacgtcagctaggggatcggcccggccgccacggtggcacaatgtcagcgccagtcccgttggcgctgacacggccaacctcagcgccaatgcgcttggcgctgagccgacggcctagttttggttgaagtttttggcaggggttagtttcgaaataagtttttgaaaagggtcaatttgtcaaaaaaacggtggtagcgagccctgtgcacttccgataagaccgtgtttccatggtaaaatgcgcatccgatgaaacagaaatgacagaaattaaatcctcattatgcaaatgtatcaagatgtttccatggtacggggcactctgaaattactatcttccatcttcagttataatcctgttaatttgtgtttgttgtaataatattgcaggatgcattcggtatattgttaccaaatgccaataccatggcaaaggtttgcagatgtgtgcttttctagctttcggctaaccatagaactgattgttttgtacgtacatacgtgccgtgtgttagggcacaacagaaatttgtttggctttggacgcgcattgccgccaaaccctgtgcaagttcaaaccgcggagttttttccgatcgggatgtaccaccaaccaaatttcgttctccgcgattcaggattattacgttatgcgttgcaaatcttgaggtttgtttagagcttggaagtatcgcattatatatgaaatgtataaaatcttgaaatgtatcgcattatatatgaaatcttgatatatacatttcctgtaggaattatatatgaaatgtccgtgttccaaatgtgaccgtgtattaaaacccatatgcaggcagattattctgtagcctgacaaccaagacagacaacactaaaatggtaaaacggtaagtggatggctccaagtaaagaggggaaagattagtaattatttttgacattatatcataacccttttacgactactatctacaagacagagagtacatgctgtacatcatatatgtaatgatatgcctataaacgtgttgcccttgtaacacatgacatgctatactaaacaaatgaaagcaaaccgcataagagcaagtttaatagtaccgccatcaactagttataaacatgtagtacatgtcatccgaggggtcagtatcgtttgtgatgaaaggcgaacccaggttcgccgttgttgcatccagaccatccgtacttcaatcaacggcggcatggtttagcacctcaaagacgattaacagctaattaaataatataacaatttttgtatattagtccaattaattaacaagatcggttctgtctattaattttcttataataaaatactcttgtacaacaaatacagtttagttttttcaaaataaatgtttaatttttggaaggattttagcagtagagttgctagatgcttaaggacgtgggataattattttactattgtataaataaaggattttcttatcctgagattgtttgcttcttgattttatcttattttttaagttggttccaaaaggcgagggaggtattagttgtatttgatttaccgttggagatcgtttccttgattttttttaagagagaacaaactcttaagctgctaattagtcactaagagggtgctaactgctaaactatggaaccgttgattgacatatggatggcctggatggaaccaatggtaaactttgcctttggtcccagatgcagaggatacgaacccgtcatccgagagatgagagatagaaataaagatacaatagctgactattaatctacctacacacttctttaggtagttaatttttttagaacattgctacatgtactaaatttgcactaacaatcatctcagtcgtttaatttacatagatgaaaattataaaaaatctagatgcactgatagtatgacgtgtaagtgttagtaagaattttatgaagaaaagttagtacgtatagacttttcctttatttatttattttttattctaacttgctattctctgtcctatcctgtgtgttctattgatggggccatatagcaatattattagagaaaaaaaggacacggattagcatcgattcctgtaatttgcatatagcttcttgtgctgcagctcagcgctcgctggagcgcccgttgccctctccctccagctttctctctcctccacctatgaatctggatgacgtggcactactaccgccaactgagtgtggcttactctctccatctacttttaatagtcatatttcatcttggcacaatgaccaaggataagtaattaattctacttatcatccatttaaatatgatactaattattcctcgtaaacaagcgattcattaatatttacatttctctatgcccatgtagccaatcttgtgtagaagaatggagagcaacgcagtaaatccgataaagttattaagaggataggtggttgaattgaaatatgtctatcaaaagtaaaatttccagatttagaaatatatctattaaaagtggatggagggagtattaaacttgctctaaatccatgaccttgattactgaactctcactacttaaaaaaaaagatttttctatacgagaacccctttaggttgcagacggactgtaagtgacggcgtcggtaaaaaatgacctttattttcgcatgtagctccttaagacacccgtatagaaaaatcgattttccatgcgggcctcttaagagatccacatgcaaaaattgtatatatcaaggttttaaccaacaagtaaagtctatatattccttatatatttgaaaggaattgaaatgatgaaaagtgaaatcagagaagtattgttctatacacactcattattattatcgctataaattcaaatggattaaatctatatacggattaaattagcacgatgagaaggtactgtcgcgtgtgaatatatacctttatgtaccaaatagggaaccaaacatgcctcaaagttctttttacttgtcgacaccaaattacggttcgatcgaaaaaatcagctgttacccaccgtgcattaattagatattgtacatagcttctttttttttgaaaaataatgggtgaaaatatggtctctatatttatactaccttcatcccaaaataaatcgtgtagttcaaatctaaaatatactgctacacttatttttgaacaaaaaaggtattaagggtttatatttaattttatgggatatcctatcgatgtttgtgcggtagctttgtcggattgccacatcccctcgtgacatggaagaccgaaagtgatcattgtgtgtttggacggctggcttgcaagccaagctacaaaagttagcgacaaatattaattacttgcccgtttgaaaataaatggcatcgttgttttccacagtcattattcatttttttactagtaattaaactaaaaatatatgtgtttcacaattgaaaatgtttttatatattgttaattttgtagttgttgataatatatttgaaaaaaaataatgatcaaacaagtccgtgtagaaatataatactgtcttatatatatattattgagtgagggagtacattaatttaagtcctctcatttaggagtagtagcttttgtgattatattttccgggcgttggatgatgcattcttgtcaacttgtcatggtctctatttagtgtgaggacgtgatcgataatacgaattgaatcagcagtgataactgctatgataattaattttgttaggtcatggtttatcttttgacatcccctattgatttaagagtgttctaattgtgcacactagcgaacagacaagtatgatatactaggtgaaaccccgcgcattgctgcggaaatttagtatgataacaataaaaaaacgtgtaagatagctagataacatcagattaaataaattaatgtggtttatgataatttaaatttaaatagtatgtagaatgacgattcaaacggaaaaagtaaggtggtatgactttatggaagaagaaaagtagggagatagtttggaccgttgattaatcatctaaaggctaaaaacaattgatgtgatatgatttaattagaggaacaaaggagaaagataatttgtaccatagtttaatcatttaagcattagctaagtgaagatgaactatataagtatataagatatcataaaacataataaagatatgcattgaaacattgtgtgaattatgttggatgataatttaacatgcttgtatttgaaaagctcttaaattataaaaactataaagttatagcatgtttgcacgatgtttaaatgtgatgattgttagtgggtgatgatgtggcatcttgttaattagtggatgatgatatgacatcttgctagtggatgatgatgtggcatctttgcatattaagcttaaggagttagtgggggataactttatagtaagataggattacatgactatctgtgttttcgtagacatcttaattgtaataagcgaattgttgagttagcacaaattattagactcgacattatattttaactatttgtttcacttaaaaagctaataagggacatccttatatgcatctgttcatataaaactggaacatattagtcttttcctcctctcatgcgcagacataaattcgaaaaccgacacctataacaacttataagtgtcggtttgttttaaaaatggcacctacaacataccagctttttaaataataaaatgatacttttatatgggataaaagtgtcatttttttattaaaaaactgcacttttagcctggagccgagctgtcaaatctgctctttttttactcctctttctcatctcctcggccttatctccttgcgcacgcgggctctctctctcgtcccttctacctctctaatgattcgctgtctcccctcctcttcgagctagcaagcgatggaaaacggcccgcctctccacaatgccttctcatcccgttgccattgggcatggcctcggccacatcgaaaggaggctgtcgcaaccccttcagcctggtggccaagtcagcaaatccagcgtcgtggtggtaggggcagtcggatccagcagtcctcaatctatcacatgatggctgcggtgatgcatggtaaggagtcaaggccgccatgagcttgaggacaccatgagctcagaattgccaaattcggctgctacgagctcgagggtaaccagatccggccttgaaggtgatgggcaggtgggcagacaacaacggtgagcagcggcggcatcagccttctctccttttgcgtcctcctctatgtattttttttagtgagttcttgatgtcaatcgatcttggaagcaatatattattcttggatgttgattacgtgagatgtgattattgtgagtttgttgttattggttgtgtattgatttcacgagtgacatggttggatgcgcttggtgcatcggttcaaatcaaggcgatacatcgagccagatttttttattcggggaacctcatatgtgccgattcctacaccgcacctttgattcttcctcatcattgctgcctacgtggtgccgttggggaatcaatacttatgtggagtttacaaccaattgccattataatttctgatgtagtgtttgaaaattcgggacaacatcgtatttcaattaaaaactaatgtcaaataaatttggctgagggagtatgttttaattttaaccgtagttactcagcgtaccaatcggcggctatacaactgatatatatgtcatgtcatgaatacatgagtaaagagtaacatggtgacagaaagaccaaaagtaaaataaagttggtgctaaactaacaatataccaatgcgttttagggctgcttcccccgtggggccaaggaaagattctcggatgggtcggtttttcgtattaaatttccaatcatttttttattttaaaattccaatcatttggcccaatacacctgaaaaattaaaaaaaaatacaggattcagaatcatgtttgagagtgcacgttccatcgtggatgcagaatgtctctataaaaggaccttgtgttgattagtagaatttaaaactactgctgctcccacctcccaaaataaatttatttttcacctatctcatatataccaaaatgactagaatacctctcttttaacaaatcctaatccaattagtattatttactttatctactcccaatataattagtttctgcttcacaaacatcgatgcaatagttacttaaaaataaacttattttgaaacaaatgaaaggatcataaaataaacttattatgagacgaagggagtacctcttacgcactgtagcttgtttagatccaccactaaaaataaaatatttagaagcccatagatcacaaataataggtcagctctccacagcaaacagaaaatctcctgcagaatcgacccaaaaaatcaggccctcttaaattgattatgacccgtgagggtatcatatcatctatttattactcccatagttcctagtaattgtcagcgtcggtaggcattgttacaatttggaaataagagatgattctccctcatgctccctccccattaattttgtattataagttgctttgattaaattcatagaaaacatatgtttttaacacaaaacaaatatattattagattatatttaatgttagatttaatgaaactaatttggtgttttaaatgttgctaaatttgtctataaacttaatcaaactttcaaagtgtataatatgaaacggatggagtatctattatcagaaatggtttgaaatggttgttttaatagtaatttttttattaaatggaaaacacacatgtgctttccctcttaataacaaaaaatggtttactttaaattgcgatgaacaaagttatacggttgtttttacgtatttttttcacgagagcaatatatttgatattgtggcatgcaattaattaaatacttacaaatttattactaacaatagagtgatcaaagtttcaacagaaaattatatcataaaaagaaatgaagttatgaccatttggtcgtttttaaaaatattatttcaaccctgccagaaaaacccccaaaattagtgccaaaccctcttgaactgaggccgaggttagtactataataagaactattcttaaaataaatttttaaaaggttaaaatatcataatttcagtaattgggacgcggcaccaagtcaccgcaattgccatcaatcggcatccataacactgtagctgtcgaatctcacggcttacgaagacaggcatgtacggaaacattctccctccgtcccaaaataaatgcagttttgcattattcacgttcaacgtttcaccgttcgtcttatttgaaaatttgttataattagtattttcattgctattagatgataaaacatgaacagtactttatgtatgactaaatattttcaaatttttcacattttttttaaataagacgaatggtcaaacgttgggcacggatatccacgtatgcacttgttttgtaacggaggtactatagtttgttgctgcggtggcacgccagtaggagtacgccactcatcacatggctacctacgtacgaccacgtaggggtacttcgtacgctaccgacacagtgggttggtatagtccattcactgtagtattgaatgaatgacaacgatttggaaaaacattgttacttaataatggtagttctatgattctgatgtcctcgtgatccaaaatattttagaacggggtattctaagcttcccaaatccgtgaatatatgattacgttggttaatcatttgttctcattttaaataaaataaattttagaattttaaaaccactataatttaacttacaaactttataaatctatcatggatatgagatatgaagccgtgtcaaatataacctgagtattgaatgttgaatcttatccaaattacgttcagtaaaattccgccaatatcatggcgcacatgttctttccttttgaatacgccttaagcgatggaagataacaacaaacctatgacctaagaaaagttatagtaaaaagtaaaaacacatccacacacatgtaagaggatatatccgtaaaaacaagttaattgttgaaaactcgtaaaaatcatacctaaaagttttataaattcatgaaaaaaagatactaaagatagatgtcgatataaaatatattcttaccaagtctcaagttcaaaatcaactttatttaggagtaaaaaaaagacaaatttcaaatgaatagtaacacatgacactatctacccgaaatttgtttttttccttaaacaaagttgagtttagatttgaaatttgatgataatgtatttcatatctacatatatctgtagtattttttatgaggttaataatttttttagtatgattttcacgagtttctaatatttagctcattttcgccggatatgtcctccacgtgtaattgcccgaacaagctttttcttgttcctattaaaaacacacacgacacatggtacaccactttatacgcactcactagtgtgcccctggcgcatatatgtgcaatcgcacaatacttctttttactacacaaaatacgccaaacacaataattaatgtgcatacactcgtaaatgtatctataccataagcttaaaaaagacagagatcaatacgacaaagttttgacctcgatatatcctattgaaaacacacctacgtatttggctaatgctttctagtaacagtcttgttgttgtaacctacagtatgtatcaatataattaaacttctccctatcttaataaatatatgtaggccagcttttcttctgtcggcatggtaaaaaaacacgcctacttatcaataatattcgtgtatattagaatctgaaccatagagaatggtgtcatgtaagcatgtaattaaccacatcttcaccataacatacacccaatactttaactatagatgaatcatacaagtcaaggcatatatcccttccgtctaaaaataagtgcaaccatgagtttctatggacaattttaatcgttcgtcttatttaaaatatttttcaaaaactaaaaaacataagtcatgcatacgtactattcatgttttataatctaataatagtataaatactaattttaaaaaaatttaaataagacggacgatcaaaactggacacagaaatttatggctaatcttattttgggatggagagagtatattagatagtaatagctcgtagggttctgattttctcagatttttgaattaattattttcttctcggaatggctgccacgttatcctttgtgcgacttctcgattgggtggatagcattggtagcacgcggtaccacggtgattatgttgttccccaggcgtggttatgctccctcgtgtcccggttgcattaaccggtggtgtccggtaagggctcgcaagcatgctacacgcatcttcatgtatttttgccaaaagaaagaatccttggtaccttgaaaaatactccctccatctattttttatggtcatatttataaatctgaaaaatttatttttgataggcatatttcaatccaacaacttatcatcttaatggctttcttggatttaatacgtgactctccatttttccacacaagattggctacatgggcatagataaatgtaaatattaatgaatcgtttgtttacgaggaatgactagtaatatatttaaatagatgataagtagaatcacttatccttagtctgtatgtcaagatgaaatatgactatcaaaagtagatgaagggactagtaaagtaaccctttcaccacttttactccgttataaattttgtgaaaaactctatatacatttgagaaatataacacgaaaaagagaagattatatttttagagatggcgctataatactaagaagcacaatgtttttttttatgcaaaacttcctctcaaacttatcttgcctggtgtatctgtatactccttcaaaggtaagtgggtctcacttgatattgagtgaaccgtggcctcaaacgcacttcccatgtcaccagtggcggacgtagcgttaaaatataaatggggcggaaaacgaagatgttcactcgataagagtaatcgaacacgacacatatcgtattaacagttcgttcgtataagtagataagggggtctcgagagtatggggcgacacgagccgtagctgagtcggtcgacccaccccgcctaatgggtaaatccacccctgcatgtcacagatgccgttgtgagtttgcaactatatatttcctctgtcttaaattaaactaaaatctactacggtatgtaatatattctagtacaataaatctgaagagtaaaccgatttgtttaaattcattgtactgggataaagggcctgttcactttactgccattttcaaccttaccaaattttagtaaagttgccaaaaaagtggctacatttagtttgctaccaaattttggtaactatataagaaatcatgtcttgccaaaattttggcaactataccaaaatttggcaatgccaaaatttgataaggtttttttttggcatcaaagtgaacaggcccaaaatctattcagatttatttactatgatgcatcacttgtacaaaattcgtttattttggtacttatagagtacgtggcaatactccaattttttcctgacgcacacgtattccagcaaggctaacagaatatccactcgaccttgtcgaacacccagtcgatcaactcggcgaggccgccgccgacgctcatgtccgtctcgccgtcgaacggatacggcggctccggcgccgtcgcgtccagcagccgctcgatggccacctccggcccagacctctccagaggcctcatgggcctcccgtaccgggccggatccggacagcaatcctgcacaagaaagcccatttctcaggcctccttttatgggcctagatttagcccatactaactggcaaaatgggcccaaacctgatcggcgtgcattttcctgacgaaggccttgaaggcccggaagttggtcgccgtcaggagctcgtccgacagccggaggtacgtcacggcggcgacgcggcgcggcggcgcgccgccgccgccggcggggccgacgccgttgggccgcgcgttcagcagcatctggttgtacccgcgccggtcgtgcctgctcagcgcgttctcgcacgccgcctcgacgccctccctccacgccgcgctcagcgcctgccgcaccagccgctccggtgagctcatcgcctccggcggctgctccgagtcccgcatctcggcgcaggtgaagttgagcacggcgccgtcgtgccgcgccagcatgcgcgcgacggggcggtacccgtcgcggccgggcacgttgtagtaccccgcggcgagctccgcggcgtggctcgggtgccggtaccaccagtggatcccggacaccttcgcggcgagcttgaggctgcagcccaggaacgccatgttcgcctcgtcgaggaccctgtcgccgtgctcgagcagcttgctggagtaccacgtcaggaagaacctcccggcctcggtcaggtacgtgccgccgtccgccgcgaagaaccgcgtgtcctccggcgtgtagttgtactctccggcggcgtcgcccggcagctcccactccgggtgcccggcctctgtcgccgccgctctgaagtcctcctccaggtatttgtcataacactgtaacatttacaaactgaagtgactgacaccgaattgtaaactaatttaaacgtttttaacatcaagaatttaaaatgttaattgcagaaggaaattgatcctacctggaactgtccgatgccggggaattcccaaccttggctctctgggtaggatgggtatctaagctcacctgcagggccgaggccaacctctatgtccacgatcaggccagagtccaagaagtcacccatgttctctctgaagctcttcatgaaatcggcatacaactagtgtcacagataaacaatcgatcaagtcgattagattatcctaaatttgatcatatggttgtgatatgtaattttgcaatctcaatgtaacaatttatgaaatcagtgtacctggatggcagtcctgccgtggaacagaggccggacgtccacgccgatggtgaggtactcatggttcctcgcgccgccggggctcgtgtagtacacgtcggggtcgtcgtcgccgacgtcgcggacccagcgcggcagcgggatggtgacggcgtcgccgacgttgccgccgcaggcgtggaacgacatgatggcctgcaccttgagtccttcctcctgcgccacgcggaacagctccctgtacgcgcgccactcgtaccgcgccggcccggcgccctcgacgatgccccaccacacgtccgccatgacgccgtccacgccggcctcccgccgcagccgccgcagccgcgcccgaagccccgccgcgtcctccagctcgttctccgcggtgaccacgcccagctgcgcgccacgccacggcgcggcgccgctcgacacgatcagttcgaacgaaagcttgaggagattgcgtgagctcggagcttaccgggagcatgacgtagacggggacgtagttggcgagcatcttctcctcctcctcctcctcctcggtgagcaatggcggaggctgcggtgaacgagcaatgcagcaggaggcaggaactcagtttgaatcaagaaagttcgcgcgctcggcgtgtgcctaggtacctcgggtagaggagaagcctgttcgctctcagcggcaatagcacggacccggagagaagccgccgtcttctgggagtcggcgacgagccgccgccgacgccgccgcccggttgccggcggtggaagaagaggagcaggagacgccgctctgctccggcatgtccatcgttgctgcagcctgaccggctgcgacgatggcgacgaggttgtaatcatgatgggcagcagcgaagctgtccgggctatgtttgtccaaatttgaaaatttttgctagatgttcttggctttgtccggtgaattctcggcatatatcgttggcgacttggcgtgccatgccatctgcgtgacacaaaaatctgtcccctttttggcgatgtgtgttgggaagaattgagcaggtgttcatgaaggtgtggtttgcgtgagctctcaagcgtgttttttttttttctcccgttaagtaagaggctcataccatttcagtttctgcttttctagtggtgaatattgagggttcagaagaagctactagctgttgttgtctgtgcttttggttttggctttgtgcagtgatagctacagtaagggtgtgcgttcaacatgcgagcaaatggcagaggatggctgcttccccatttttcaattccacctgaagaaaataaaatcgatgttttcccaaattagaggatgtctttattatttcccaaatattgaagatgattatcgtaaaagaaaaactattagtatgacaaaatataaattaagataaaaatacttaaaataaaacaatacttatatcttttttaaactaattggccgaacctctttgtttttcccgaaacacatatactcacccttataaatccacacatacgcacaccttatccctataaacaacttctttaataacactaaaaaacacaaaacactctcttctgttttcagaaaaaaaactttcttctgttcaagaataaatacttcaccttttatccgagcaaaaacactctcctgggctctacgtctctattactacctccatttcatgatgtaacaatttttagctacttgttatattttgtgacggaggtatggtaagctaagggcttgtttggcacagcgtggagctggagctcagccaaacaattttagttccatctaaaatgagagaagagttagatgtaacgctatcacaaaataaattagatatgtgaagctgggtttaaactttctttccaactccatttcagaaccaactcatgaaacaaaatttaagttgccgtagcactatcactccatcatccaaagcctatgtccattcagcccattacggtctggcccaaagtccgtatccgttcacctcgtgctcctattccgcttgtccttatctcggcgtccgagcccaccaccgcaccaccgccccgaatccgcccccaaatctcctcgcgacctcgaaaccctagcctcctccggccaccgtcgccggccacggtgagcggccccacccccccgcagccatggcctccccggagggctccacgtgggtcttcgactgccctctgatggacgacctcgccgccgccgccggcttcgacgccgcccccgccggaggcttctactggacgacgcccgctcctccgcaggcggcgctacagccgccgccgccgcagcagcagcccgtcgcccctgccaccgcggctccgaacgcctggtaattgcggggtttacggcctccgatcgcgctccagccagccctggctgggcccggtgccgtggtctggggtgctacatttttttttcgtcctgatttgtcgcggcagcgtgttagtgcgtaagttgagactgggtatatcgtgatcgttgctattgattgttcgattggaggtcgatagaagcgtatcatatcagactatcagtgggattcggattaggggattagccattgagtgtgtctgaacatgtagaactagttacgtactccctccgttttctaaaatatgacaccactgacttttcaaaatacacttgaacattcatcttattcaaaaaatttatgtaattattatttgttttattgtgacttgatttatcgtcaaatattctttaagcatgacttaaattttttatatttgcacaaaaattttgaagacgacgaatagtcaaacgtttatcaaaaagtcaacgacgtcatacattaacaaacggaggtagtataacttagtaggagccgtcagcctgttttactgaacagagggctcaattcctggttatattgaattgtcagcttcattttcaaatctatttatttgtgtgcatacgtaatgtatttaaacctaatttagggcctcttcatgatttataattctcattttaattgtgatgcaaatgctgcatagcatagcatatatagtttgctaagcatgcattgtgtcatgtttatctggtgtcatgtcatgggatagttgaactgaagaaaacatacaccataattgatgatgtttatgatgccactattgtacaagattcagtttgccgtgtaatattacaatataagaactgataacaagtaaaccaaatggtgtcaaattggcgtggtggtgggagggtggatggttgtgatttgctgtaggtccaactgtctgagataccagattttaaaattttttgtatctatatgcaagtaaattgcattgacatgatattttgagccaggtattgagatttgtcctgagctttccagtggatttttcaatgaatgatctatgaaggatcagaaacggggtgagagaagtggttaatctgtatcacttgggttccagcacgaagcttactgtggaatggaaatttattgaagaacgtgttcatgttaggatattgtttactgcaactctttgatttaagagtattcttttatttatgataccttgtagtcttgtggtgctagtacattttctttatgcaccaggaagtcatctcatgtgtttttaaatctgtcctggtttttgacttgtgcttccaccttctggtgccataggttgtggtgttatgaaccacacagtgcatcttaactgatgtattgttctgttgtgttaaatttgcttgattcttttgttgtcattgtatagttttttatgtacttattgctgtatattatcgtgacatatggcatactgaagtacaagtttatttttttcaccagtgctgaaatcaatggctctgtggactgtgaacatggcaaagaacagccaacaaataaacggtttgttcacatccattatccaatctacatttcctttcctgttttcttttgatcatttctaacttggcaccacaaaacattagtccgagatcagaaagtggcactcgaccaagctccaaagcatgcagggaaaaagtaagaagggacaagttgaacgagaggtaattttcgcatcatttttaattcaacccatttttctggttgcagcattgttttttctaactctaaactaattcatggacttaatttctgttaggttcttggaactgggtgctgtcctggaaccagggaagacacccaaaatggacaaatcgtctatattgaacgatgctattcgtgtaatggctgagctgcgtagtgaggcacagaagttgaaggaatcaaatgagagtctccaagagaaaatcaaagagttgaaggtatgtctttttattttctcttcataattatttgccatgcatctatttttatgggcacccccgcagcagctgtgtacatattgttgtctaaaatgtaatgacaatattgatagttttgttggctcagcatggtgttaaccttaggttatatggtttgtatggactataaagtgtaaatccaaaggacaaactaagcatcatgtccttcaattttgcaggctgagaaaaacgagctgcgtgatgagaagcaaaagctgaaggcagagaaagagagcctggagcagcagataaagttcctgaatgctcgaccaagcttcgtaccacaccctccggttatcccagccagtgcattcactgctcctcaagggcaagctgccgggcagaagctgatgatgcctgtgattggctacccaggatttccgatgtggcagttcatgccgccttctgatgttgataccacagatgacaccaagtcatgccctcctgttgcataagtcaaagcaaagatcaatttgcctcgccttgtaggaaagaggtgaaactgccttccattcaagcccagtttggtcgtcagtgtttaaactacctagctaatcccaggattaaaccgaagcttcgctgtatcgaagtatcaaccggtgacatgtgaactgacgaaagatgacaccgttgtatattacatattagtaaataaattccatctgtccaattaaatgagaattagatgccatataattatatcccaccgtgttttgaccattgagaagcataattgggttattggtggccatgtccgaagaaaaggaaaacaatatataattgggttattggtggccatgtccgaagaaaaggaaaacaatatgtgcgctgtttggtgcaacgtgttcacctcacagcaagacgtgctctacatgctccctggcatctatggtattagccgtcagggaataaaatattccattattttagtaccattttgcgatttttctccttttctttcatcggcatgcaatcctgatcatgttcagggagtttgctacttgtaatttgcctaacatgatctcctcgcggttcaaattaaattatctttgagatgcttgtgtttaattccaggtttgccttgtactcaacaaatcgaatagcacatgtaaacacaaacattatgttgatcaacgcagaaaattttactgtttagtaatatagcagcaaataccttcaaaatgaaacagcaagaatcttctctttaataaatggaactgcaaaatacagaagggcttatgtatacacaacaattaattaatacacagcaaccctcaaaacgagtaacaaaacgcctctggtgcaagagaagtttcaccacacctcgataaatatacgtagaaacccgtgtatttacgtacgccacatgtaaatagtaattaaaatcaataagaaatataaaacgatattaatttctttttatatcgtttaggcggccatggccaccagagcagccaaggccagcccggccacggccaccgccggctgcttccgatgccgcggcgtggacgccgcgctgctgctcgggccggccgccggcgacgacgccgagttcgacctgtgctgctgctcgtcggcgggaggcgaggggagcggcgccggggaagggccggcgtccgcggcggcggcggcggcggccgaggcggagtaagggacggtggtgaccttgacgtgcatggtgccgttgaggcagtggcgcgggatgctgcagatgaagtagcgcgtgccggcggcggcgagctcgaaggtggtgttgccgccggagtggacggagacggggttggtcgagacgcagccgtcgtagtccgtctcagccggcacctccaccacgttgtggtacggctcgtacttgaacgctgcacgccattgttgatctcaatgatgagctcgtttgatcaatcaaccagtaattaattatcgatggacaatggcatttgagatagattaagaataagaaagctattagcatatgattaattgtgttttaattatttacaataaataaataaatttagttgatattccaaaacgacttatatagaaattatttgcaagaaacatatcacgtactagtagtagtttgaaaaacgtgctaatagaaatcgagagaaaatgtacatcttaatcagaacggggtctacgtgcattgcaatggaaattaattacttatggtgtcgccgacgatgaacgtctttccggcggcccacttgtcgtagtcgacgtaggtgtcccagccgtaggagccgccgaccgtgtagtccttggccaccgccgtcgaggccaccgccgcgaccgccatgacggcggcgagcaatgctacggagctagccttcatgcttcccttgtggtagatcgatcgatcgatcggctctctctgatgctgcggttgtcgtcgcctgatcgatcgatatgttgtcaccagcaagcaatggctgtttatataaggagcaagaacaaggcagaactagatactgctctcttctctttttttttttttctgttaagtaattggggccagtgtttatggcatgcatgtatagaggagttgttgtgtagatgatctggagttgcttcccgttcattctacaaaattggaatcaaaatgatttaattgtgcattgcacgttgtacctcttgagttgacttgtatattatatatagttccttctttttaatgaaattgcttctactctgcagcatgactaagtaataaatttacctacctgatgtcctcatttgcattcatggccattcaacatttccagatcaaattccacctattgtctttataaacaaaaatagaacatgtttaatcaattttgtttattttccaatattattttttctgagtatttttgttaatattatggtaattgatgccattatgtgtttctacccaacatatgtattctgattatgttaatgcgagtattctgtgctggtggtggtggtagggtcaagtaatctaaatagtacaagtagtactccctctaatagtactcccggtttttaacataggttactgttgatttttgtcgtacttctaccatttgtattattaaaaatgttaggtaattattattcattttattgtgatctattttataaaaaatactttaggcatgacttttttttcatatttgtataattgctgaaaataagacgaattatcaaatgtatattcggcaacaatacagtttaaaaaaacataggcatgaccaaaatttacagcttttgggttgccaaggactcaagtcaacacaatacaaaccaaaagcatgtctgtagtttgacttttcggaatcactattattatttcttctcgctgccgatttgatggaagcaatccatgcaagttttcattgattaggcaatggaataatcaactaatcaattttgcagaacgtgaagagatgttacttgccccttgcagttgcaggttttgcggacacactcgactcgattgtgcgttacatcatcgactatcagctttcatggtcgcaaagagaacttcattttacacacatacaactcgtggatgtggatcagttcttgaaagaaaatgcagcactatggtgttgcctgccctatctttgctcacacaaataaatcatacttcctccatttcatattataagactttttaatattaccgacatttatatagttgttaatgaatttagagatatatatacgtatatatctagattcgttaacatttatatgaatatgcgtaatgctagaaaaatcttataatatgatgaaacggagggagtagtaccgttgtatctttcgtaattgctccgggttgcaaacataatcgctagttttctttttgtttttcttactgggatatctcacggaatttcgatccccttgcgtcgctggtgaggtcgatggatattggttgcgaatctgcgatggagcggtgacattttggaccggcatgcgccgtttgatagtatgatggcctgtaagactgtttgggctgtttgcggcgcctagatgggcttttttgttttgcatgcggccaatcagagctgcgttcgaaacagaggatgtggctgagtttttcctggcaggaaaaatgagatgagtagcacataattaagtaactactccatctatcctaaaataactttaactttcaaataatttcatctttcaaacaatgattgtattgaaatttgagaaattaggaacacatgcattaggcctagataaaatgagagacaattgcattaggatttgataaagttgagggcattctaatctttttttctttatattggtatgtgtgaatgggtgaaaaataaagttattttaggatggcgatagaattagctattatacacttgaaattggatttatttgatttttaaaaggaaactagcaaaatacccatcgttgccacataatttaaaagatcacatcagagtattacagagaggaaatctattttgagtttcagagcttagtttcaggggatgctataaaaggaatcccgttcggatgggatggcaccggttaggtatcagatgatgcttaccaagtatcatacgattcttactaggtatcaggtgatacttgcattgcgaggtatcaggtgatacctttaagtatcatcttatatctaggtgttggtacctgttgataccacatgatactcgttgataccagagtggtacctacaagatattaggagccgagcattgaggggaggagtgactaggagacgaagaggacgttggtgacggcgtaaagcttggccgtgccaagttcctagacgcgggcgccgctgccacccttggtgtgcacctcctagatgtggcgtcgctaccatctccgtgaagaaatctattgcccgaggagctccactaccatctcccgcaaaaagaaatccggcatctgaggagctcattcgcacctgactcttggaccatcgccgctcggctattggacatggcgccactaccatcgccgcgaagaaatcatttgctgctgccataggagaggaagcaacactgcatacacaaagaaacctgtcgttggcgatgtggtaggaaggcggcactgtgtcgttggagggaaggagtggttgggaggtgagaaggacactagagatcttcgacttcctggaggagtgggaccacctcaactgggcgacctcattgtcttcgtgaggagcgggtccgccttcatcccctccatgctcaccatggaattagggcaacccgtgaggaggatggtgaacaggatcccgtcccccagcatttatgtagttttaaattaattagggattgtttgttcttatgttaccagtctcgtaaaaaaataatccagttattagcggcgtgcaaggatgatcatgattgagagctccagggtctagtcgtgacttctactcttctattgtatgtttgatttggagtgaaaatagacaatataagatgatagtagattcaccgctcactaccaccacaactaatccctttgagaataaaaggttatctttaataaatatatcgtttagtagttttgcgaagtgtgcttgcttaagatgatagagtagctcaccccaacttgtctttagaatgtgtgttactagagggagctttttccacgtttatcatgagcacacttctctaaacactaaacggtatgttttccgaaaacattctatatcgaaggtctttcaaacatcagataaattaaaatttcaagttctcaattgatcttatcctgatcacttgcaccgttttattatgtgtagtcgataaagctcacgtcgattcttgatttgaacataaccttagactagtgagagcacacataataataaaaataaaagatgatgtaagcaagctatacaggctgtagaattagatttgtgctgaccgctgtgttatagaggagaaaagagaaacaaactactactactatctataaccaactagtaactatataaagtacagggtccaacgagctttacgagaaaagagaaatgataggctagatattagcagttgcctatactttatactccctccgtctaaaaaaaaagacaaaccctgatttccgtgcccaatatttgaccgtccgtcttatttaaaaaaattatgaaaaaaattaaaaagacaagtcacgcataaaatattaatcatgttttatcatctaacaacaataaagatatgaattataaaaaaatttcatataagacggacagtcaaagttggacacggaaacccagggtttgtcattttttgggacggagggagtagatggcaaaaagcccgaggcccgacggcccggcccacggtacggtattttggcccgatccaagcatggcacggcccgaccatggggaccgtgccagcccggcccgaccgccgggccgtgcctgggcctccccaccggcacgttgggccagcccggcacgaccgggccagcacggcatgacgggccggcatgccaggcctggcaaataaagaatagggagtagaaatagacatattatataccactgtccaaataatagtgatgaaaaatagacttattttagctatatatatgctagcccaaatatgagggagggaaaatagacttattgtcattatatatatatccagcccaaagaagagggaagaaaatagacttattttaaaaaggtatgatgggccccgcgttctttcgggccggcacggcacggcccgactgctggtgggccgtgcctaggccggaggtgcagcccatgggctggcctggcccgacacaaagtgccgatcaggccgtgccggcccgatggctggtgggccttggctagccgtgcctgggccggaccttatggccatctatattatactttgctctgatttgggctgtgagcctcactcattcgacggccgacgtaatgggtgaactaataaggaaaaagtacactcaaggtccctcaacttgtcatcgagatacaaaatcatcctcaaaccgcaaaaccagatatctcgcatcccttaactaatcaaaaccggtcacaaaaggtccctcggtggttttgaccccgattttagcctacgtggcggctgagtcagcttgggacccacatgggccccacatttctttcccctcctatccctccacgtcatcatctcttttctcggctagcgacaggcgacggggaggccggcgatctctacaaatctagcgtcagcgtcggcttggtggtggcggcgaggcgcggggaggccggcgtcggcgtcgccctgtcggaggaatcacggtgcggcaacgtcgagcagtcggcttggcggcggcgggcgagcggtggcggggcc

SEQ ID NO: 6339 - DNA, 61422 bp, Oryza sativa
tctctccctctctcccactccactcctctcctctcttttcctggccggccagtggctacagcaggcgtcggcaggcgatacggcggtagcgctcgcccttccctccctctccctcggttgtgggcgggaagaagggcggtgacagcaagctagggcggcagcgggcgaccacggcggcacgcgacccctcccctccctcgccttgcagatccggccgaggggaggcatgggggcggcgatgctcggcccctccctccctctccctcgacagcgggcgggaagaagggcggcaacaacagcagcggcgggcgaccacggcggcgcgcggtccctcccctctctccccttgcagatccggcggaggggaggcatgggggcggcggtgggaggcggtgggaggtggtgggacggagatggcccgcgccggatctggatcgatgtgagttgatgcccctcccctcccctgccctccccctgcagatccagtgaaggggaggggcgtcttcggccggcgacgggagcgggcagcggatccgtaggcggcgaccgtgggggtgacagcgacgggccacggctagggcagcggcggaggcggtggattggggttagggttttgtttttctttttttttgtttcgattttttattttctcgtgcgggtgaggcacccgcatgcgaaaatcgcgattttcccagacccttgggtgcgtgcgggccgaccatccgcacggaaaaattgaaatcgactgcacacaaaaatctttcctgtattgaaatggggtttctttaaacattttatcccaaaacatggggttccttgaaacaaatcacaataactggggttttgtgttatcgatgccccaatacccggggttttatgaaatttactctaaataattacattccccacgagaaatatgtaattcgcatgttgttaaacaatatgaaattttagaaattaataatcaaattagcaatgtttagcttagaacaaagctaaaacatgtaatttgaaacagagagagtatttggaaataaatgtaattgtgacaatgagtgtttagtactaaagaaacaacaaaacctaagccatgttgttttcaattgtttctacatacatatagtaaatttagttgggacttcatatatgtattctgtaacttacaatgttggtttgcagaaagatcgaaacacaagagaagtacaatgatcggcattctggtgcctgcaattgctttatcttccatcgtagcatggttttgttcttggaggtggaggagaagactagcagcaagaaccttagagctaagtaaatattcttagccattttattaaaaacgcagcacgggaactaatgaactatcctgatggcagttggctaaattcattataaactaggggatagccccattcagttttgcacggagctagataattcacctataatatataactctgaaattttatttctatatagataccattatatgtaaaagtacatttggattttatatacagcgcttagcttctatttttataaggtcccatatacaactcctcgattatgtttctataggcttaatttcatatgcaactctttacttctatttctatgaatatattgtattttgtttacaactatatcaatcaatctatatcgttataatccggaccgaccatgatctaactgtttagatatttttctttttctttgattaatgtgagaatttctagcctctagagcgaacattgggtctccttttaaggatgtcttaataatacaatagattttgtttagtcaaattctatcatctttttttttctaaaaataagtcacttgtcttaacattaaaggcagttacttctcttaacataatgcttcattgtttacttttctcttcctagttccaacggagtctagtacagatgacatgcaaagtatcggctcgctcattcttgatctgtcaacactaagagttgctacagatgacttttctgagcacaaaaggcttggtgaaggtggcttcggtgtagtgtacaaggtaccacttggatgtaattgtctgggttttctctcaatttataaagagaaattttactcttgttaaatagctaagtaccgacaggtaccgtacttttttctataaaattgatgtttttttatacggtatcttctggtaactatcaagggctataaaatcatgaggccataacttctcttcacctgcttgcagggagacctacctaaaggtcaagaaatagcagtgaagaggctcgcgaagacttccaaacaaggaatagaagagctgaaaactgaactacttttggttgctaagctgaaccacaacaatcttgtcaagcttattggcgtctgcttggaagaaaatgagaagatacttgtatatgaatatatgcctaatagaagccttgataccattctttttggtactatttctcacagctccctgttttccaaaaaaaagatctctcatcatggtaatgcaaaacatgatcaagtcacacttatatatatcgaattggtgttttcttgtgtgagtggtagatgcgcagaaaatcaaagagctcaattggggacagaggttcaagatcataaatggaatagctagagggttgcaatatcttcatgaagattctcaactgaagatagttcatcgtgacctcaaagcaagcaatgttctgttggattctgcttataatcctaagatttctgattttgggttagctaagatattcgaaagggatcaatcaaaagttatcacccatcgtatagctggtacttagtaagtatatgtccagtcctttaaaatgacaattttattagttatctggtaatgcagtaaaaataatgttattcttacagtggatacatgtcaccagagtatgcaatgcgtggacaatattcaatcaagtcagacgtgtttagctttggtgtcctggttttagagatcatcacagggagaagaaactttggctcctatggttctgatcaacaagattatgatctcataaatgctgtgagtacacgaacactatattaattaatttatttattctgggaaaaatatgtagtacaaacttcataaatctgaaactaccgtaggatgtacaaatggacgtctgaaaattactcatggtgacgtggataaatcttagagatgtccatttgtgcattctatagtagctccttggtttgcactacatatgaagtttgcagtacatattttccttctatactaggctatacttctcctagttagagttaattttatcgtacattaacccattgatttgatgtagacatgggagcactggactagcgataaagccctcgagttgatcgatccatcattgggaaatcactatccagttgacaaggtgctcaagtgcatccaaattgggctgctctgtgttcagccgaaacctgctgataggccattgatgtctgctgttaatgtcatgcttactggtacaatccgtctcccttccttgtccagacctgccttttggtttcaggagattggtgctagctcagatgtaaattcagagcagaacctgcttgacccacacaactcaacgaaaatgtatcaaagtgaagcaccgatcacagagcttgagcctagataaatcttgtaagatgagttgaaagaatatccgcttcttctttcatacagttaccgatatttgtacaacggactcttattaatctggctatctaggtgttgtgttttcggctcaacaaagtcaagtggaaattattagatgttaataatgtatcctgctgtcatcctgtttaaatcaacaggagcatgtttgcattgttgcacaaagatactgtagcaaatacgacacatgcttgatacactggtttttcttttgaaagaattgatgcactgattctttatgttattcttggttcccagttggcacttcaatatgcaaatcatcattacttaaaaaaaaactattttcgtaggtaagggttcatttttttacagccaaacagaaaaatatcccgcctgtaataatagtcgaggagctcatgcaggataaacccacatgtgaaaatcaacttttataggctgccattaaagaggaccgcttgtgaaaatatgtttatttttgctggtggtcctcctaattcactgcatgtgaaaatcgattttcacaaataataagtaaagagaaccacctacgaaaatcttcggccacattaaaaggccgatcgacccagcactgaggagagttcatctctccctcgcattcttactccctctcctagctaggcgagcttctccctccatccatccaagcctcctacctctactccctctcccaggcagcgataggcatgcatcagcagtggcagttcttgggatggcaagatctagcggtagcgggcaaggggacggtgtccggcggtggcaacatcatccacggtgtcctcagcccctccacggtgagctcgttcgcgacagcggtaagcatgcatcggcggcggcaaatgggacgtacggcatccggcagaagcagtgtcgtccacgatccacggtgtaattcgtccctcccaggcaagtttgtctctgtggcaactgtaggcatgaatcagcggcggtgacaagaacatccacatataagtggtgaggtgtcacgaattatgacaatctattggtgttgcgccaaatttggtacatgttgcggtagaaatcgatctagagatttggaggtttggggaagattgcgcagagatcagcaacttgaagtaggagttggtcatttgactttatgtattttcatcaacgatgaggtctccgatggtttttctatttcgcgaacgcgctaaaggattatacgccaatatattagaagaagaaaacagagtttagttacacaatgcaaaccggcagaaggtcgttggcagggaacaaggaaaaaagaaacgaaaaccagaaaaaacacaattaaaaagatttgctgggagggtggggtggggattagtccctaaactcaaaaaaggcccccaaaagcgtggcaccactaaaaccgaaggatggactctagcactactaaaatcaaagagagagagtagtcgaaaaccctagagttccgctccttctacgattgccaggagaccagaaagacaaaggagtctaataggtctccagtggtaaggcagctgcttatgtaccgcagtgtctccaacggcgtctgtggcacaagtgcacaacacgccggctcatcagcgaccaaacacacgcgctacaggctacagctgtgaccggaacatactggcccagcggggaagtatcgtgtgcaatcgcacttcccagtgggagaatgcaatcagcaaggtggatcaccagatgcgaaatgtgcggcttggattgaagcaggtcatgagctaggatcactttaaaatatatgcagatgcccccccaagtgtcagtgcgcattttgcacgcaacaccccataattcactctcttctactccatagtccccacgaaattcccctttcatctcatcgaatcaaacacaatagagatggaggcgaaatgtacgcgatgccgaacgactccctcgtcggcgccgccacggagtgggacaggcggcgggcgagatccaacgggtggctccgccgcgcggtctacagctccgcccgtgacctcgacgacgcgcgggccagccccatggccgcgcacgcgccgctccgcttctctgttgcgccaacggcagccgccaagcccaaggtcgtcggtacattttttaaactttcaagtttcaatgttccatagatctagaacaactacctttccttttgtaaaaaaatttttcagggattttttcgttatgtctaccgttggtgttgatatgatttttattacttggccgaggaggattcgaacatttttatccattcttcacacgaggtagaagcagatctcggtttactgctccagattcttgtgaaccaacggttaagcgagtgtaggttacagaatgagttatgtttgtaaatgcacttttttttgttcttatatatgatttagtttctttcgaccttgtcctgaaactttctgtaatgttccactctcaggaaagcttccactgaaaggagagaagttttctttgaggctatgtctgagaaagtagcagatagttcttctgagagaacgactagtcctttagaatcagacagcgacgcattttataaaaatcttgatcccctcttttctgtattacatttttgtaagctgttaagttcaaaaaaaattaagaagaagagttaaaagattaaattgaattctgcagggtaaaccagattaaaccagaagatgtggttgcccagcgaggatgaggctgctgaaatgtgctactggtggttattatgtcaaaacattagttgattatgctgtaaataacattagatgtgctactggtggatagatattaacgtttacataacattcttcttctttttgatcaaattgatagggaaaaatggtgcaaaacgacgtacagtgtgattcttcataacacatgtcagagttaaacgtgcgagtgtggtttgagtgagtactttggcattctctgatgtcatgcgataagtgtcagttatttaccataatttttagtaaaacatcttgcctcacttgcaagtagaattaacttgactttcatcggaatggcaaaatgtatttttgcaggttatgctacatctgggcgtgcgtactattcctcaatgccatattaatgatgcgatggaccaagaaagctcgtgactctatcccagcacaccttgggacctttccagatgatgttgggatggcccaggcaagagtattcaggcataatgttttgcaaagcactgcgaatgagatagttaggctcggtgatcaggataaccaatcttttgagattcttcttcgttatcttggggaagcaaaggaggagattgccaaagccgcttccaagatgtctggtgctgcggccagttttcatttcatttcatttcagatgttttcatttcagatgtttcagtctcttaatggaatccatgcaactgtacctttcgagcttttctaatctaattaatgtgaaatttgcaaattcattaatttctgtagctttcgagcttttcataatattatgttgaactctttttcgtccatctaatctttagtttaaccacttacatccaggatgcaattgaggttgcaggggttgctcttgttttaatcggaccaggtactgttgaaaaaacagtggcagtggcggcgacgacgacgacggcgaggaagagaaagggttatcactacgcttgcaaaaatggcgtctcctatgccaccactgactctgatgtgttgttgaacccctttttttttctagctgatctacaaagtgtgcagtacagatgcatctcttattcattgccatggtagtagccgtgtctggtgctgttgttcttcatctctctagcaaagtatatcttgttaatgaatttgggctcatcatgacaatacgatgaaagtaacatttatgatccacaaaatttatagaatgctattttaatatcactgctgcacacaaagatttttctggtgaagggcacattcagatcagtattgtgcacaaggacttctctgataatgagcacattcagatttaaggagaagaatgcaacagacaggcagatgaggcagcttacgtctttgtagtgaacgatatttatcttctgaaatgtttgagcagaacttatgacacagatgtattggatagttttccacatggtcatggatgacacatttgcacaatctgcttaaacttataaaacatttttgcaatcttgggaatcgaacatacaagaaaccatatgtatctgtgtgtggcgaacaaactatgcattcatttaagtttagatgccaaggctccaaatattttcagcttgcatgacaaggagagaacaacataatagttttgagtagcaggagccaggaagccaaatgcaagttaaaaagaaaaaaccatgctgacatgctaccaacattttgctatgtaacacaactagttcagtaggtcacagaatgaatcttagtacatgacataggactaatcgacatatcaaattgttgatacatcacacatttgattagagaacaaagaccaccctatataaactaggtagcaaaataatgaaattggaagtatggtccccgatgtttgatcctaacaaacttgtaaatgacagatcttgaaattgcagatcaccatcgccatgctccataacagcaaattgtaaaccaagataggctccaaggaaacctgccaccaaacgcaagtagttaaatgtttagaagcaaaccatgataggtttagataaatccacccacacacaccagcacctccataatacatagcagcaaattgtaaaccagggttgtatggggaaccaccatcaaatgtaaatagtgaaatgtttagaaaaaaataacatgacagattcagatagagttgttcaattataaacatattcacctgtagtgtttgcttggttgccaaaattaaattgccataaattgccaaaataatgcttctatcaatatggcaaatacaccaagataatcccagacaaccaaaagaagaggttacccaaaatgaatcatcataaacttgctccaaaatgacaaacttactccaagctaacacctgccatcaatttgaatagattaactacaccgtttaatcaaaggcaacaaaaacagaaaaacaaaaaaaagatggagcaagggcactaacttgattcatggatctagtggctttttagagccatttgccttccttttcttcttgttgttttgctgcacttccccttccttatcatcattactagccttttttcttgccttgcccttatccaaatgtcccaacaatctattgcacttccccttggcacgcacatcgttaggtgggtgaatgtcaatttgcgtaggaatgctacaaccaagaaattcctcgatctcgctaactctagtcctttgagtggctggcaccatctgtcttacttgttttgcaatgtcaagtacaccatttttcaagagttgcatgctatcaatggactgcttagctagatggattgtttcttccattgtgttgaatacatcaaacactaattttttcatcatagggtcagttgaggtgctctcactttcttccaacaaggtaccctcactatcaaacacaggttcctttttgcacatctttgtccaccttctgaggactaaatgttctggaagttgatttagcctagcacttctaaggacaagaatcacatggcggcaaggaattccaagagattcaaataacatacaagtgcatgaaatatccttggttgatgtgttgtataagacttttctttcccttagtgaactatcacttaccgtagtgattttcacatccccctcgatttcgatgttctcaactatgcatttctccataacagctacaacctctttctgaaaagtgtcaaatatctcatgggtgaacacctcccttccatgcttctcaaacccccattctgtttttagtttttggttagaatgaactgtaacattgtcattttctagctctttgtgacgttgttcttctagagctgtatcaaacctgagccaaaactccaccaaagcaagtttgaagcctataaaatgacagaaaaaggagttggtactctcagatcttgaagtcgttcgaagaatgccccaagagaaatgtccttgaagtaaactggtatccatgattcccggatacgatacctcgttgtcaaccactcatggtcttctagaccatagtcagaaataatggaagtccattgtgcctcaaattcctcatcagtttcagtacaccatacacatttgttaaaccgatcaaggaactctttgtcctctcttaggggatagcctaccttatcctttaatttcctcataatatgccacatgcataacctgtgggtgctcgtagggaaatcaacactaattgctgccttcatactagcacattcgtcagttattattagcctaggttcaacacctcccattgctcgcaagaatgtctgcagcaaccatctatacgactctatcttttcattacttagcagtgcggcaccaaataatacacaagaccgaatcgatccacttacctttccttctatctctgtcccagacctcgccgccaacaagctagcggcccctcaccccgccgcataccggccagaaacacgacggcgacgaggtgcactagcgcccaacctgagactgcgccgccgctcagtgcgacgagctgaatccacagtgtactagaaaccctagccctcaatggggaaagctgaaatgttttggagagagaggagagtcaaatgttcagccttggcttctgctataatagagggactggaagcattttggcacataacatagagacatttttgcataaacaaccaacaatgtgggaagtgcttcgatctgagcagtacacttttcatccgacggtccacattgaagattgaatttctcccaccgaatagtagtattgcactggatacttccccctggcccagcaacatatacgcacacttgcaagtttagaagttgtcctgccgtctcagacatggcacacatgacaattaggctaggaaaatttgcctcgtttgattggtcacatgcatggaaagagactcacatccaagacctggaagtccactgtccacgcatacatgggccacggctctacggcactccagccggcgtctccgtacgtatccggccccttctgatctcttcctcagtcacaaaccatcatgtccatggcctgctactacctcgccgccgcagccgccggcctcgccttgctgctgctccacgcgcccctcaccgatgcgcagacgctggtgcctttgtgtggtgacagcggcaactacacggagcacggcacgtatcacgcaaacatacagtacttagccacctccctgccatcgtacgcctcctcctccccctccctcttcgcctccggctcctcgggcacagttcccgatgccatctacgccctcgcgctctgtcgtggcgataccaactcttcctcctgcgctacctgcgttgccgcggccattcagagcgcccaggaactctgcccgctcgtcaagaccgtaatcgtctacgacgacacctgcatcctccgcttcgccaacgacgccttcccgatcagccctacctccaatagccaagggatggtcgttgcttggaaagcccaaaatgtcagcgcggcagtggctccggcttttgaggccgccgtcgtccgactcatcaacaccaccgccgactacgcagcaacggactccgtcaggcggttcggcacgggggaggaggcgttcgacgagacaacttttcccaagatctactcgctggcgcagtgcacgccagacatggcggcgactgcttgccggagctgcctcgaggatatagttgggaggatggtatctgggaatttgattgggaggatgggagggcgagttttgggcgtgcgatgcaacttatggtttgaggtataccctttcttctctggccgctctctgttgcaactcccggggccgtcgccttcaccggcgccaccggtgaccgcagccggaggtatgttggacatactttttttctccttttcttttatttatcacttgcctgatattttcctgtgtgcaaagtgtgttttcttcgataacttataaggctggttaaattatatttgcagaaagatcgaaaaacaagagaagtgcaatactagccatttcaatgcctacaattgctctagtattagctactattgcagcatggttctgttcgacgagttggaggaggcggagactagcaagaaaaacattacgaccaagtaaattcatcttatccattttgttagaatggaatatcacggaaactaattaatgaacctgtcttgttatttttatgaaaagttggctcaattcaagtgattcattagaaatttcgtttaatcaaattccattctctctttctcacacaaaaaaaaaatcagtatctaatattgaaggcagttatttctagttgccgtgttggaccacttttcaaagatgcttatatttagtctatagatcttctctatatatggtacttctcaattgtccgcacaataaaattataacttggagctaccaaatatttggacaaggcatcaatcaacatcccaagttatagttcggcgaaatctcctggtagctccaaagttagtagaaagacttttagtcatattagtgtcattaattaagatagtacttccatccttacgttctaattttttttctagtcaaacctatttaagcttaaccaaatttatatcaaacaaattagcaaaatatagtcaacgtttgatttaattagactaatttgatatcgtggatattgttaaattattctataaaccactataaatttttgttagaaaagatcaaagcatcttaatcttataacataaaatggagggggtacaaggactctttccatctgttagtcatatactgcgtaattaattatttacttctctcttccaatagagtctagcgaagatgagatgcagagttttgcttcactcgttcttgatctacaaacactacgaactgctacagataacttttctgaacacaaaaggcttggtgaaggtggcttcggtgtagtttacaaggtaccactcacaccatgtgtaacagtgtgggttttctctctcaatatatgatgaggccgcaacttcttttttcacctgccgcagggagatctaccagaaggtcaggaaatagcggtgaaaaggctcgcacagacttccagacaaggaattgaagagctgaaaactgaactacttttggttgctaagctgaaccacaacaatcttgtcaggcttattggcgtttgcttagaagaaaatgagaaaatacttgcatatgaatatatgcccaatagaagcctcgataccattctttttggtactatttctctcatctccctgtttcccaaaaagaaattaaatttcatgatgatagtgcaaatacgcctaactcatacctacatgtcataattggtgttttcttgcttgagtggcagatgcagagagaatcaaagagcttgattggggccagaggttcaagatcataaatggcatagctagaggattgcaatatcttcacgaagattctcaactgaagatagttcatcgtgacctcaaagcaagcaatgttctcttggattctgcttataatcctaagatttctgactttggtctagctaagatattcgaaagggatcaatcacaagttatcactcaccgtatcgctgggacttagtaagtatggccaatcctttaaaataatgaagtcaatagatcatgcagtaaaagttatgttcttgctacagtggatacatgtctccagagtatgcgatgcgcggacaatattcaatgaagttagacgtgtatagtttcggtgtcctggttttagagatcatcacaggaagaagaaactttggctcctacggttctgaccatgtggttgatctcatatatgttgtgagtacatggacccaattattctataccgagctaacttcttctcccaattataacttaaatcgaacactaacccattgatttgatgcagacatgggagcactggactagcgataaagccatcgagttgatcgatccatcattgggaaaccactatccagttgataaggtgctgaagtgcatccacattgggctactctgtgttcaaccgaaacctgctgataggccattgatgtcagctgttaatgccatgcttagtagtactggtacagtccgtctcccatgcttgtccaggccttcattttgggtccaggagattggtgctactgctagctaaggtgcaaattcagagcagaacccacacaactcaagaaaaatgtcgcaaaatgaagcgccgatcacagaacttgagcccagatgagtattgtaggatgagaattgaaagaacctcggcctcctcttccttgcatttaccgggaattgtacaacaaactcttattaagctgcgctagctaggtaccgagtttttggctcaataaaatcaatttgaaattgttagagcttaataatatctcctgttatcagcctgtttaaatcaacggaagtcatgtttgtactgttgcacactgatactgtagcaaataagacacatgcttgatacaatggtttttcttttgaaagaattgacatattgattctttctgttactcttgattcgcacttcaatattcaaatcatatcctaatctgttgcaactccacagccataaatgtgacaatatcttgagtcttgtgctgcagtaattcatctgttattttcatagtacagaatacggatcattttgaacggacgtaaagacacatttccctacaagcaagatcctgaccttgtttgagcgcattcgttcaaccacgtcacgtgatgccaagcttactaggattcgttcaatgttggttcaagcacttaatgctaaacattggagccatttactgagtttgtttggctgcttgctgtaatggtttcagtttccacccacaatgtttggatcgggggacgtaatttgaatgtaggcaggggattaaaaattgggtctaattcgacaaaccaaaacaagattgcatcaagcaaaaaaaaaaaaaaaagaagcaggaaattgtgagagcaacaggaacgtaaatcagcaagaggttgaacataaatcggatcaaaatcacccgaccaacatggtacaacgaaagaagcttcccctcgagatcttcctcaccggaacgtagcctgtaatccgggagttggaggtggtcgacggtgtcgttccgcggatgccggttactcgtgaagataacagcggtcgccgcctcgtcggcggcggtcggtggcggcggtttgaggtggcggtaggcggcgttgggtctcgtggaatcgagcggccgtgcggcgccatcgcgaggatcgaagcggcggcgttcgttggaggaggcggcgccgccttgccgggaacgcgattcctctccgtatcagtgttgtgttgcttagcaattgggccggtattggatcccacagtaccagataacggcccatcgtaagcaaacaattgtaacggttcctatcagcgctgggaccagatacgggccgaatttggcccaaccaaacacgtcccagagacactgccttgtctagaaatgaaaagcctatacgtactaaagtttctattactaaactcttattactaacactaggaaggtagcccgcgcagatgcgctggcaatttatttattgtttacaaatttaattggtaaattttgagatagatctaatggtttagaaaatttgaagatttttttcccaagagagaggaaaggaaagaggagatgaggagagtacgtccgtaccatggaagggtgtggagaaggtgggagcacatactttttttattcgatctaatggttaaaaatattggacccaccaatttaaaacaaaatcaatggatagattttagagtgtcacttggcttaatccaaacaaattaaaattaaatcagatctacttgaaaaaacacaactaaattgttttatttttttcgcaattacgtagtacatttatcaagtgatatttgacatcctaaaatatgatacgaaattatttaaaattaccgtaacattaattattatatatttgcccaagatgtggtgatgtatttagaaccgcaatataaattttataagacacaaatattttatttaattaaagaaatacaacgggatcacaaattggttatataatttaaaagatgaacgtttagaaataattgatttgacattttttatttatattatagatctagtttatatttgcacatatttgtggagtaatatatttttatatggtaaaaagttatattttaaagaccattgattttgttctgatggtaatatgtattatcgattttaatttattttgaatcttaaattgttggtttaattatgtatagagcaacagttagattagatatgatatgtgtagcttaaaataactgtggttgtttgtctttatcaaagctactcaaaaaatatagagagaagtggagggggcagaaagtgttttgcgtatctaatggtgagggtgaggtagaggggactttgtttttctattttttctaaatcatttaggtcaaaaaccaattatcatgtattttgttttttaaaatcttttttaattttaaagtcatcataatgacttaaaaaggtaatattagatacacctatttaagctggacgatttaactggagatggcttggttcgaattagctacgtaatatcacggtaaagccatgcaaactgatttaattagctgtatatgttatattaccgttaacctccttccacaaatcatgtataatacactaactaatttaatttgctatgtataatcttcttgttaatctcctagcttccttatatatatatattgccgtgcatataataaatatagctatgattagtagtaacacaatatgacagctaattaatctcaacttctaacaaccatagttactaatccttccggcaaaccatacatatgtacgggagaaaggtagatttaattcattggtataaaatagcgggtccaccaatttaagtgaaaatcaacggcaggtaaagatctaatctaacggtataaaataatgggtccaccaatttaagtgaaaatcgacggtgagattatattgtgccacatggcggcctaagagtatttgtaggagctccacgtggcggcttgagagcgtttgtaggaagtttaatggacttttagtatataatagatagaagatagatagatagattacgatgtcatgctgtaagcccatctagattgtctataatttatatctattaagatcaaactattgatatcattaagagttctgtaaaaaaaaagttagtacatgtagctgtgctcgtctagaaaacactaccgtcccaaccaactagtcttgaggtatgtgtgcatgatgtcccaacgagcgcaacgcgtccctttttaattataaataggcctagcccgttaatatatgagcttccagtctatccttaattatataggatctgacttgttcaacgtacgagtatgtaactttctctactatcttaaaagcggaattgtcttactcctgtctcctccttccaccgcatggaccgtgctcgcatacctagagtaagtaggtaaccactagattaaatattttatttcaaatcaatcttatagactatcgatatttatatggatatgacctgttacaacttagggatatgttactaagtcattttaaaagcacaataccaatgtgtgagtgtgacttccctctcacagtgatcatcgacggttgtgcgtcggtgggtttttttttttcaaaggtttgtgcgttaaaaagttcaaagtcgtatctccggttattaaacatctatcatttgcctatcattttctaacataatctattagcccaagtgcggaagtgccccgttgctgcgggcagttctcgcaagacctatcgacagaaaactccggtccaaaatgtcattctcatagtttatcagtggttgaatgtattagaagcaaacaagtttttcaatgtatttaatagttcaacggaaaaaatcagagctttccacatcactccgtaggtctaataacagcataattgacaacagtgacaattcatcatgccatacatcgtgatcactcctgacttttattatccactccggtcagtttcaatttctaagaaataccatcttattaattctaattacagccacaatggtggattcaataaataataatatactgacgtgatgcagtagggcatccccacgcatcaacctcatatgtaatatctagaagcattgtacacgactgaactaaaaattcaggattcatctcggcacaagctctgtgattgacaaatcattcgaagacaccactgttgaattatcagaatacccggaatgtcttggtcttggatagcgttctgaatacggattagagctgtcactggcactaacctcctggatgcagaacgccggcctggatagagaagggagacgaacagtgttgctgctaagcatgatgtttactgacgaaatcgtcggcctgcttgcaggttttttctgaacacacaacaacccgatgtggatgcacttcaacatctgctcgattggaggatggtcgcccatggatggatcaatcagctctacaacgtttccccttgtccagtgctcccacacctgcaccaaattggttgatctattcaagtaatatatatgttgagaagtttggttaattattcatgaacaaacttgaagtactcactaggtttaagagatcaacatcttgcccactatcatatgagccagtgtttcttcttccggtgataatctctaataccaaaacgccgaagctgaacacgtccgatttgattgaataattaccacgcatagcgtattctggtgccatgtatccactgcgacaaagaacattacattacaacctagtattatatttgttaccttaattttgataaatgttgaccatgatcatgcttactatgttccggcgattcgattagtgacatcttctgattgatcccctccaaatatctttgctaagccaaaatcagaaatcttagggctgtaatcaaagtccaataggatgttgcttgctttgaggtcccggtgcactatcttcaattgagaatcttcatgaaggtattgcaagcctcgagcaatcccatttataatcttgaatcttttcccccaatctagctccctgttcttgtcggtatctgaggctcaaacaagaaaaaccatagcattgtaatgtaactaataactctggcggcatttggcactagtataattgttcttttttttcttttggaaaaactactagtgagaaaaccgtaccgaaaagaacgatatcaaggcttccatttggcatatattcatagacaagtattttctcttgctgctccaagcaaacaccaataagccttactagattcttgtggtaaagcttagcaaccaaaatcagctcacttttcagctctcctattccttgtctggaactctggcaaagcctcttcacggctatttcttggccatcaggtaggactccctatccaagtaaagatacttactatataaccaacaaaaatataactgataaaggtacatgtggtatgattttctaccttgtaaaccataccaaatcctccttggccgatcattttagtatcagcaaaatcatctgtagcaactcgtattgttggtagatcaagtataagcgaatcaatgctctgaatatcgtctgaactaactgaatctgttgggacaaagatgataaacaagattaagcttatcaagaagtctggtttcattcattcaggaaaaaaaaaaaagggaaatatgatttcactagaagccggggacacagcttggcattaagattcaagataatgaaaataaataaaagcaaactattttcaattcaaccaccaattccctgccggtcaacaaaacttatccatttcttgctgtgctaacataccataatttttagcagacttacaggacagaaacgtctgttcttctggtcgtctcttcttgatcctcttccagcaacaaaagcatgctacaaccatgagcagtattgcagctattgcaggcataactatcgctagaactgtaccaatcctatttttcgttttctctgcaaataaatacaatccgattcagaatttcagaaagtgtgaactgcacttagagactgtatattttgccgtggaatttccacgaatttccacgaaagagtcatagttggtctttttgcaagattatctgcaattaattaatctgtgtgcctttcacacccaaaagagaaaagtggtttgtgttgctcacctccactggtcgccgatggcgaaggcggcggcggcggcgtctccacgaacgccggaagctgcagcagcgggcggccggagaagaaagggaacacctcgtaccggaagttgcaccacaccccgaacatgccccctcccgtcctcccgctgaattctttgggcagttgcccgatcaccgtcgagaggcaggtccggcagacttcgggcgtcttgtccggcgtgcactgcgccagcgcgtagatcttggggcggtcgctgtcgccgtcgacgccctcctcctcccccgtgccgtaccgcctcgacgagtccgccgccgcgtagtccgcggtggcgttgacgagcactgcgacggccgcgtcgaacgctgccgccgccgcggcgcccacgcggcgggagcgctggagggtgtaggtggtgacgaagtagtcatcgtcgaggaagaagtcgcggttggagtagcggagctggcagaggtcgtagaagacgagcacgtccttgacgagcgggcacctccgcggcgcgtcgcggagggcggccgcgacgcagcgctcgcaggcggaggcgttggcgtcgccgcggcacagcgcgaggccgtacaccttgtcggggacgtcgccgacggtgcccgtggcgtacatggccggagacgaggaggtgttcttggggagggtggtggagaggaggtcgaggttgacctggtacgtgccgttcttcgagtagttgccgctgggagggtacggcccgcacaggacccatggcggaggctcgtcctctccggcggcgagcggcgcgtggaggaggacggcgaggaggaaggttgcggcggcggcggcgacgccgtcgaggtagggacggtggcggcgcattgtgctggcgatggtaatggtaagttgtcacgaggcggctagtgtagaggaggttcgggaattcgactagtcgagtgataggtggggacggagtgtttgaccggagaaagtggtttaggcacatcatttgttttatataaaatcaacctctattaatatttaaattttataacttaattttaaatttgactttaattagtttcttcgatgtttatttttagtattagcttttaaattaccccacgcatatatagaactacaacatgacatcctacatggagaaatttgcatatagaccatccataagaattggtttcgttataatatcatcgtcaaaatgggattagatcaaatgccactctcaagcaaggggtattcgctaaaatatcattttcatcgtttcttgcatttccaaattatttttcctcaaatttattttctctcggacatttatgcccctagatgaataggttgaaccagaccacatttcatccctccattgtgtgttctagaaccgagtaagcgcgagaggagaccaatgtaacgtgtcgtgatagaagcacccatcggagtaggccgagaccatgatcgcccaggtgattccgctcttgtctgacatttcgttgaacacctggcacgctgcctccgtgtccccaaacaccgcataggcgagcaccagccggttggtgagaggcaaagggaggccagagacggcgaagttgccggtgcaatccttgaggaaagagacataggagtcctcatcgggcaggagccgagcgcttactcggtgaagccgttgtgctagtagttagtttccttctttcgtcttcgccacgcgcggtagaggaaatgacaaggccgttgttgttggaggtggtgggacggggaaactcagacgcaggtgtaggggcggtggcggtggcggtggcggtggtggtttggtcggttttcgcagagtcggcaaccgcaacgctcccctagcggtggcattagtggagagatggcggcaacgaggagagaggtgcagagccacagcggtggtaacgccgaatggcttggcgatggaccaatgtgccatggatgtgtgggttgaggcggtgaggctaccagcgagcaggtggtgggcgacaccggtgaggttgtgcggttgcaattgcaaactctcctctcgagcttgcttggttctagaactgagaatagggagatgaaatgtgatctaattcgacctattcatccaggggcatacacattcgagaaaaaaatcgaggaaatataatttggaaatgtaagaaacagagcaatggcattataacgaatgcccttcgtttgagagtggcatttgatcaaattctattttaatgatggtattctagcgaatctaatttttttagatggcagatatacaaatttctcaaggtgcggagagtgaaagggagagaaaaaagatgaggaggagacattcaatgttttctgatgcgacaaatttatggagccttttaactttacagagcataagcccctcaactccgtgacaaacaagcaagttttgtggaaaagaaaatgatcaacacatgatgacaaaaaaaaaagatccaagtgtaatctctaacgaaaatgggccttaaaaagactaggtaagtggcttggagaaaatctcatttcggaatttgccaaaatatcgctcagctcatctctcaaccagtgtgtcatctgctgctctcttcgttctaaaataagtacaccttattagttcaaatttaaattggagtgtgtatttattttagaacagatggagtattattttttttcgaattgatcttaaatcttaaatcttgcgtagccgccagtcccgccaaacaaaaactactctatctactcctgagcatcttcaaataatacaattacaatagtactgcagggaagcctcgtagtctctgttttttcctccttgatcttgacatctctgcagccctttcagatgctacatcgaagacaacgattggtcatcgagtctggttggcgtatatttttcatttttatcaccgtgcgccagggttcaccaccctcggtaacgagcgatattttgtgattctgcagaagccgttggtaaaccaataaaaaccgacaaaatctaaaaatttcttatcaaacaattaaattttagtttgattttttctcccctataaaaactgagctatttgtattttgacccggtccagaaatccggatttcctagttatcctttgcttttgtaaatcgtgaggacgcctactccctccgtcccataaaaaaccaagctagtattgggtgtgacacattttagtactacgaatctggacatatctatgtcaagattcattgaactagaatatgtcacatccagtcctaattctttttttcgggacgaagggagtaatggcctaggtatgttaaagctcagccgttggtgcgattttgaagaggtttttttttttcatgcgcaacttacgacctagttgacacaccttcaactctagctccgtctcttttggagcatgagtttaaccaaacggtttcaactttcaactctaaaaaaagaagtgaatcaagttgaagtggtctcacaaaatgaataagtagagttaagtttagacagcttcacaactacagtctacacttaaaatctagagttatattagccataccaaacgggccattagtccatcaaatttcatctgagattcaatttaatatccaatgtttcaatatataaatttatccttttcgaatacatctaaattcacttgtgccacctcgcgaatcatggttagttattattgccccttattcgcatcaattatgaaaggagaaatgaagaataatatgtgtgacctgggcaacggggatcaggtttattcagtttttcaaaatattgtttccttttgctacgttaatgaacaagggatacaatacaagagacctatattcattaatggagtgttgactagaattggtcaggtgacatctcagtttcgtcccaggatgatcttaaaccagaattaatactttctcttttaaaaaaagaattaatatttgtgagactcaaaataaacaaatcaaaatgtcgactaaattactctcttaagagagtctcatgaggaactcctaaatttaatagtggtgctcgtatttacggctaatttttatttcagtggtagacgatcgtgataaatcttaagatatattatctcggtcttctgaagatgctcctacaaataagttgtgcgtttgttcatatggacgagtgcacgtgcattgtgggtcactgtgtttgttctgtgttaaaaaaaaatttactactctctcaagagagtctcgctggctgacgggcacgtgtctctctctagtcaacacacaattctagttagtcaactccctagccccaccgctcttctatttcctctgcaactgcgacctttcctcgagcagctagaccaccatggcgacggcggtggcggcgacggccatgcgacgcgggcaacaccttcctctctctctttctctctgctacaacctcgccgcagtcgccctgctcgtggcggtgttcctccacgcgcctccgcgcgcgggagcgcagccgctgccgtggcaactgtgcaacgccaccgccggcaactacacggaggggagcacctaccaggccaacgtgcgcgcgctcgccagcgccctccccgggaacgcgtcgtcttccccggccctcttcgccgagggcgccgccggcacggcgccggacgtggtgtacgccatcgcgctctgccgcggcgacaccaacgcctcctcctgcgccgcctgcgtcgccaccgccttcgacaccgcgcagcagctctgcgcgttcaacaagcgcgccaccctgttcaacgacccctgcatcctccgctactccgacctggacatcctcgccaacgtcaccgacaacagcgggaggttcgtggcctggaactacaacaacgtcagcgcggcgaaggcggcggcgtacgacgccgcctccggccggctcgtcaacgccacggcggactacgcggcggcggacccggtgaggcggttcggcacgggggaggtcgggtccgacgacgcgacgtacccgaggatcttctcgctggcgcagtgcacgccggacatgtcggaggccgactgccggagctgcctcggggacataatcaggaaggcgacgcccaagtacttcgtcgggaagcccggcggcagggtgttcggcgtacggtgcaacttccggttcgaggcgtacgagttcttctccggccggccgctgctgcagctgtcggggccgccgccgccgccggctaacatgacaccaccggtgaccagtgaaggtgagttgccgaaacagaaaccacacatgatcgctcgtcggatactcggatgtcgctttctgcttttctcttttttttcctagtttcgctttaaggactggtttagttcctaactttttattcaaacttttaactcttttatcacatcaaaacttttctacacacacaaacttccaacttttccgtcacatcatttcaatttcaatcaaacttctaattttagcgtgaactaaacacaccctaaattttactacctccgtcccagaataagtgcaaccatgagtttccgcgtccaactttgatcgttcgttttatttgaaatttttttataattagaagttttgttgttataagatgataaaacatgaatggtactttactcgtgacttatgttttttttttcaaaatttttttaaatatgacgaatggttaaagttgggcgcaaaaaaccatggttgtacttattttgggacggagggagtataatggaatcgctgagcacgaggcgcatcaattttgggtagacattaagtggaatcgcctccaacttaggacttaataatttggagttgaaatttagtccttgtttagatcccaactttttttctcaaactttcaatttttccatcacattaaaacttaactttcctacacagataaactttcaattttttttttaaactttcaattttagcgtgaaactaaacacacagtaagtagtaacgaattgaccatcaaatcgccggcaaaattcctgcttattatcgtttatctccggtgaggcggggaagaactactactggaaaatctcgtgtaatcgctggggtcctgcttctgatatttgtcacctagttatatatcatgaccaagatgaaagcagcctttcttgaacgtacagtactcaactgctaataaagcggaaggttggggaagaagccaagaaggtgagattggtcaagatcgaggactaattttcaaggttggctacgaagcaggggtaggtggctcaggcggccatctgtgctacgggggcggtagagacagctgatgtcacaaacgcgatgatccacaggaggggtattgatggccaaaaggcccaggcccgtcagcctggctcagggcacggagttttggctcggcccaggcatggcccgacctgactgatgtcgagcctatatggccggcccaaccgttgggtcgtactttggcctctgtcccggcacagtacagtccaataatggggaggaaaaatagacttatttagtcatataagatatagcccaaagaaataagggatgcaaaatagacttatttcagctataaaggacacggcccaaagaaataaggacaaatagacttattcagaggaatacagtgggcttccgtgcctccgggctagcccaagccttattgagccgttagtgcaacccgtgggcaggcccggcctagcccgtcatgtaggtcgggtcgtgttggcctgactgctctcgggcccaggcctagttgtgcccgggcccatttggccatctataggtggggtaaggttgttgggcaattgaagatgaaacttagacttcgattagaagttctgcattatagtatgcatttgtttgaccaggcttcaggtacttgatcattgtttgatggagttagagccaaaccaaacactactaatcctcaatgtttttaagagtatagtaggtgattagcttcacaaaatagatagcaagggtagggctcagcttcacaactccagctcaatattagatttagaaccctaccgaacatgccttatgtatctaacacaattactactttaagattcgttttattaagccccgatggtgcaatggttgagttgcaggggtttatatctttgtgccccacaaatatcatgtacatgcgagtgcgtttttaataggaattctatcgggttagagatgtctcgctgattcccgtttcttaaaacatgtgttaggagtacactgatgggtgtgtgagtcagtgtgacgtgcgtgacggtgtgtttgtatcttccgtaaaaccgagaaaaatgtttactacattcttttaaaaagaaagagaaacattaagcataaccaatcttagtcgtactaactggtttcaaactaattcaacgatctctattgtaggaaaaaaaactttttttgaattactgtacttcctccatttacgttttaggatgttttggtctctttatatatctctcgtctatattcaacacctatatagtaatgtggaagagagaagataaggaaaaacttttacggtgtagacgaaacagttatttgcactttgctgtggtccatgactataacaccatccatggatacatttacattttattgaagttctcattttgaaactagccaataacccgtgtgttcagagtactttgtttatatatgcttatttcacttataaataatttagttttattaatactttcaaatttaaaactggtacttacaaaactgtacatgcggaggccatatggattagtaaattaaagttgtacatgtcttgtattctaaatttaattagtatctcattaattcgattatgaaaatcaaaataaataattaaggaacaaaactgacatggagtcatggactactttttataatctaagttattataattcatttccacctagatgatagccagattttactaagactatctaataattataagatttacttcggtctaacaaaaaataccttgagatatcggtacctcataataccaaatcgtttccgatcgttagatttaagaatgcctatcatggctagctagatccaacgatcggaaacaatttagtaccgtgaggtactagtacctcgaggtactttttcttggaccgaagcgaatcctaataattatacgcatgatttgtttgcactttgcaggaagaacaagccatagaacaggacggatcttggccattactctgcctattgctggagcagcattagccttcattgccttgacatgcttttgtttccggagaaagagaacaccagcaaataaggcctcatcactgccatgtaagtcctcttgcttcaggatattgtacttgtaacctgcaataatacagttcctagaatgtgttctttttccaaatcctgtgagaactttaagtgttcttttcagttaaatccctatgctcatctaaggccttacttggtctggttacccttggaggtagggaaatggccctttacttgataaaacatttttttagagaaaatctcattaggcaaagttgattatttcatttagcgaagttcgtagtgtactaaagttaaacaatcgatggcatttagtttaactaaattcgttgcaaagcaagctagctttttttttttttttttttttttggcgggggcaaagcaagctagctttgcaatatgagtcatcgttcacctgttatcttgctacagtctcaactaatccggatgatattcaaagcatcgactcgctccttctggacctatcaacgctacgggctgcaacagacaacttcgctgacagaaataagcttggcgaaggagggtttggtgccgtttacaaggtacaaatcaaaccatatgtaacccttgttcatctttttattagaaagtgaatacattcgtgttcattattaacaagtttatctatatattcatgggagtggattataatccctcaaggggatatcccctcgtatacctttttctttcaaattcgatgcaaatagttgtgaaaaattctgaaaaaaattgacaatgtagagtataatgatacctactagtccaccaaaattcatgttcaaattcaatctacacatcgagaaacaaaaagacaaatttagatataaacagtgcactactattcatacgctgaatttgtcttttttatatctcgacgtgtgagttgagtttggataagattttgtgaagttgtatatatatgttgtatgaatgttatcaaatttttccagaatttttcataaccgtttagatggtttttgagcaaacgaggaaaatcccctcgagggattagaatagtttcccatatattcatctgtacacagggagttctttctgaaggtcaagaaatagcagtgaaaaggctctcacaaagttcaagacaagggatagaagaactgaaaactgagctagttttagtcgcaaaacttcggcacaagaaccttgtgagccttgttggtgtttgcttggaaggagatgagaaactacttgtgtacgaatacatgccgaataagagcctcgacaccattcttttcggtacaatcccctcactgcctttgcgaaatcgaagcgttcctctttttcatacatgaaagagatacatgcatacataccattacactataggacttgatgctgatttcctttgtgtttgaatggaagattatgagaaaagcaaagatcttgattgggggaagaggctcaagattgtaagcggagtcgctcgaggcttgcaatatctccacgaagattctcaactgagggtagttcatcgggacctcaaagcaagcaacgtgctgctggacttcgatcacaacccaaagatctcggactttgggttagcgaaactgtttgagtgggatcaaacgcaagacgtcaccagtcacattgctggaacatagtaagtatatatatatcccctgcaattccatggcacggtattatgaaagtaggtacaggttcattacaagatcatctcctattattttcagcggatacatggcgccggagtacgccatgcgtgggcagtattcagtcaagtcggacgcgttcagtttcggagttatgatcctagagattgtcacgggaaggagaaacagcagcttctccaactcggagcaatccattgacctcttgagtcttgtgagcatcattaatctctgctcctcctcattaccatgagacctgatcaatcaaacatgatacgaaaaccatcttcttaattgaaaatcatcctgacaaatttatcctgattatgcatgcaggtctgggagcactggacaacggggacgatcgaggagctgctggatccggcgatgcgcggccgttcagctgacgatctgctgaagctgatcaacatcgggctgctctgcgtccaggacaacccggcggacaggccgacgatgtcggcggtgagcgtgatgctcagcagcgagacgttctccatccaggccccgtcgaggccaacgttctgcatccaggagacggacagcgccgccgacacggatctctactcgagcgcgcttcggtccaccggcgacagcaagacgagagcagtggcgtcgccgaatgaggtgtcgctcaccgagctggagccaagatgagtgtttgttggagcgatttgtgcagatgagtagatgactgcatgatcttcttctcaataactaaagaatcaactcatgggtcatggcctctgcactcgtttgtctataataaagaatagataaaaggaagtgtcatagtggttatgcagaatgtaactcagtttgatactggttgtaactctgcaaagattgttcccacctgtatattattatagttacaccgtccatgtcgattacagcaatcagaataattacacctgtatatggaatgccgcatgttagagattgtaccgaatacgtgtatatgacccgtccctcgagacgtgcaagataaacgaccgtttggaccctagatattagggccttcaaaaaacccgtatgtttcactctatgctaatgtgttatggcatatttaaaatctcttcactctacttttaaaatagagattttttatcgtccagcagaatgtaccgagtggtactggtatcggtcggtacggaaattcatccaaccattgaatctgggaagggtaggatcgggagagaaaataagctagggtgcgctcggtcgatgactatccttccacacgcgccacagtctttgttccccacgcgcgtgtgcaccgccgcctccttcatcgcgcctcacccgtggcctactccggcaccagctagtcctcctctactctgccgccaccggagcggcttctcggtcgccgcaaccacatactccgtcgccggctcatccgcctctgcctccactgtcgctgatggtgcggaggccgatcttgcaacactgaaggagaaacacgacagcggcagggcggaagaggaacacggtggcggcgtggaaaagggacatggtggcagctgatcggaagagaaaggcggcgacgcggaagaggaattctagggttcccgtccattcctcccattcattgcacgcgaaattacatttttttcccttccacctctgttctccacgaggtactgcaccaaggacagaattggtacctcgcggtaccaaactctaccagcttttggatcgggccagatccaacggccaggattttggtatcgaccgctgaaccgtaaagatgctctttaaagtaacaacattgtgaatgtgtgttccaagcagtaaggattcctaataagtgcataaaatttttcttatatttggccaggtcgtcacctcaagtagttaggtgagtatttttagcatagctctagcacatcgtcgacattatatataaggtctcactttatatttagcccaggccccagattcttaaagacaacactgtgtagcaattgtatggggtagttatgccttcactaaaagatcgagccacgtgagatagtgtcgtaggatcaagataggtttagtaatatgtcaagtgcactattgttaatgccatattacgagatggatggagtaatttatctatagatgagaatggccttccggcaattctcaattcctggtgcttgaaggttgcgtgtagagtagatttttttttcgggcagtgtagagtagatgttgtcaagttaggaattggctttagctcagattaggagtttggttttgtgatcttgttagtgaaaaacatcatgcaccccctctctctcttagtcctgttagggtggctcaagtgccctcgggggtggttgtgttcctgtcgtgtttctcttccttgtctttcctatgtttttttctcttattctccagggtttctgcgcttgcgtagtttgaagctttgtcttgtgtaaaatcgtttgacgtaatatattcagaaggacattttaccccccgtgacccgcctaaaaaaaacaatcttgcaactatatgcagagctccaaccaaccatcaacgagggcatttatttattattatcgacaaacaagtgcagaggccacacgtgttgattctttcgttattgaagaaaaaccctgcggtcatccgcacaaatcgctccaaattcgaaacgctcatcttggttccagctccgagagcgacaactcattcggcgacgccgccgccgctgctctcgtgttgccgtcgccggtgggctggaacgcgctccgggggtacgctcccgactcgtagagatccgtgtcggcggcgccgtccatctcctgaatggagaacgttggcctcgacggggcctggagggagaccgtgtcgctgctgagcatcacgttcaccgccgacatcgccggcctgtccgccgggttgtcctggacgcagagcagcccgatgttgatcagcttcagcagaacgttcactgcacggctgcctatcgccggatccagcagctcctcgatcgtccccgttgtccagtgctcccatacctacatgcgtaatcaggataaattcttcaggatgatgtctcgattaagaagatggttttcgtgattgatcaggtcatggtgatgatgatgaggagcagagattaatgatgctcacaagactcaagaggtcaatggattgctccgagttggagaagctgctgtttctccttcccgtgacaatctctatgatcagaacaccaaaactgaacgcgtccgacttgactgaatactgcccacgcatggcgtattccggtgccatgtatccactgaaaaataaggagatgatcgttaattatactttcatactaccgtgcgatggaattgcaggtccacttagtacttactatgttccagcgatgtgactggtgacgtcttgcgtctgatcccactcaaacagtttcgctaacccaaagtctgaaatctttgggttgtgatcgaagtccagcagcacgttgcttgctttgaggtctcgatgaactaccctcagttgagagtcttcgtggagatattgcaagcctcgagcgactccgcttacaatattgagcctcttcccccagtcaagatctttgcttttctcataatcttccattcaaacaaagaaatcagcattcgaatctatagtgtagttgtgcgtgcagatttttcatgtaatggaaaaaaaaatgttccattttcgcaaactgttagggcagtgagagaactgaactgtaccgaaaagaatggtgtcgaggctcttatttggcaggtactcgtacaccagtagtttctcgccttcttccaagcaaacaccaacaaggctcacaaggttcttgtgccgaagtttagcaactaaaactagctcagttttcagctcttctatcccctgtctggagctttgtgagagcctttttacagctatttctcgaccttcgggaagaactccctgtgcaagtggatgtatatgtagtattaataatggaattatggatatgtattcatcatgaaatctctattagtgaaaagcgaacctcagaatgcaactagtatgagccacattcatctgattaatattagccgtcagattcacaaagtgacaaaatagataaaataaatgatagccttagatgaaagagggtattttagaattttccgacgctccttcaatgtagcaaagagataggaatagtagacactagagagcaaagaaataaagaaaaagagaaaaaaaagttgaaccacatgctacagcaccgagcttgggcctatgcccagttaattgagttagctgactgactgacgggtgtaaaatttatatgagatttgttttttatggtccataaatgtatatgagatttatttcttatatggttttcttttgaaagataaaatagcactaattgatcccttgtgaaaaggggatattaaacatcccaacatctatctattatattgttaaaatagctttgaaaggaggcaccacgttcgctgtgggagctagaaattcccacattaatcagagaaaaagaaaaaaagaaaaggagagtccaagtagaagtacaatttaaaaatagctgaaattcggaattaaaaataagcaatattgaaaaaagtttccatataagaacccaatatgagattaatcaaaattcgaaataaaaataaaataaaatccaaaataagaaaaggaaaggaaagtccaagtaaaaatacaatttaaaaatagctaaaattcggaattaaaaataagcaatattgaaagaagccaatacgagattaatcaaaattcgaaataaaaataaaataaaataaaatccaaatttagaaaaggaaataagagtccaagtaggagtacaatttaaaaatagctgaaattcgaaattaaaaataaggaatattaaaaagaagagtccatataagaacccaatacgagattaattaaaattcggaataaatataaataaatccgaaattagcaaaagaaaataaaagaagagttcaagaagaaatataatttaaaattagctgaaattcggaattaaaaataagcaatattgaaagaagaatccatataaaaacccaatacgagattaattaaaatttagaataaaaaaataaaataatatccaaaactagaaaactaaaagagagttcaagtagaaatataattttcaaacaactgaaattgaaaataaaaaataaaaacatcgaaagaacacaatacggtattaactaaattttttttaaaaaattctgaaattagaaaaaaaaagattttaattaggaatgcaatttataaataactaaaatttgtgataaaaataaagattattgaaataaaagactatctaaaacacgtgacgagataaattaagtaacatgcctataaagaagtagagtggaggcggttgatacgacatataaaaattgttaataaaacaccaaatagaatcctaatgacgattaaaaggaggaacatcaggtaggccgtgaatcaaacgagtaaggcggttgtcgagacttctataaagtaaaaaaaaaacacattgatcatcatattcgatttttaaaatctcagtgacaataaaaaggagaagcagcgggcagggtgtataagagtatagttgcagagccgccgacggttgacaggacttctagaaaataaaaaaatgaattccaataatagttatgtttgatttttagaatcataatgacaataaagagtaggcagcatacgggctgtagaggggcatagtggcatcgtttgatgggacttctaaaaattataaaaaataaaattacaactccaatttttaaaggttcggaacttctaaaaagtaaaaaaaaccaatgataatcatgttcgattttaaaatctcaaatctcaatgacaataaagaagggaggcagcgggcgagccgtagaggagtacagtggcaaagccgctgatggtttagcaggacttctagaaagtaaaaatgaacccaaacgataattatgttcgatttttaaaatctcaatgacaataaagagaagagacagtggacgggccgtagaggagtataatggcaacgtttgacgggacatctagaaattataaaaatgaaacccaacgtgacaataaactctaaaaactataaaatccaatttttaaaggttccaagaagaatgaatagaaatagtggtatatcaagcaagaaaataaagaaggagaagacatgaggggtagtaactggtgtgacttttaaaaactatataattataaacatgaggatgataaggtttggtctttcaaagtcttaaaacaatgagatagctatttaataaattttaagtaaaatcatactaaaaaaatatatgattttgtttaggtgctagccgcgcaattgcgcgggccacccagctagttaataaaaaaaatcctagatctctgcatcaagtacgaataacaagaaacttatactttatcaatggaaagtaattggacaccactaaattttacgtacacatctctattcatggatgtcatttggaaaattgtacttctcatctacgcagtcagtctacaaaaatatggaatttccaaacgataggtgtgattttggaacaccaaataattccacctcaatgttaaagtggatagatgaagtacataggatcaattatatttgtggacagataaagtacatagtttataatcggacacgtgaaccggccacattacaaatcagaatatacatgttattgttataactacgtttcttgcaaagtatgttctacaaacacttattttagttggttactataaataatattaatatgcttcactaagggatattatggtcgcgtaaatgcatgacttaataagctagtaaaaagatgagcacacgtgcaggtacggttggatagtacaatttgattggtataccttgtaaacgataccgaaccctccttcgccaagcttatttctttcagcgaagttgtctgttgcagcccgtagcgttgataggtccagaaggagcgagtcgatgctctgaatgtcatctgggtttgttgagtctgttgcaagataacaggtgcacaacgactcatatatattgaaactaattagcccgctttgcgataaatttagttttttattcaaagatttgcaatgaatttaggccgagtttagttccaaattttttcttcaaactttcacttttccatcacatcaaaactttcctacacacataaactttcaacttttccgtcacatcgtttcaatttaaatcaaactttcaattttggcgtgaactaaatacacccttagttaaactgaatgccgtgggatgtttaattagtagataatgaacttcaagaaatgaaataattagtttgatctattaagatttccttaaaaaaaggttttacctagtagaggacattccaggctaaccggactaagtaataaaacctaagaattttaactgaaaaaaacacttcaattctcattggattcgaaaaaaaaaacgttctaggacgaaccttacttgtgatgctttaattagattatagataaaatatcctgaagaaggacaacttacatggcactggtgaggccttccttgcaggtgttctccttctccaaaaacaaaagcatgtcaggacaatgagtgctaatattgctccagcaataggcagagtaatggccaagacacgtcctgttctatgtcttgttcttcctgcagacaaatcatgcatgtgagtattaagtaatttctcacgttgattagaggaaatgtaaaaacaatctggatatcatctaggtggaaacgaattataatgacttggattaaaagagtagttacaacttgcttttatttttctgcaacatactactaaatttagaatacaagacaagtacaacttcatatttactcatccatatagcagcatataattttgtaagtacaaattttaaaattggaggtattaataaaattaagtcaaatgcatgtgaatacatgggttatagtattgactagtatctgaaatgagaacttcaacatggaaggagttatggtcatggactactgcaaagtgcaaataactattttgtcacaccattcaaatttccgtgttaaaatatttcaaagaaaatgtttaggtcttataatagggatcattgaatagtttgaaacaagttaccactgattgattttttaagggcatgtttggggaggttatgagagtcagagattcttctagaagctgctattactagaagctgcaccaaaccgtctagattttcactcagacggtaagaagttactttttctcttcttgaaagaaaaatatgagaattgtaagcgatatcactgaatctctacgcacccaaaactgatgccaaaagaaaatggaagcaaaactgcaaacccagaaagggacgctgaactcacctcccatggtccccggtggtgatggtggcgccatgttggccggcgacggcgccggcgccggcggcggccccggcaactgcagcagcggccggccggagaagaacgagtacgactcgaaccggaagttgcaccgcacgccgaagaccctgccgccgggcttcccggcgaaatactggggcacccacctgattatgcggccgaggcagctccggcagtcggcctccgacaagtccggcgtgcactgcgccagcgagaagatcctcgggtacgtcgcgtcgtcgaacccgacctcccccgtgccgaaccgcctgaccgggtccgccgccgcgtagccggccgtggcgttgacgagccggccggaggcggcgtcgaacgccgccgccctcgccgcgctgacgttgttgtagttccaggcgatgaaattcccctggccgtcggtggcgttggcgaggatgtcctggtcggagtagcggaggatacaggggtcgtcgaacatggtggcgcgcctgttgaacgcgcacagctgctgcgcgtcctggaaggcggtggcgacgcaggcggcgcaggaggaggcgttggtgtcgccgcggcagagcgcgatggcgtacaccacgtccggcgccgcgccggcggcgcccttggcgaagagggcgcgcgatgaggaggcgttcaccgggagagcgctggcgagggcgcgcacgttggcctggtaggtgctcccctccgtgtagtttccgccggcggtgtcgcacatctgccacggcagcggctgcgcttccgcgagcggcggcgcgtggaggaggaggaggaacgccacgagcagggggactgcggtggcgaggcggctgtcgcagggagtgagatttcgtcggcgtcgcatggccgtcgccaccgtcgtcgccatggtggtctagctcgaggagagagaggtttcggtggccgagggggaaaatacgccaccgtattgccactttgcaagtacgccataaatactcggaagaagaggaaaatatgtggtggaaacgataaatacagtggattaaaaaatggtgaatagctaaagtggtccttcaagtttcatacaatgatcagtttagttcttaatgtttcaatctgtccatattagtccttcaagtttttattttaattcaaacttatccttaaacccacataaccaataactctcatgataaatgacacttatacctcctcattcacatatataagagaaaaattgcatgcaataaattctttttatagataatgcatagcaatatatgtaaaaaaaaataaattatgtacttgcaagtgtatacggtagctattaagctcaagttttatatgcacatgttgaaataatgggacgtatttattcattttggttttttttccggtgtatagatgtatacaaattaagggcaaaagtgacattttctaaaagaattatcgactaaaaatagccatatggtatattaagtgggtacaaggatgattttaagccaaaacaagtacttagaggatctacgtggacaaaataaaacctgaaagactaaattgagctttcggtgaaacttgaaggactaaatggacgtttaagattcatccacgttattatgtgcagtaaaatttttactcattagtaaatctgtgagtaaaatatttagtcgggatgacgtggacgaatatcggacgcccatttttcgatccaacaatagtttctaagtttctactgtctacaaggtttccaccacgtattttcccccaaagaagagtggtggtgggccagggagttactgaccgaaattgtgcgttgaccagacacaattacgttactgcgaagggagacttaaaaggagggtaatttcgtcgattacatttcaatagggtctatttgagtctaccaaatattcattcttgtttaaatcatcctcggatgcaagtgtgactgagatgccggctggccaattctagtagtcagcaacgtcactaataaagtataggaaaattatagtcaaagttatgcaccccttgttcacatatgtaaacacgaggaaacataaatttgaaaacatattgaataaactcccaagctcactatccgattctctattgcctaggaccagaggcgaagccaaaattttctcaaccctaaagcttaattaaagtaatcatcataggttattttttcttttaattttcaaaatttggagtgttattttaatgagtatttagggttaggagtaaagctttatctctaactgccctactcctgttccgccctgtccatggcatttatcaagcgaagtacggtgcataggcatgggttcaaagtcaaactcaatcattttacagttttttcttttaataaattgatttatatataaactttatggtccatttatttctcttattcttgttatccctaatgatatggtttcactaactaaagatgacatattgtattatatagtcacgatagtttataatcctgtttcaaataagaaatgtccatcatggactctttcttataatattatttatttctcttatttttcgttggagtgagttgggaactaattccacggagtgacccaatagcatagaattaattaagtattagtattttttttaaaaaaatggattaatatgaaaatatgcgctagtgtgtaaattaaattactcctttcgtcctttctagaggatcatttggtactttggcacctattaaaaaccgaattttgctcctttctatatcagcttcaatggattttatcctatcaaaatattgtagcaatagacaatcgtttggcatgtgtggagatttgctcaaacgttgtaaacaagaacttgtgtcatcttccatccatggcgtttaaaggctgtggtactctgctagtctgctgcataagatggtcgggcaatctctagccaaaaaacaaaacaaaaaaagaagaagaagaaagaaaagaaaagacagagagcatgtcaaccatatctgatgaccattgacaaattattgcctttgatgtagcagctgaaaggacttcagagatgtcaaaatcaaggagataaaaacagagactaatcgctgattactagaaatatttgatgaccaggaactaatcgttggagtatatggctggcgggaccggcggctatgcaaaattcaagatcagaaaataagtaatactagatgccctaggtggacggtcgattttagttgagagctattttggcaatcattcgattcggagatgagtttttccaaggcaatttaaatgttttttctgtcctttttttttctttttcaaggattgtttccgttagagattaattagtatgattcacagaccacatgcgctggttgttttgacgacgttaacttttaatatatctttaaccattcattctattcaatctttcacaaatatgtaagagtgtaaatggtgcttaaaatacgtttaacaaaaaccaagttacaaaaaattaaataataattacatgatttttaataagatgaatggttaaacatatttttagaagtcaatggttttacatgttaaatatcaggatcagtacagtactataaatcgctaaaatacatagaatgattcttagagtggatttaagttgatttttcatattgtaggttgacatctaagctagctatgatgtgtactccgacaatatgctaccggcaacgacattttcttcgtcttcgatcaatcattgaattagggtttacggttagattaattcaaagcaagggagctcatcgctgactctagatatatttctgtcactgtttgattgctcgcatgattcgaaattcaatatttctgtcatcactgtttgattgctcgcatgattagagaaattaaatgaaccagcggtttcaagtcaaactctcaggtaggccaacctccgatcctctcgtgacagctttaccattgccagcacaatgcccgcggccgcggcggcgcaccacctcgccggcgtcgccgcagccttcctcctcgccgtcctcctccacgtccacctcgccgccggtgaagacgaacctccaccgtggtacctgtgcgacccctacagcgcgagcggccgctactcggagaacagcacgttccaggccaacgtcaaccgcctgtccgccaccctccccaggaacacctcctcgtctccggccatgtacgccacgggcgccgccggcgacgtcccggacaaggtgtacggctacgcgctctgccgcggcgacgtcgccgacgcccacgcctgcgagcgctgcgtcgcggccgccctccgcgacgcgccgcgggtgtgcccgctcgtcaaggacgcgctcgtcttccacgacctctgccagctccgctactccaaccgcaacttcctcctcgacgacgactactacgtcgccacgtactcgctccagcgctcctcccgcctcgtgagcgcgccggcgccggcggcggtggcggcgttcgacgcggccgtggccatgctcgccaacgccaccgcggagtacgccgcggcggcgaacacgtcgaggcggtacggcacggcggaggaggagggcgtcgacggcgacggcgacagcggccgccccaggatgtacgcgctggcgcagtgcacgccggacaaggcggcggacgtctgccgggcctgcctcacgacgctgaccaccgtgcagctgcccaagctctacagcggcgggaggacggaaggtggggtgttcggggtgtggtgcaacctccggtacgaggtgttccctttcttctccggccgcccgctgctgcatcttccggcgttcgtggaggcgccgccgccagcgacgtcggcggcggcgaccagaagaggaggtgagcgacagatggaaaccatttttacttgtttgcatgtgtgaaatcgccttagcgcatttgaataaattaatgcaaataattgaacaaaaaggttttgtgtgactccgttgactgcttgtagagttagagatgggagatgcattttcatcatttgggagcacattgcctgttttctgtacgtcaacaaaatagttactcctccactttagagtataagtcggtcttgattttgattaaagtcaaactatgttaagtttgatcaagtttctagaaaaaaaactagtaatattttataacccaagacaaatatattatcaaaatattcaatattaatttaatgaaactaatttggtgttctaaatattactatatttatctataaacttagttaaacgtaaagtgatttcagtcaaaacaacttataagttataatccgaaatggatggagtattattttttctaaaaaaaaagatatagtgccaattagcaatctggctctttgtgcgtttctgtcaagttttattgtcagaatctgtggaaaattccctgaaaaaatacacatgctacttgtaggcaaatggttttctttcattcaggttctggtcatagttctaactacagagatactatctgaatcgaacagtatttatttgcagagaaaaagaggaataagacaggtatagttctagccattgttatgcctacaattgctgcaatgctgctcatcgtcgtagcatacttttgttgttggaggaggagacgaccagaagaacagacgtttctgccctgtaagtcagctaaatttatgatatgttagcatgccaagtaattgataagtttatagacggcagggaaatggtgatttgtttaaatgttatttttatttaatttcatcaccttgattcttaatgtgtcccagcttgtagtgaaatcacatttcccttctttctctctcttttttttcttgaataagtgaaatcatatttcttgttaagcttagtctttcttttcatctttgtccaaacaacatcaattggttcagacgatattcaaagtattgattcgcttctactcgatctatcaacactacgagctgctacagatgattttgctgaaactaaaatgatcggcagaggagggttcggtatggtttacaaggtacaaatcatacagcgacatgcaactttatcagtcggttatatttttgttgatcagtaagtatgtttacatggatagggagtcctgcctgaaggtcaagaagtagctgtgaaaagactttgtcagagttccggacaaggaatagaagagcttaaaagtgagctagttttagttgctaagctttaccacaagaatcttgtaaggcttattggtgtttgcttggaacagcaagagaaaatacttgtctatgaatatatgtcaaataaaagccttgataccattcttttcggtacgattttctctccagtactccatgtgtttcttacactttaacttttttactaatcattttttagtttgataaaatttgtagataatataacgatatttttgacccaaaacaaacatattaacaaaatgtattcaatgctacaagtaatgaaactaatttggtgttgtcgatgttactaaattttatacacttgatcaaagctaaagaaatttgagtagagaaaaagttaaaacgacttgtaatataaaactataaaactaatgagtagtttcttttaaaaggcttaattgacaacatcaattattaatagtatgtttttttcttgtttgaatgacagatatagacaaaaacatagagctagattggggcaaaaggttcaagattataaatggaattgctcaaggcttgcaataccttcacgaagattctcgattgaagatagtgcaccgagacctcaaagcaagcaacattctattagactttgattacaaccctaagatttctgattttggcttggcgaagatatttgatggggatcaatcaaaagatatcactcatcgaattgccggaacatagtaagtagtaagtatgatatgttaggtttgaattttaacatgatcatggccaacatttatcaaatatggtataccaaatataataggttacaatgtaatgtttttttacagtggatacatggcgcctgaatacgccatgcatggtcattattcagtcaagttggacgtatttagtttcggcgttttggtactagagatcgtcactggaagaagaaatagtggctcatatgatagcgggcaagatcttgatctcttaaaccatgtgagtactttaagtctgttcatgaataattaatcaaacttctcaacatactacttgaataaatgaaccaatttggtgcaggtgtgggggcactggaccaggggaaatgttgtagagttgattgatccatccttgggcaaccatcctccgatcgagcagatgttgaagtgcatccacatcgggctgttgtgtgttcagaaaagacctgcaagcaggccgacgatttcgtcagtaaacatcatgcttagcagcaacactgttcgtctcccttctctatccaggccggctttctgcatccaggatgttagtgccagtgacagctctaatccgcattcaacagcggtgtcttcgaatgatatgtcaatcacagatcttgtgccgagatgaatcctgaattcttagttcagtcgccaaaccagttaagtgtacagtgcttctagatattggattgatgcatggggaggccctgacccctgaatcctgcattatggctgtaagcctgtaaatagaattgttaaaacggtaggaactatctatatattagtcggtagatttttttttctagaaaatcactcggattttataagcaacaggttggaaacgtattgctcagatcaaattaagcatgtcataggctgtcaaacactaaaaacaacataatgctaagaaaatgtcaaatctctagcaacatgccagcaccggagaaaacatcatacctaaattatttaacgtcaattataacaaaattacactgaaaaagaaaaaaaatacattctactacaactagtaatatgcccgtgctaatgcaactgtacatttttcataattaatgtaaatcaaaccatcaatacatgattatatattttgacaatataaatataaaatatttcaaaaaccgaatatccaaacaaagatatacctgtatttgtgcgcacaataaaggatttgtgtatatttggtttaataataattttatatactcataaacttattgaattgtatagacttttggattcaatcaccccatagacattattcgtaattcattcaacttaatttttaatttgtataaacttttagagtcaatcaccataactcattcaacttaattcaggcatagatttgtcaggagtatttatatatttggcattacacccaatgtattgaccttcatcgcaaaaactccagttcttcacttagagtatattcaattacaactttaaaacaacaacattgtggcagatatttttcagaatctaatgttgtgaacatttagtgtattatgtaaagggaatagtataaagggaagactttaatataattgagagctgtcaccacctctacacccacctcaaaccaattatgggatacgaagcaatcgctgaaaattaattatgtagacaacgcgtctacgtaattaacaactactctaatgccggccaaacactaaagcaatcactatattttactgaactatagtgaaaaatgatcccgcacgctaattagaaactaatcaagagttaattctcaacgagcaaatcttaagagtaaattacactagcggtccttaaacttgcatgtaacgaggtttcacttaagttcacgaacttgcaaaacgcatatcgagatccctaaacttggtttaatgtatcatcctggtccaaagcatcgtttgaccgtggtgttgcctacgtggcatgctacgtgaacgatgacatggaatttttttattttttctcccttcttctccctttttttctccactttgcctccttcctctcccttctgccccggcaaggctggcgagggggcgcggaggccgacggtggcagcgacgtcatcgataggaaggagaaggaggagaggaaggggaagggccccgctccggccggccgcaggcgcgtgcggcaaacggctgcggcagctgctcaagttcgacgagctcgcctcctcttttgcggagctcattgtcgggccttgccgccccattgttgccatcaagctcgctgccgccaatgagctcgcactctccccgctcgcgttgagctcaccgacgcctccccctacacgcgcggcggcggtcagcgacccctcccctaggcgcggccggcgatatctccccccgcgcgtgcctcggccgcttccgcatgaatgacacgccgccgcccaacgaagtgcgctgcccccctcttcgccccctccggtgccggttgcaaggccgcgccacccgctcctcaccatcgtcgtcatcttgggcggcagagggagaggaagtagagggagaagttgcatgtcgccgcagcaggaggagaggacccgcaggcggcggccgcctctccctctcctcccctttcggcctccgcccacgactcctctcctcccgccagccagcgcccgcactcgcgcgccgctcctctcctcgccggccgccgcccgcgcacgcgcactgctcttctcctcccaccggccggcgcccgagcatgcgtgccgcccctctcctcgccgtctgctgcccgcgaacacgcgccactcctctcctctagccggcgcctgagcacgcacgctgatcattgccggaaacctcgtccaccacgcgaggtaaggaaggagagaaaagatggggagaaaaaaaggaaaaaaagaaaatttagccatgtcatcgtccacgtggcatgccacataggtaagaccccggtcaaaccaggctttggaccgggatgatacattaaactaagtttaaggatctcgatgcatgttttgcaagtttgtgaacctaagtgaaacttcgttacaagtttaaggaccgctagtgtaatttactcaaatcttagttactcagaatgataattctactaaagcagagtaattaacaaagtataggaaatgagagaggattaccaacaactctggaattcctccgacttcttctactctactctctccctacttctagtatacaataaagtacaatagaacctcttataattcagctcatactttggtgtgtgtgagaatgagggaggagaagtgtatgtatatggtggaagtgccttgggaggatagagtttcttccaagcatccaatgagtatcttcatcctcctagtgccaagtttcccttctactgatggttagagtgacggaaacagtcacaaccgtcattgagagatcattatctgccgaactgaacttgggcctaggccaatggcctctgtcagggttcggccgagccctagccagcttcattggccccggttttcggcctagacattcattttaggaccctcaatccatattgccatggtagatgggaccatttgaaggtgtttaattggttttttgggtgcaagactccataagtttggatatgagtttgattctcctccttcttcacgtatattttctctcaactttggtagtttgtcacctatgtccaaatatacatcaacactcgtggaaattgttagaaatataccctatcactatgttggatgttttatgctttccattttatacatatattgacggcgtgaatttggtacttaacagccgtcgacagtgtggagggggagggatggatgggcggttgtgagacgcactaaacaacggtctatagtagttctcactaataaaatcgtttatacaccattaagtctactagtgtaaatggatatgatatatgagatgagataatacaaaatgtctacccttgagatcagctattgactcgttacgtggtgacttatgagcctggtctccattgttcttcgtaggtggcgtaccgtatggaaaatgctttggagagaaaaatcgggccctctcttcttactgtcacatatatacagataagtgctaagatagtttcccttctttcttttcctcactttaaatgtttttttcttctgaactatttatttgatttcaattcgatcacaggtaccgttatttttgttataattcaatttttacgacaagatatctcatgattatattcaataaaagaaaaaatatatatatttcaaaccattaaaacttaatgtttcatacgtgataacgacatgtttcatcatctgttttcactgtgtttcacaaaatttatttaactacttacacatactctttctccactccttgcatgcatgcatgcatatatgtatttagtgagctccaaaatgattttttccctaaactacttatccgatctacgatccaatcacaccattatatttgttgtaattaaatttttaaaataagatatcacatgattatgttttaatgaaagaaaaatatatgtttcaatctactaacacatgatgtttcatacacgacaacgatatgtttcaacgtgtgttttcaatctgtttcacacactttttaaatgtttcgatgatttattttgtttgttttaccatgtataacttaatgtttcaccggtggttaactgaaacatttgactgtctaattttttgagataagatcgggcgtccgattggaagtttataattagaagaaaaaattgtttgaagaaggaaactatggatcggtcatccgattcctaaaaaaatggggcagtcaaatgttgcagttgaccaacaagtaaaacattaatttatatggtgaaataaaaaaaatcaacaactgaaacatttaaaaattttgtaaaacatggtaaagatacacgttgaatcatatcagtactatgtatgaaacaacaagtgttaacagattgaaacatatatttttctttcgccaaaatatagtcatgcgatttcatgctttaaagatttaattacaacgaatacaatgaatacaatggtatgattggattgtagattgaataaataatttaggagaaataggtatttaaagagagaaaaaggaggaaaaaaaactaacttgtgatatacttgcatgcatgcagaaccggacacgtccgatttttattcatccaatcgggcccctatcctgagcattacgggcagctgactacgtcaaccctgctgaaaatatgaactgaccgacgacctatgggaggagaaaaactggtccatagcgaagaaccaatggttaatattgattgaaattaatccacgcactggatttttagatactcgaaggcaaaagaacacggaaagagatctaaacactcaagctaagctatataggctctggccgtgtttagttcccctcaaaattttttttatgtatatggacgcacatttaaagtattaaacatagaataataacaaaataaattacgtatttcacctgtaaactgcgagatgaatttattaagtctaattaatccatcattagcaaatatttactgtagcaccacattgttaaattggcgtaattaggctcaaaagtttcgtctcgcaatttatatacaaactgtgcatttggtttttttcgttcacatttaatgcttcatatatgtgtctaaatatttgatgtgacagaattttttgaagttcgaaggtaactaaatacggcctctgttcggaagctagatactgcggctcaacagtgtttctattgttgattcagttattacgatgtagtgctgccgaacacagccactccctctgccgtgaatataagggattttcaccattaaatttatcctaaaatataaaggagtttcacgatctaagacagtactatggacctgtttagagaagtttaagattctgagaagcagctggttggtagccaacttctgagaatctgcaaaagctgggtttctcagcttctggcttctagttccttctaatttattttatgtattctacaactacagcttctcagaatctggactaaaagctggactgtttgagggagcttcttattctgggagaagctgcggcacttgaaactccccaaacatggcctgtattccccatctggcatctaccaacttttatactagtttatttctctaccatctacttttatactaatttattctcccacctacacttttataatactgtattctttcacacatcaccttttatctcatcacatgtctttgtactatttccttattaattcttaaaagaaaaggtataatctcttgtagtcatggatggagattatggtcgtgtctagttcctcctccaaaatttttttaacgtatacggatgcacatttgaagtattaaacatagactaataacaaaacaaattacatattttgtctgtaaattgcgagatgaatttattaagcctaattaatctgtcattagcaaatgtttactgtagcaccacattatcaaatcatggcgtaattagcctcaaaagattcgtctcgtaatttacatacaaactgtacaattgattttttttcatctacatttaatgcttcatacaacacagcctatgtcacagtcttgagccaacctaaaattctagccagtcaactccttagcccgctgcactcttttagactaggagtagtatgagtattgtgcgtccatatccgctccgttttcgtcctataccatccggtcggcgagcgcaacctctcacctctgctcgaggctcggggagtaccaccatggccggtcatcgactacatcttactttttggtacaacctcgccgcagttgccctgctcctcgcgctcctccacgggccgctcgcggaagcgcagccgctgccgtggcagctgtgcaacgccaccgccggcaactacacggaggggagcgcctaccaggcgaacgtgcgtgcgctcgccagcgccctccccgcgaacgcgtcgtcttcccgggccctcttcgccgagggcgcagccggcacggcgccggacaaggtgtacgccatcgcgctctgccgcggcgacaccaacgcctcctcctgcgccgcctgcctcgccgccgccttcgacaccgcgcagcagctctgcgcgttcaacaggcgcgccaccctgttcaacgacccctgcatcctccgatactccgaccaggacatcctcgccaacgtcaccgataaccggggcatgttcgtcgcctggaactacaacaacgtcagcacggggaggatggcagtgttcgacgccacctccggtcagctcgtcaacacctccggcgactatgcgtcggccgtgtacgacgccttttccggcatgctcgtcaacgccaccgccgactatgcggcgaagactcagtaaggcggttcggcacgggggagatggggttcaacgtcttcgactcgccttaccacaatattttctcgctggctcagtgcacgccggacatgtcggaggccgactgccggagctgcctcggggacataatcaggaggatgatgcccaagtacttcgtcgggaagcccggcggcagggtcttcggcgttcggtgcaacttccggtttgaggcgtacgagttcttctccggccggccgctgttgcagttgtcggggctgccgccctcaccaccaccaccagggctgtccgcaccatcggggctgccgccctcaccgccggggctgcggccggcagcatcaggtaatattaataatagagaaggtgagttgctgctcgatcgctgtgtcttactgtggcttgcactcaccatcaaacgaacgtcaaaaatcgcacctccactccttgttcttcgcccggcgagccccggaaactacagggacgctaggtttgatgttggcctgtggggcagccattagagccgtgtgatcgcgaattgagaaaattatttgcgtggacctaaccaacctccatccccaagtggccttaattcgttctgtacacacattttttgtgctttgcttaatccccgtacacacctgaattttggttttgactagaaaatgtgctgtgcgtgcacaagttggcacgtctgtcatttagcccgcacaacatcgaagattaacaatatacagtttcaggttgtgtttggatacaaagactaaattgtactccacactaattagaagtattaaacgaagactaatcataaagacaattgcataaatgatagctattttgcaagacaaattttttaagcttaattaatccataattagtacatgtttactatagtactccctctatctacttttgatagtcatatttcatcttggcatacagatcaacgataagtaattctacttatcacccatttaaacatgctactagttattcctcgtaaacaagcgatacattaatatttacatttctcgatgcccatgtagccaatcttgtgtggaagaatggagagtcctgcattaaatccgagaaagttattaagaggataggttgttggattgaaatatgcctatcaaaaataaattttttatatttagaaatatgcctatcaaaaatagatggagggagtatcacataggctaatcatggattaattatgcttaataaatttgtctcgcaaactagtctagaattatggaatggattttgtcattagtaaaagtttaatacttctaattagcgtcaaacatcagatgtgacaggaactaaaatttagtccttgatccaatgagggcctcaattagatgaaagtttagaaaaaaaaatctaataaaactaaaatctagcaaatatctaaaacataatccatgtatgctaaaaataattcatgagaattgggttcccttttcccattgatcctctcttgcatgagcgtggtcgtttgaaaacacatgtttctttatagggttaattcgatctatgccattgcaaatatggctattaaaaaaatgctattacaattcgtctattcgtgagtgtgtcattcaaattttacgaaattaaaatcatgccatcaccgtcacatttttcatcttcctccccatctacacgtggggcccatccgtcagattcatcttcttcctccatccgcccctcttcttgtttttcctttttttttcttacctttgtccttccttattcggaactccttttatatacgagatatgattccgtataagacttggtatatgatgggacctaccgagtttagtcaactactattagctatgtggtatccatatccatgatagcttttaagaaaaatcgtctagtgtcgaaatttttaaaatatattaaatttattcttataattaagtagataatccgcaacaataatctaatccaaattaaataggacctaagatgttttatttggagggtaagtttaccctattcatacatagaaaaatagttttttaagggtcatatatagaaatattgtgtgagtttataatactataaattgtaataaaattcacaatattaaatttaagggatttgctaaattcaatcagctagatcgggaaaaaaacatcatgtaaaaaagtctaacacagtacgataaggtaactctccaagttaatatggacacattttttttaagctgtagattaggactgcattaattttcagaaaaaaaaaatctctgtttcataatgtaaggctttgtgtctaaatttattaacatcatctatatgaatgtggagcaatgctagaaagttttacattatcaaaccaaagtagaaacacgccaagcaaaacagaaacttggttacttcacccgcttaatggggagaaaaagaaaagaaaagaaaaaaaaaaggaaacggcctcaaggcctctcgtctccgtcgttagacagaggatgccgctctgcacttcttctcttcgttctccgccgttcgtcgacctccccggagttcatgaccgtcagatccggtgaccacaagttaaaaaggttgtaagatatggccccttggaactgaagaaatttacatatctttcacccataaaaactggcttcgctagaatgccaatgtcaaaatgtgattcaatcaaacgccactctcaatccgcgggcatttgctgcaatgccattttcgtggtttttttatttcgaaattaatttgcctcaattataatttttgtcggacgtttatgcccctgggtcaactggttaaatcggacctggtttcttctcgatctctctcgtctaatcgagcaggcaagcgtgagtgcaagaggagaagaggcggcgacaccggcgtggcccaccaccactattccaccacgccgcctctccccattcccccaccgtgcctcctctcccaccaactgtgccgcctctccccgccgagatctcctccccgccaaacgtgccgcctaccccggccaaaccctagctgtcaagccaagcaagaggagagaaagacgaagggaggggagaccacacctgcaccgctgccttcccccaacctcaggtgcacttgtgccgcctcccccgccatccgtgcgaccgccttccccaatcgcgctggtgcaacccacctcgttctctgccgccttccctgaccgtgccggctctaccaccacgagctcgatgacacgtgccttgatggcgccctcggagaaatcccaaagtggcgcaccctcctggcccgctgacgtgttcatctcccggtggccgggggcgaggacgacgtacactgccggcctcgcgatggcagcgctagggaagagaaaggcgggtagcacagccggcagcaagaggcaatgtggcacagccagaagaggcggttcggcggtgcggcctagttggggaaggcagcagcgcccggaatagtcacccctcctgctctgctggcgaggtcacgcgtcaccacctgagctctctcctctctggttcaacctattgagccaggggcataaacttttgagaaaaaaaaattgaggaaaaacaatttggaaatatcacaaatatttggaccgaaggggttagcaaatattatattgcatttggcggtattttcttttcccatcttaatatttttaattagcagacgaataagcactccctttaatttgtttactgctccccgaaaagaaaggtactcccttttgttcactgagaaatagctagcactgcaatcatgcatgaactcatacaggtcacccatgatattatcactttttttttccagtaaaattgcaggtagaaataagccagggacccaaattctggtaattattttgccactagtggccatttcctccgttgccgcaatttccatctgtatgtggaatatacgtaagaaacgaagatggcgaagagcagagaatttatccgcacgtatgtcatccgaacaatttggcataaactcttaacaaattccaattagaattcttcatcatcaatatttataacacattaacatttctatgcaaaattgccagctgatacggctgaggacttcgaaagtatcaagtcaaccttgctgtctctgtcatcactacaagtggcaacggataactttgacgaaaacaaaaaacttggtgaggggggatttggtgcagtttataaggtattgtagtctttaatgtctacataagagctacttatattagaaacttttttgaatggttgatactttattttgagaaataataagttcatgattttatggtgtgatgagtaagccttaggcttagaaatacgagtgacatgcatattagtgcgaaattgctaatttacaatatagtatcttaggctttaagaaattcagctaattactcggcaacccatgcattagcgattttagatgcatcttttacttttcgtcactaatatttttgtaaaattttattgaacaatacatgttaataaatataaacttatatttatgtacatactcatacaaaaataaactttctattatgtaattattggctctattttttgtcttaaacaactattaacttattgacttattaaaggactagaaaaagaagcctccacgttcgctctcatgttataaaattaatcggaaaaaaataaataaatagtccatatagaattataatttaaaaatatctaaaattcgaaattaaaaataaggaatataggaagagaagactatagtgcataccggtatacaatagaactaatgaaaattcagaattaaaaaataaaaaaattaaaagtagaggttagagtcgatatagaaatataatttagaaataatgaaaattagaaattaaaaaataaggaatattagaagaagaatatagagtccatatagaaatacaatttaaaaataactgaaattcaggattttttttaaaaaagaaatattgaaagataagtctagagtgcatatagaaatataatttataaataatataaattaggagttaaaatatgaaatattataagaagagtacagagtacatgtaggaatttataattaattatagtatagaaatatgagtttagagtcctaaataatacaattagaaataatgaaaattcaaaattggaaaaaaaggaatatttaaaaaagagcctagagtctatatataaataatttacaaataatggaaattcggaattaaaaataaaaaatattggaagaggagtctagagtacatataggagtataatttagaaataaatgaaattttgaatttaaaaataagaaatataatagaaatttagaattagaaaataaagaatattggaaggtgagtatagagtcaatataggaataccatttagaaataactaatgttcgatattaaaaataattaataactatcacgtatatacaatataatatgaatattacacattagatattttttaaaaagtaaatcatttcaattttttattagttacaaaaatagtaattaaaaagataaattaatcattttccacatagttgaagtatttcctctattttcccacaaagttgagtggcttttgctaaaatgccacatggctcaaaaacgtttagcatagactatcaactttgaggcaaaagagaggaggcactttaactatgtggcagatatgcaattttcccattaaaactaaatatgtgcctgaattctatatcttgatttccacattatatacgaacctttttttttgttgattcaacacaattcaagatttccttgttatattaagtatgagccctaatgttacttttttatgaataaatgaatttgaattcaaaattaatgaatacatagttgtccttgagttggagtcttttttatatattgtttgttgttgacttagatcccattcatttagaagtttcccgaaatcggtaagaggttcttctctccatcggggcaacaggtgttcaatagatcaaaaatcataaatgtgccactaatgattacaatgacctgagcagtaccccaaggtcctaagttcaaatcttcataagagcgaatttcagattgggttgtttgcggagctaagttccctatttcaatggccgtatatattcgattggatgtagaggcaggtaaaaaaaatacccttctctaaaataaataaatgtaccactaataattaacacgttgtgccacatatggattattcttttaatctaaaccaacatgagttgttcccactaattggatggctagatctttttttttcattattgagttgtacgaatttggaaagttcccactaattgtacgaatttaatttttagttgtaccatgtcacgcccagaaattcccgaatagaattccaagcagaatgtgcattaaaatccccgtccaggaccagccggggtacacaaacgacaatgttgacattcagatccacgtcttacaaacatcataaaagtcttacataaatgcagcggaagaaaaaaaaagacaacaagagctaagccttgactaaactgcagcaggaacaccactccacaggcatcctcgacggcacggacaaagcctactcctcggagaaaccttcatctgacccgaactcgaactctgggggttgggaaaagtagagcaagactgagtactacccactgtactcagcaagtcataccggaataggggtatgatgcacggaaaatatcaaagaagagctaaagtggttcatttgcataaagcgagcatttataaacagaaattgaaagatttaaacagttgtaattattaattaaacatccactgtccaacgctaacccacgttgcgacaggcccaaccatccacctaaattatccaaattcaaaaggttacactaaggtgagactaatcacggtgaatctggttgaccgcccgtaaccgcgggcacggctattcgaatagttttgctctgatcagaggtgtacaattgtacccacaagacacagccccacgacacgttttcgtgcgccgacatgccaccacgacatatcggaaagaggccgtgacaggacccttcgcataacccctctctagccaagcacaccacacctcaggtttcacccccgtccccagcgggccacgggcagtcccctctcgtgcctaggtgaatccggaagcgacagaggccgtcgcagggcccgccccgctccatcacgcccacccttgcctggatgcgtcgactagaggaaagctacactacaagcccagccgttgcccacgctggcttgtggtaagtacgataagttcttccagggcatcccgcgaaccggtccttaactgccatgggtgcgaccagcaaaaccatgcacccacagcccaccatgtagtttattttaattaacccacgccaaagcggtggcactaatccaacagaaccattggaaccaacagtctaaacattattatgcttttccccattgtgaactagttgaactaagcatgtctaagcaattcctagtccaaactctaatcatgttataccccaagctaacaagggagcatggtattcaaaaaaaaaaaacatggccgtaacgataggtaaccatcccatatttaatattataaaacaatgcaatatttgaaagaaaacaatagaacatttgcaatataggatcaacatgttcaagtgacaagcatgacttgccttgctctgctgctggaggaacctcggcgactatctcgaagtacaccggagcgtcggaggaattggaatctagcgacatacaaagtaaacattgcaaacaagctataagactactgaaacagggaacaaaaccaattttaatggattctacacatttttcttgatttactgagacttgaatgggcttaaacggagctcggatgaattagttatgaattttagaagattcactgtgtttattactatacaagaaaaaccttaaatcaattattgcgcaatatattccagggctgacgtcagcacaggggaagcggcgccgacatgcggggcccaccggtcagcggctcgggagagggaggaagggcgccggcacgcgggcccactggtcagcggctcgggagagggggggaaaggcgccggcacgcgggcccaccggtcagcggctcgagaggaaaggggcggcggcacccggctcggcttggctcaaggccggccgaccggccgcggcgacggcgacggcgcgcgcgcgaacgcgttgccggcgacggcaaccggcggcgaaggcgacggcgcaaacggcgacgcgaaggcggctgcgctaagcggcggctaggaaggggagggaacgggcgacgataaaggcggccgccggctcggctcggcatcaaagccgacctgccggccaggcctagcggcgacggcacgcggccgacgacggcggcgtccggcggcacgggaggcggcggcggcggccgaaggcgacggcgcgcaacttgaagcggcggcgcggcactaggaggagaggaaggggaaaaaaaaaggggagggattcctcaccgagggtggccggcgcggaggaagacgatggcgaacaacgacggcaagccacgggaggacgacgtcggcgggcggacgagcttcggg

SEQ ID NO: 6340 - DNA, 18611 bp, Oryza sativa
ttccttactcgggaaggcatgtttcgggtttcctttggattctatccctagttggacgtggaggagggcctgtagagggcaagaccaacccctatataagggacatggccggttcattctacaaacaatcaatcgaatcgtttttcatattgcttttagttttttgcttagtttgtccatctttgtcgatttgcgctgtaaatcgtccgccgccgctgcgaaagtgcgacacctctttttaagtttgtcctgaaaaccttccgtttttcccacgagatgggtagttatctatcgttctatttagaattggctctgcaagccggtttagttatcaaaacccatcttgatttagctttgactagattgaggtggttggcgactctactatcaccgcaaagctttaggtgctgtgatcatgtttgtcaacttgtcacaaaaagttgccaacacgattttttgtgactccactggggaaatctgctcaacgtcatctcagctttgacgtcgccataacaaagcctccatcaactaaggcggaggtggaaccatccaatgtcataccaatcacattgaaggagcttgatgagggagcactcaaggccatggaggaacatctcaaggcgtatacccaggaaatgttgatgaagacgtgcactaggacccgtcaaggtgtggttctcaagccgggatggttgcctaaacctaatttcgatgtggtaagtactgaagaggtatcaacttctatccaacaacaaatagcgagtacaatagattcatccattgctactttaaatactaaattagatgcatctattgaatctcgttttgatgattatataaggaacaaactcggttctgtcatagccgattttgtattcaaagataaagcctctaccagtactagcaagcctcctgtagatcaaatatatagtaaaaccgatggagcgaatatgcaaacaacctgcgaagggtgggctacgcacacagccgattcaaccgggccaacggctggtcagaccgggttttatcctggcggtcagaccagtctgaccgcgcctctggacgccggtcagactgggtcctagaccggtcagaccggcgcaattattcctatacagggggtagatccaatgacaaacaatgggtttttataccatattccagcacctaatccccccgtatctactgttagtccccaaattcccccacatatccctaatgcttacaacgatcctactaggggatgtcctcccgatactagatatagctaatataattatattgcgccgcaaacacaacctattagaccaccaaacccaccaccaaaccagcataggcttgagaatatagaggaattaattagtggtatcattagggataaattcgggattgaagctgggaatcctgctaaggtttaccaaaagcctcctcctgattactatgacaatatcctatatcctcatgggtatagagttcccaaatttaccaaatttagtggtgaggatagtaggaccacgtgggagcatgtaggtcaattcttagcgcaatgtggagaggctagtagttccgatactttttaattgcgcttgttttctttttctttgtccggtactgcttttacatggtttagttctttaccggtaaattctattcatacttggcctcaattagagcaaagattttatgattatttctataagggtgaaactgaacttaggctaagtgatttgacatcggttaggcaaaaatacaatgaatctgtcattgattatggtaagggatttagggatgttagaaaccgatgttatagcttgaatataactgatagagatttggctgatcttgcttttaatggtttaattgctcctattaaggaaagattagttggccaacaatttcttgatgttagtcaactcatggaaaaagctccggctcaggaaagccgaattaaagatagtaagaaatttgttagatcatatgttaatttgattgattaccctgaagctagtgattctaataatgagggtgatcatgatatgtatgttgccgagtggtcatgaactaataaaaataagccttttgtttgttctaatttaatgccgactccttgtaaagatcgacaaagtgagattaagtatagctttgatgtggccaaatgtgataagatttttgattatcttttacaagaaaaacaaattgattctcgttctcattctacaatgattgctatgtgtttcgacgataggttcaatcggccatagatgaagaacgattgaaattttccgatggttccaagatgaagcttgatcatgatgcttttccggcgaatacaattaatttcaatgataagaaggtgttgatttggccgaagcaagccgaatctactaaggggaaaggaatggtcagtgaagagcctaggccaaagatgattgtgccaaagaatccagaagttggtgtttggaaggagaataggagtgaggcttcaagttccaaagctcctaagaagactaagatgaccttcattatgcttttgaacaagtatgagaagcaaggtggtgagaaaactcgcaataaaggaaagagaccaagatcatctcctagggagcgatttggtcattcaccaagacgttcggaatcacctacatatcatcgttctcaagacatgtcatgggggccttatccaatgccgccgccgggttatccttttccttactacgtgccatggggggcaataccgccaatgttcaatcatatgcctccaatgtaatacaaccaaggatggggaggaccaaggaggccagctcgtgagcgtttatcttcaccaaataatggttagttttatgctaaaaatcaggtcaatgaaggaaagagggaaggaaagcgcatcaaggtggagacaaggacttcagaagtgattactatcaaagtggggtctcatgatgtgctaataccttctggacatgaggttggagagtcttcaagcaacaaattcgaagccagaaccaactcatcgcagtcagccggtctgaccaacctcttaggccggtctgactgggccttcaggccggtctgaccgcctgtcgcaggccggtctgaccgggccttctggccggtctgaccgggcttcagcgccggtttgatgggagaatttcaaagggtagttcgggggtttcatcgtcttcgagtaaaatcaaaagtgggcattatttaccttctggaacagagccgaaactaaggtggatgcctaaggatttgacagctgctcaaaagaggaggttgcaacgtcttcaggcccaagaattaagagagagagagagaggccgaagagcaaagagatagaaggttcaatgagttgcgaccaccgcctacaaagatgtggaggcgtaagtccatagatattgaagaattggttgttgtgcaaaaggaggaggaagaacaatcggttgatgaatcatatccaaaggaagacatggatgtcaacatgatgtgtatgttgcctatggatttttgtgctatggatgaagccgaagttgctcaattttcactaggtcctaaagatgcggtttttgagaagcccgatgagtcaaactgtcatatgaagcctatttatctcaaaggtcatattgatgggaagccggtctctaggatgttggtggatggaggtgccgccgtgaatttgatgccgtactcgttgttcaagaagttggggcgtggagatgatgagctaaagaagaccaacggaggcgaaaaggtatcttttcggtggagcttatcgtgggaaacaagacgtccaaccgctttcttcatcgtctatgtgcaaggtaactacaatgttattttgggtcgttgttggatccatgccaattattgtgcgccttctaccttggatcaatgtttaattcaatgggacgacgatgatgttgagattgttcaagcggatacatcggccgaggttgcaatggccgatgcaacatttgagtggcgtcacggtaatattcaatgcttatcggggatggatctttctagctatgatttcattagtgtttctgatggcaaatttgtacctatttctgtaaagccggctaacatagcacgacaaggccatatcactttatgtaatgagtaaagaagctaatttagagtggttgcaaaaaagggtgcaagaatatcgatctacaaagaacgatattggtgaaactattgaagattttgacgaagtagaaaaggttggtcaagggtttacatcggccgatccattggaggaaatagacataggtgatggaactaagccaaggccgacttttgtaaacaaaaacatgacagccgattataaggttaaaataatcgagctacttaaggagtatgttgattgcttcgaatgagagtatcatgagatgccaggtcttagccgtggtcttgtcgaacatcagcttccaattaaaccgggttttaggccttataaacaagcaccttatcgtttcaatcctttgttatatgaccgggtcaaggaggagatttatcggttattgaaagcggggtttattaggccatgtcgttatgcggagtgggtatctagtatagtcccggtggagaagaaagggagtggtaagattagagtttgcatagactttagagatttaaataaagctactccaaaagatgaatatcctatgcctatagctgacataatgattaatgatacctcgggtcatcaggtgattagctttttggatggtaatgccggctacaatcaaatctttatggcgtaggaggatatgtacaagacggcttttaggtgcccgggatttgttggtttatttcagtgggtggttatgacttttggattaaagaacgcctgtgcaacatatcaaagggtaatgaatttgattttccatgattttctaggtatcatcttagaagtctatattgatgatattgttgtcaaatcggatggtatggagggacatatagccgatttgaagttagcttttgaaaggatgcgccggtatggtttgaacgtgaacctactcatgtgtgcttttggtatgtcggcagggaggatcttaaggtttatggtgcatgagagaggagttgagattgatcctaagaagatagaaaagattcgtgatttcaaagcgccgacatgcaagaaagaggtgcaaaagttactaggtaaggtgaattatttgaggagatttatatctaacctagctggtaaaatcgatgcttttgtccctatacttcgcttgaaaaaagaagccaattttacttgggggcaaaacaacaagaggcgtttgaggaattgaaaaggtatttgtctactccacccgtggtgcgggcgcctaaagccggaataccgtttcggttatatattgcctccgaagacaaagtcattggtgctgttttgacacaagaggaagatggtaaggaatatatcattacatatccgtcttttgggactcggattcggtgacatcgctatggcatggcacagtgtgacattggagcaatctggagcgttgaaatctgatcgaacggtccgctgcgccggcccacctgcagccttcattttcacccccaagcgctccgtttcctgccgcccaatgcccaatcccggggctcgcccaaatcccacacgcgcgctccagtcctgacgtcccgcacgcgcccggtcctgcggaggtcccaatcccgcaccggagcagggctgccggcagagttccaatcccgcgaaggtcccaatcccgcttggagcagggttgccggcgccggggaagtgcagcacgccaaccagccgaggccggggccagagcgcctgccccgccgtcgccaccggataggtgggaggcaggcgtgcccctcgccgtgattggggaggtaggccggccgccgtgaggccgggggccgaggcccctgccctgccgcaagatttcggggaggagggctgccagagtgagccaagcatctgcagaggaggattgctagtgagtgttgtcacatgtgacacaacttttggcacgaacaaggaatataggccattcggtgtctttcttgggctcaatcagttgagagaaaacactatttttggtgctgcacttctatttgatgaaacagaagcatcatttacatggttgtatgagacttttctacctgcacataatggaaagcaacctaaaacaatttacacggatcaagatgcagcaataggaaaagccataaagatagtattcacagaatcatatcatggtctctgcacctttcacataatgcagaatgctgtgaagcatttatctccagtgaagggtaaagaggaagatgaaggtgaagaggaagacgaaggtgaagaggaatcgcatgttctctctgattttagtgcttgtatgtttggccatgaagatgaggcatcatttgaagaggcatttcagattatgagatccaaagttcataagcaaacatggttagatagcatttacaaggtgaaagagaaatgggctgaatgttatatgagagatgtcttaatgctatctgtgatgtctgaatgctccaagtttctatatggctgtttatcaacttctatatggctgtttatctctttctgtgttgtctcaatccatccaccaattatggggacatgctgtcaaatttttcagaaaataacatcacacaagttactgatttattcatccattgattcattcaaattacagcataggtcatacaaccaaaccaatctctcaattttcccaggtgttgctgctcacaaaaaaattacagaatcattctcccagcagcaatgacaacttccttatcaaccacaatggttaacacagtgcaacctcaacaaattattgtttcaggacaatgcacagcctaaggtaatcaggttcaggtacaccatgaagcagaaggacaaacagctaaactactgctgctgcaatcttggagatagagaacaaacacctaaacaacaattttggaaaacaaatagctaaacagcatgaaatcccatcgcctccatcggcaccccgacggccggctgcctccatcgccaaggatgacggtggcagggcagggccccggccctggcctcgcacggttgccgcctggtcccctccccacttgcggcggagcggcgccttgccggctcccatctagttcgcggcggcggccaaacgcgggcgagggaggcgaagcgacgacacggtcacccggtcccctccccactcgcggcggcacgacagcctggcgtctctccggcctggcgcggtggcgggctgacgtgggcacgggagacgaagtgacaaggcggctgccttgctctccgctggtcgccgtctgggacctctacgccggcagccctgctcccagctcgcgcggcggtggccgcctccctattcgcggcgacggcccggcgtccggtgcgggcgcgtgcgggcggcagggagtggagcgtgtggattgaggcgagccgcgggattggggcgtcgggcggcaggaacggagatcttgggttgaaaacggaggctgcaggtgggctggcgcagcggaccgttcgatcagatttcaacgctccagatttctccaatgtcacaccgtgccatgccatagcgatgttactgaatccgagtcccgtcttttggatgctgaaatgtggtatgtctttatagagagactttgtttatgtctatactatgcttgtaccaaattgcggcactatttgttatctagtatatgcatagttgcttgtcaagccgatgttattagacatatgttgcaaaggccaattctaagtgggtgaattggcaagtgggcatatgttttgattgaatatgatttggcttatgaaccgttgaaatctatgaaaggccaaattgtagtacattttatagtagaccatcatgtcgatattgcttatgatgaagagatttgcttagttgaagttataccttggaagatttattttgatggttcttcttgcaaatagggtcaagttataggtgtagttttattttcacctaatggcatgtgttatgaggcatcggttcgtttgaaatattattatacaaataatcaagctgagtatgatgctttattattcggcttacaagtgatggagatgattggagccaaacacatagaagcatttggtgattcggaattggtggtgcaacaagttgccggggcttacaaatgcttgtacggatcattaaataggtatcttgatcaatgcttggatattattgccaatttatataattttgctattagacatgttgctaggcgtgataattctagagcaaatgatttagtgatgaactctgagctccactcgagacactcaaggctgttgttggcccgatctttcggtgagttgtagataactacgatttgagagaaacgttgacgacctgactacaaccgtacacaacgttgttgtgttgtgccttagcgatcgatacacctctccgtgggttgttgatcttgccggtgcagatcaaccttattcctgcaaggaaatcgaataaacaagcaagaacaagataaaagcaatctgaattgcagataggaattgaatacaaatgataagttgggattccgtaacaggcaaaccagcgatctaaccgatcacgggattacacggcaaagtatcaaagctaaactttaatctaaacaaaacccaagaaatcttgaaggggtacctagctatttatggaggtgggaggatgaccaaggggaccctagggtcgtgctccaactgattggggcgcaccccacatgggccccacttaggccgggtcccaaacgaagttacaagcaatttggcccattataggtgacgtagcaccttatttctgcaatagcagcccactgagaaggaatttggcaatgaggttggatccgttggaaagatgactacgtgagctttccatcaagtactcatggacccaaaacggagctcgtatgcacatttggcggccatttgaattcaatacagtagcaggtggctgaattggattccaataattggaggacttgatcttgttatcatcttgttcatccatgatgtgagcaatggttgtatcaatggtagccatggtcacatcatcctccccttctccttcaaatcatcgagctcacaaaaatcatcaaactgaacatagcccgaattatttaaagaagatgtcaattctcgttcctctatttcattagcaatgtgaacgacatgcttaaaatcggcacacaaagaaacactagaaacaacatgtaagtgaagcattatcacacgactcttctttatcacaaggaacaacaagtaaatcaacttgtgacaaaggcatctcagcaattggttccactaatggctgctctactatagcatgaaaaatagacatgtgtagcttagcttgagaatactcacatttatttatctcagtaccatttaatttaccttgcaaactttcttcagacaccacaggtgcttcatcctctttcttctcaagtacaccattctccctcttttgttgaatgtgatgaattacctgcaaaatgttagtaacaggagagacaaaagattgctcctccaatgtttgcacatcatcattgcatcaggatataggagattcagaaataggagataaatcacattgttcatactttctcgcatttgatatgatctgactctcaatgctacgagcaaacatgaataggtgtccaatatgattatatttcacattagcaagcataacctgaacttcagaactaagccctttgaaaaatctacgcattgtgttttcattgcattcttttagaccactgtagataatgcaaactttgaattcatgaatgtactctcaccttgtgtttcagatgttctaatttctcatgaagaagacatttgtaataagaacttacaaaatgttttcttatcaaggttttgcattcatcccaagtttcaggtttgttactcacataactccaccaaaagagagcaggagaggtaaacttattactagcagccttaatcatttgagcatcagaaaaatcatatttatcaaattcattgtctactgctagctcccaatcaatataagcaacataatcgtatttaccattgtagaatggtaacttagattcaactcatgcaaaattatagtcaggtacctcatatgcatcttgtcgagaagttggcatctctcgtcgatggtgaagaagccgatgttgagcatgaccatctcgtatccccttgcgcaatcctggcatggttaatagcaaacaagaaacatacacaagaatatgcacgctcctatcaactactaggtagtggaagctccgatatcacacacactcaagctttttaccaagttcttaccaaagcaagcggaatggtgacgtacaccaactcggccaagcatcccaatggagtttggatgtatcgataccttggcaaacacttgctatacggctgcaatcaaatatgtggagctctgggtaggcttaaaatgtagcaaaggaatagcaaatgctcaaatcagataatacaaaattgaataatcattcaaagtcagtaccgtactggtcctaggctagaacgtactagagacgcgatcctagacacagacgataccacaagatagctccagaaacaactcaagcacactctgatatactaaagcaaactcaaatataagagctcatttttctcttttccatctttcttctttcttttttttcttttatttttcttttcttttatggtgcggcttttcatttctttttttatgcaccttcctgccttttttttctttctttttttgattttttttaccaaaaacagactcaaggacctcaatgtgatgttacagggactcaaacgtaaatataaaaatttacaaggactcaaatgcaaaagtccgaacccaaaattaaaattatacaaaaatggaatgctgaatttatactggttccatttttttcaaacggatctccaatccgacaatcgaaaacttgtcaccaagctctctagcaactcacggtgtagattgaaatcgagaggagagtggggagtcactcggcttgtagaggtggtgtgaagccgcacgcgagggggtgggaatcggctataaatttggaaatcacgcatggaaggaaacaaagtccagaaaccgatctgctatcctttctttctccttaaccgcacgcaacagcgatatgctatccttcctttctccttaaccgcgcgcaacagatcctcttccttgtgtgaacagaacaagcacaggcgaatgcagacggcaaaccccagatgcaactcagcaactctaagaccgactgataaaaacttctgaaaactagaaaaatagaaccctgcagcatggcggttccattttcgtaggtcccaacgataacaagtacacgacgacgacgacgacagtggtacaaaacgtgaccagaacctgaaactctaaacgaactaaacgctaagaccagcaacatgactcgacaatgcaacgcaaaactcaacaaagcaaaaactgaatgaacaatgcaatggcacaaatatggctaggtataggatgcaatttttttgtatggctattttctggtagtagtgttaacgaccaaatttgagaacactgagcaaaaaaaagctctgataccacctgatgaaccctgagctccactcgagagactcaaggctgttgttggcccgatctttcggtgagttgtagataactacgatttgagagaaacgttgacgacccaactacaaccgtactagacgttgttgtgttgcgccttagcgatcgatacacctatctgtgggttgttgatcttgccagtgcagatcaaccttattcctacaagcaaatcaaagaaacaagcaagaataagataaaagcaatctgaattgcatataggaattgaatacaaatgataagttgggattccgtaacgggcaaactggcgatctaaccgatcacgggattacacggcaaagtagcgaagctaaactttaatctaaacaaaacctaagaaacccagaatgggtacctagctatttatggaggtaggaggacaaccaaggggaccctagggtcatgctccacctggttggggcacaccccacatgggccccacttggcccattataggtgacgcaacaccttgtttctgcaattgcagcccactaagaaggaatttggcaatgagggtagatccgttggaaagacgactccgtgagctttctatcaagtactcatggacccaaaacggagctcgtatgcacatttggcggccatttgaattcagcacagtagcaggtggccgaattggattccaataattggaggacttgatcttgttatcatcttgtttatccatgatgtgagcaatggttttatcaatgatagccatggtcacatcatttagcatggcaagcatatggttataatgtgaagaagggagtattttttatattagaagaaccggtgcttgatttcaaacctttgggtgaaattggcaaaaatgcagaccggggcggcgggggggggttgtttccccatataaaaaaaaaacccctctttttggcgccggttttttgggccaaccgggggtttgggtttcttggacccgcggtgactaggggtggtctgacggaccgtatcccgccggtctgaccggccaacccgggcggtctgaccgccggtatgccgccggtctgaccgattctagacagaaggttggggggcacgtcccgattgattcaaaggccgaactaattgtaatttcggacatttgtgcccaggatacagaagaggattggagaattcctttgattaaatatttgaaagaccctacacttaaggttgatcgaaagatttggcggcaaatgtttaaatatacattgcttgatgaggatttatatcgccgaaatatagatggggtgcagttgaagtgcttagataatgatcaatctaaagtggctatgggagaggtgcatgaaggaatttatggaactcatcaatcggcccataagatgaattggttgcttagaagagcggggttctattggccgaggatgattgaagattgtttcaaatattataggggatgtgaggcttgtcaacggttcggcaatgttcaattggtgcctgccgccgtgtgaatcctactatcaaaccatggccgttccgaggttgggctatggatttcattggtcaaatttatccttcgtcatcaaaggggcataggttcgttgtagttgcaacggattacttcaccaagtgggcccaagccgtgccgctcaagaatatgattcatacggaggtaattgtctttattttgaagcttattatccatagattcggtatcccgcaaacattgactacgaatcaaggagcttcttttatgtctaaggaagtgaagagttttgccgaattttatggtataacattgttgagttcttctccttactacgctcaggctaatggacaagccgagtcgagtaacaagacgttgtcgaagatagtcaaaaagaagattgaggaacacccaaagaagtggcatgaagtgctttctgaagcattgtgggcgcataggatatctaaacatggtgccactaaagtcactccttttgaattggtttatagtcaagaagctgttttgccggttaaggtaaatcttggctctcttcggtatatcaagcaagatgatttatcaagtgaagattacaagaatttgatgggagacaatcttgatgaagtcatcgacaagcgtttgaaggctttggaagagatagagaaagagaagaagaggatggccaaggcatacaacaaaagggtgaaagcaaagttgtttcaagttggagaattggtttggaagacaattttgcctttgggtactcgatccagggagtttggtaagtggtctcctagttgggagggtccttttcgagtatgcgacattgttcgagggaacacatatttttagagacacttcaagcagagcgttttcagcgagcaatcaacagaaaatacttgaagaaatacttcccgagtgtttggcaagacacttaggaggttctatggccagtaattggattatcaccctaagaccaaaacatgttctatggttttagattcacgccattcaccaaaacatgttctatggttttagattcacacccaaattcggcacccagggataaaatatggaaaattgccaaagtttggatgtctgacggttttcctctagttggaccggtctgactgcggtgtataggccggtctgaccgccgaaagtgggccggtcagaccggcggtgtgtggccagtctgacctgtagagtccgagtccgggactgtttcatcgggtctcaaggtttgtgggcccccggctttacacaccagaaaccccatgtgtcttacaataccatttcctagatcagtagatggtacacatatggcacagttgtatatcacaagctgacatcgttatatagtttgaactatacattaatagtacaagggtagcccaaatgggatccaaatagaccgagcatggtcatgtactttgcaaaataccaaaagaagtagatgagatagcggaagcgaagcagcggcggtccaacgtactccacaagcatcgactggtgaacctaggtcccgactccaccggcttcgatatctcttcatcaacattgttcccgtatggtcgactccaactcctttctaaaagatttagttaagcaagggtgagtaccacccgtactcagcaagccaccactacagaatgcatttagtgcacacagaggttcaaggatggcttggtttatttgcataaagcaagatttcataaatcatttcacaaacctatgactgagcagttttaactgaaaacaacgataagttgaagttatcattaatccgcaagggttcatccaccttccccaagcctcgtttggtccggtttaccctcgcatctagttttccatattcccaacatcatcatcatgaccttcctgcccatcgggcaagatcacaccacttaatctaagcaagattaaaatctatgagactagtcaagtgtagtacaagtcccggcgctcaataaccgcgagcacggctattcgaatatatttgatttactcacactgcagtggatgtacgcttttaatcccacactccgcgacttgcccaacacatgagcctagtcccaacacatgagactttccacgatccggtatttcagtcaccctcgcgtttcggcacccgctccaaggactatgtacctccattgcacccttggcacaacacaccacctcaagccggcggtgaggagagtcctggcgcccctgggatcacaatgggttatattacatataggttaggtccattttagatttctgatgtcataaaccaatccacatcccttcaccttatctcacatcacacttcagaaccaccatgacaggggtgccgtgctatagctgccttcatagctaagtcttcaccagttattatgtttgtgggctctacaccttccatagcctctagaaatgcttgaaacaaccatacaaaggtttctgcttttcattccttagaaatccacaacccagctaaatatccaaaaaaaaaatacacataaggaagtcatcatagtttggaagtaagttactacaatttgcatagtctgtacagtttgtttttgctggaagtaaatcagtacaattttgaactatagaacagacactaaagatgtaacttgtaaacttagttacttttttttcttttttttagaaaaaaatgtaacttcacatgctactggaagtaacttttatcaggacttgatgtaactcaatgaatccaacaactaacttaaggtgtactataatgtacaaagttattacagattttttagatttactttttttgcaaaacaaggagtacctgaattgattgcccatgtctgtttatcccaatgaatggtgcacaaggcatgttatacatgttcgtcatgtatgtgcagtcaaacgagatgcaatctttgtagtctttgtaggcatttcttgctgctccatcaacccaaaatatgttctgcaccctgtcttccttattaagttgaatcttgtagaagaaatttgggtcatcctttttgatttcctcgaagtgagcaattgtttgaggcatatctctacacctatacttgctccccatctttgacttgaaattgcttatgtcttttctagtgtagggtacattcctagcccctccatacaattctgacatcaattgcataattctaccagttgagagattaactccgtgcaacattgtgatgaaatctttttcctttttcggtattgctctatgtgaccttagaaatttcttaagtgaaaactttctaaccagaggatgtgtgtgttcttcaacaaactgaattacttcccacctagttcctttcctcttcactgtcatccttactttgcaggcagcctgtcttgttttacttcttttccttttctttggagggcacgcttgtcacgcccgaaaattcactagtaatttccgaacttatttgtgcataaaatcctcgtccaggaatcagccgaggtacacaaactgacaatttaatatacagattcatcaaattaactaaaacgataaatacttacttaagaggcacttagtcctcaccatgaagaaaactgcagcggaaaataaaatctagcgaagctccggctccactcccacaggcagctcaactggggtataagccaaacgtcttctccttctggattctttttctttaactgaggttgattgattagtgcaagaatgagcatatgacatactcaacaagccacacagcaaatatgcaagtgcacgaggataccaaaggatggcataatataggctcatttgcaaaagcagcatttagcaaaacatttaagagaagtaaaacagtggagtaattaatcagaaattttaatcaacactgaacagcacacccatgctgcacaggcccaaccatcctgaacaaccatacccggctgtacagatctaatctccaaaccaggagctaagcaaattattaccaggtataacatccataattattgtgagaggtgtgagactaatcacgaaaaacattgctcaactcgcccataaccgcgggcacggctattcgaatagttttactctggccagaggtgtaccactgtacccacaagacacgattccacacatgttgccatgccccgaagtaccaccacggcactgcaaagggggaaatcgtgacaataccctttgcacaacacaactcaaaacagtgcaccgttcctggatcataatcaccccctcaaaaaccagaggcatggactccccagcgacccccgtgggcttatctccgccacttctcagtctggtgctccgcaatgaatcatgctatacaaaagataaagccgttgcccacgctggcttgtggttggcacggttaaagtttcacaacagtagctcgcgaaccggtccttaattttcatgagcacgactctcaaaaccatgtgctcacaacccaccattatcaagttttagttggcaagtaattaattaaccaatcacgattaaccatcgtgaactatcattaagccatcattaaataataatgcgtcataagttatcccaatagtgtgctaatgtttctaagcatggctaagcaatcacatctaatatctagctgaaccaatatgtaaagctcaactagtcaagttataaaaacccaaggtatcaaggaataaagtaatcaatgcaaacagcccataacaaaggaatagattcactccacccagtgacattcgaaaataaatgcacagttgaaataaatagagaatttaaatataggatcaacatgctcaaaggattgtgtttaggatctgtgtgacttgccttgcaataatcggtcttcaattaatcttcttgaacacttccgacgcactcgcgaaccttcgcaacgacggaaacgacaagctaacacgcaaaacaaggaaaagactaataaaaaccaaataaacaatacataaaaagtaaacaaacatgtagatcataattttagatgaattatgagtcttgaacggcctcattctgacttcaaatgaatttattatgaattttacaagattaaatctatttaaagcccatttaaaaagaattaaataaatttaattcaatttatggacaattttaaaatgtagatctttattttatataacttttgcaacttgaaccacattaaactgagttacaatgaattagttatgtatttttaaagattaaaccggattaaagcatttatatggattttaattgaattatgacgcaataatgaattatttttgaaaagaaaaagaggattattgcgtcagcggctagggtttgcggtggaccgggtgcacggcggcggttcacgagaacggacggccgagatcgatccatccaaaacggacggccgagatcgatcggtccacgaccgggccaccgggaacggcaacgatgacgtcagcaccggcggcggctcggcaacgcatgctcgccggcgaacgacggcgcggcgacgcga

SEQ ID NO: 6341 - DNA, 13230 bp, Oryza sativa
  unsure (1)..(13230): unsure at all n locations
tgcatctgaattctagggtcccatcgtatatttattgatgaagcatattgtgaggctgtctgacagtgtttgggtgatttgtgtgattttctgcctcttttctggtctatctgtgttgaaagagaatgtttattttcatatcagggattagatggtgaagctactgaacctatgattaaagagttagaagatgaaagggaggaatcacaagatcctgaagttgagtttgctatagcaggtgctgtaagggaatgtggaggccttgaaattatattaagcatgattcaggtaataatgttaagatatcggtcttttttttgttgcccgtgtaacatgttacgatcaattaatctgtacagatttatatatgcaggcacatttttaataatttgtaagatatttctgaaaaaatattatatctttgaatattattttacgtaggtggtcagttggtcttatatgatcatgctaagttataaatttgagaacaattaagtactaataatattttataatttaggcttatattgtgtttagttgggattcatatttgaattttctgatctaatccttctattgttaatgaggcttgacaatctaattatgccctcaaaatccttttttcttcagagcctacgcgaagatgagttaagatcaaaccaggaagaattgggttcagtccttaaccttctgaagtattgttgcaaaattcgtgaaaatagatgtgctttattacgcctgggtgcattgggtttgctacttgagacagccagacgtgcattctcagtagatgcgatggagccagctgagggtattctattaattgtagaaagtcttacaatggaagctaatgagagtgacataagtattgcccaaagtgtttttacaactactactgaggagactggtgctggtgaggaggcaaagaaaattgttctcatgtttcttgagaggctgtgccctcctgatggtgccaaaaaatcaaacaagcaacaaagaaacgaggagatggtggcaaggatcttacctaacttgacgtatggggagccagcagccatggaggcccttgttttgcattttgagccctaccttatgaactggagtgagtttgaccagttgcagaaacaacacgaggaaaatccaaaagatgaaactttaagcaaaaacgcatcaatgcagaggtctgctgttgaaaactttgttcgagtctcagagtcactcaagacaagttcttgcggtgaaaggctgaaggagattattctagagaagggcattacaaaagcagctgtaggtcatctgagggaaagctttgcttctgcagggcaggctagctttaggactagtgcagaatggacagttgggttaaaactgccttccattccactcatcctctcaatgttgaaggggctcgccaagggtgatctgcctacacaaaagtgtgtcgatgaagaagatattctgccattgctgcatgctttagaaggagtgcctggtgaaaatgaaattggtgcaagagcagaaaatcttttggatacccttgccaacaaagaaaataatggtgatggcttcttggcagagaagattcaagagctccgacatgctacaagggatgaaatgcgacgccgtgctctcaagaaaagagaaatgctactccaggtaactgttgccattatggtttcattcattatttgcagagtcttgtactcttgtataagtgtttgatctcctgttctgcatgtgcacaaattaatatgttttgctaccttctttttgtataccaggggctaggaatgcgacaagaatttgcttctgatggaggtagacgtattgttgtgtctcagcctataattgaaggcttggatgatgtggaagaagaagaggatgggttagcatgcatggtttgtagagaagggtatactttgaggccgactgacatgttaggagtctatgcatttagtaaacgggtgaacttgggtgccactagttcaggcagtggccgtggggactgtgtttacactactgttagccacttcaacatcatacactaccaatgtcatcaggaggctaaaagagctgatgctgcactgaagaatcctaaaaaggaatgggatggtgctaccctgagaaataatgagacactgtgtaattgtatctttcccttgagggggccatctgttcctcctgggcagtacacacgatgtctcgaccagtattgggaccaattgaattctctgggacgagcagatggaagtcgccttcgcttgttaacatatgacattgttctggtacgtggcagtgacttcgtcttatttcctcgtgtatacattgtatggaattccatttcattcattctgccattattacatccctacaaagtgcattttctagtttcttatgtttcgttggagcttttgctttattttattttttgctgagaactgtgggggatgccatctggaacatatttatgacaacagcaaaactctaaaattctttatgcctggctaacaaaataactctaatgtcttcgtgaaaatcaaagataaatttgtcatcaaagtgacatgttttgcttcattactgacaacaaaagctgaaatatctgtaatttatggtcttccttttatgctttgtatagaatgcatgctgtagggcatattattctctgatatgattccaattttagcctaaatgccattgccttgtatggaggcaaaactggttgatacttgatggcattcaattcttgtttatttggtgtgacgaggtaacttgagagcagcaaatcggacctgtcaatttcattttgttgttatggcattttccttcataggtaatcattgtacattcctcttgcacatacaaaactaatcaaacttcatttgttttcactagatgttggccaggtttgcaacaggcgcttctttcagcactgactgcaaaggtgggggtagggagagcaactcgcggtttcttcctttcatgatccaaatggcttctcatcttgtagatggaagtgccaaccagcagcgtcatgtcatggccaaggctgttacctcgtacttgtcctcttcgccttcaactccagaatctcctgttcgactttcagctctatctggagctcgtgggggttcaggttcctcggaggagactgtacagttcatgatggtcaattctctgctgtctgagtcctatgagagttggctgcagcaccgccccgctttcctgcagaggggcatctaccatgcttacatgcaacacaagcatggacgatccaccctcaactttctgccgacacgtcttcctctgcagtccgatcagatgaaggttcatccgccgattcaaacgacagcaagaggctctttgccattgtccagccgatgctggtgtacactggtttgattgagcagctgcagcaatttttcaagaaaggcaaatcgtctggcacgcaaaaggtcggtgagaaggacggatcaagtggtggtaacctcgaagcttgggagattatgatgaaagaaaagctggggaacatgaaggagatgctaggattctccaaagacgtgctctcatggctcgaagacatgacctcatctgaggacttgcaggaggccttcgatgtcatgggtgcgttgccagatgtgttctccggtggccacactacatgtgaagactttgtccgggcgatcatacacggtgcaaagagctgaacgaagttttccgaggatctacaatttgtgttgaaactttgccacgcgcctgtatgtttgtaaggatagtcagcttttgtgtggcagctgtaaacattataattcttccttgtaaaatgaaactgggcaaggtttgtatgctagcttttgtcctggcatttaccagcctccattcacattccttgctccacctgcaattgaagaacatgaaggtgaaacaacgaccgtaaatgaagttattgacgacaagagcctgtctagcgtcaaaactcaaaagaagtgcacatttgctaaattaacttatagcaggacctagtaatgaaagatcagctcgacctttaagttacaacgcggcgctgatgaagtacgtctaattaagcgtagacgatctgattcgctagctcgcacattgaatgatccaccgaaatcagtggatcaataccaataactaaaaatcggttgctgtagcatcatcagatggtctacccactactacgtactactaccgtctatggtcactgttctggctaccatgcatgctcatgctcggccacataattaattaacctaacacagaagattgatcaatatgcatgcatgcaatcttctgggcatcatgaaatcggattagataaaaagtaatctgtactagaacttaccaaaattttgcagctaggggcatgtagagcaagcaaacgcctcggagacggatgaacaacaagcccggctcatcgttcgcgtgcccttgtcgctcgcggcgacgacactataaatacttgcacgtagccagtgacgaatcccagaacgaaaatagagaaaaattaatttgggagtactaattaagatgtcgtcgcgacgacatggcatgaaagccgtggtggtggtggtggtgatcgcgcacgtcctgctatgccatgttgccggcggcggcgggggcgtcccggcggtgatcgtgttcggcgactccacggcggacacgggcaacaacaacttcatccagaccatggcgaggggcaactacccgccgtacgggcgggacttcgccggcggcgtggccaccggccggttctccaacggccggctcgccgccgacttcgtctccgaggcgctggggctgccgcccgccgtgccgccgtaccttgaccccagccacagcatccaccagctcgcgtcgggcgtcagcttcgcctccgccggaacgggcctagacaacatcactgcacaaatcctagtgagtatatagtacggggtataatatatactagccttttatactttccagctctttcagggtgaaagtcttttttttttccaaaaaaaaaatgtataaacattgatcagccaacaaactaattaataacagggaagtgttgttcactattacaataaaaaaagggtgacactgtatgtgtagaaaattctagaaacattgtttttctcgcgtgccgccgcgggacaccattggagataaccggcatctatgtgacggttgttaatagaaaccggcacaaccagtttttattaacaaacgacttcttcgagtgggctcaccttttaccaaatcgaaataatcattggagaacccattttaaaagtgacaccattttaagctatcagacataggtgccaattctaaataagaacgacacatttgacctcgcccttatatacctctccttccctcttgagcagatcgagtaaagaacaacgcaacgtctcaactggggggatttgctccttaaacaattttgcctttttttttaaatgttgttggagtttggttgtattttcttctatgtgtatatttcttttatctattttgttcattcaattacttcctagatctatccccgatgacgcgatgataattattagtaaatgcattataattctacccaccaagatttaaattgtccttaacgtcaatgattaaattcaattatcgagaaaacaaactagtagtaaataaagtatatttttttagaagtttaatagtaccgtctgctttatactaattacagctcgcggttaccatcagtcgattaacgttttttttaaaaaaattcaataaaacgttaaaaatttctatgattcagtaaatatagtgcataaaatatgttttttaattgacagtgaaaataatatttggtagtatatgtaataggaataatcaaggacaatttaaaagttgtaaattattttgaaatgtacaaagtaaatgtaaaaaataattctgtcttcatagtttagagaaaaaaattatttgaaatcagaagctttattaaataaatttatgtttgtactaaatcgtgaactgtgcattgaataaggaaaaaaccatatcttatacctggcgtacgatagaaaaaaccatatcagttgttgacaaatttgccacattatacttgtaataagttgagaaaactgataaccgcaaaatccactgccacttagttattttaatttgcgacaaataaagggaatatgaaatattaattagaagaatactgcaaaagtctcgagacaattaagtaactatgcttcatggcctatccaaaagcaagaaactgaacctgggaaccttgtttagtgcacaaattaatactcccaccattctaaagtataaatatttttaggaatcaagattggtgccacgtatttctgtggcactgattccaatggcaaatttgtatactttcaaccaatcagaagtatatgaagaaaatctaaccgattcaaaatttaaaatttgattaatgacttagaaaaaaaatgaccgaacgttgtaacgggtgaagtctattttaatcttattattgttatatagtttaattaagatgtggaaattcgctttgatatatgtatatattttttagaaatcataaactgcagttgaggttgatcgtctcaagttagcatgcaagttttttttaaacggatttcttatatgtttccttctgtattactaagagccaacgaaattaacaaccgactcaaatacggatatgtattgctaaaagcaaacgaacttaaaagctgactcatatacgaatgacataccaaaataccgataaaaatatcttcaatttttataatagtagagattatagttggtcattacacgttacctttctggtaaaaagaaaacattatctagatcgtggcccatgtaggcctggccggatgtcagctcgctcgctgtcctctatccggtacctgtaataccttttcttttttcttctcttggaacaagcgaagagtagaacaagcgaagagtagagatttttgataagtgaacagtaatagattttagactggccttgagaatctttttttgacaaaaacatgttaaacttttatactagtagagaagagatatgatattatcttatcttaattcttgcccaattaacagcctagaaaatacaatggaggaaatacttagcagtgtcaggcagtagactgatcgaactgcagttaggtggccctgtgtagaaccaaatactaatactcctccaggaaataagtttgttgtttatggaacggtgggagtacacgagaattaattgaaccataacttggactaactaacaaacccatgcatgcatgcatgcactcattatgacaagaccataacctaatgcagtacttgtcatttgttttactaatttgcagtcagcaatgaccctgagtcagcagatagaccacttcaggcagtacaaggagaagctgaggtgggccaaaggcgaggcagcggcacaccacatcataagccaggcgctctacattttgagcgtcggcaccagcgacttcctgcacaactacctcgtcttccccatcaggggcaaccgcttcaccctgccgcgctacgaggcctacctcgccggcgccgccgccggggcggtgcgcgccgtgcacgggctcggcggccgccgggtgaagctcgccgggctgccaccgctggggtgcctgccggtggagaggacgatcaacccggacaggcctggggattgcaacgagatgtacaacatggtggctctgagcttcaacgcaaggctcaagaggcttattgggaggctcaactgggagctgccaggggcacaagtagagtatgttgatcagtacagcatcctctctgccatcattgccaagccatgggaatatggtcagtacccagtaatgcacttcgcttcatattaaattttggtcagtagttcagtacccagtattgaacctagttcgagattgttaattgtattcagaaccttttggatatattaaacctacttcgagattgtatctaagtttcccgagtcttaacacttccgtaacaccttcataagcccaatcggatgtggagaagatcctttaggtgcaacaccatccctcctatatatataaaataggagccaagctcgatcaaccaacaatcaatcgtcaaaatcagtctattatctatacctctgtcatctacatatccctcctttcttctggcatcctatgtctattcatcctccaatatatcccctaattactcgttgtctctctcgtctctatggcgttagaggttgtcctagctatccaccgagtctaagtcaaactggtgtgtgttcacgatgacaggttctctatcggtctcgagtgatcgttcagtagtacctaaccctgtggcattgtgtctccgggtgtctctatgggttgtacacaagatactcaagtgtgcctaggcatgtaacccgttcttcgtgtcaatgaaatttggttataaatatttgacatttgtcataatatttaacctcactgtttgcttgttggtttataagccacaagcaaaagttaaaattttaaacttaatgttaaattatttaatgtacttttatcaatgttttttagcattggctttatttaattcgctaagactaaaatctaatggtcctacgcaaaacaattttatgtatccttacttagccagaaaccaaccatgagatcgttgatcaaaatttggaaattttgactatatattttgtattaaataaatttagggtcttatgatagtaatcttaaaagaaaatctatgcatgccattttaatttgttattttaaaactaagttttgagaaattaattatgatcaaagttttaaatgtttgataaaatcttattttaaaagtcaaatatttatgattgaagggagcatataagttatgtaatcctattctccatgattaaacgtatgatcctaaaaatttaaattatctaatccactccgaattatatttttttcttgtgatcaaatcaggttttgggaactcaatgcaaggatgttgtggcacgggatttgtggagacaggaattctatgtgccttggacgatgcgttggcatgcgacgatgctgataaatatgtattctttgatgctgtccatccatcggaaagggcgtacaagatcatagccgatgcatttataaacaccacctcacctgtattccactgaattaaaaaatatatttcactcgtgatattatctgaacgctcaaattaatataaaagagctactccctccattccaaattgattatcatatatatttatgcaccaagagcaaaagtaatttaaatcgcatcaatcatgacaccatgccctcattcaagtaaaacaccatgccaattacactcttagcatgcgcacattatctcctacgacattaattatatttcgatgaaatccatgtctatacggttatatgataatcaatttgataaattttggattttattatatgataatcaatttgcgaagaagggagtactattgcagatacgataactaggtaccggatttttgttacgcaaatacccttgtacctatgtggtactaggccatgccaccaagccgaatagaagatgagcttattgtgctcaatctgaattctgaaattcccaaacagaacaaatatgagcctatatatcatgtgcagtatgtctacattttgtccgttgtaacactttgtcctgtcctcgtctatacctatatcttatcttaattacttaaaagactagtaattttccgttcgtcaccaaaaaatttcgtttgtaatccgttttgtatgcgcatttgtgtcatcaatgtccgattcttccaatcggagactagaaaaaccaagttatagccggtaacccataacaacaaaatcttgacaataatctaatctcatggaagcacttaccaaaatcagactttgatagttcgatacaaccataaggcaaaaacaagaaccagatttcacccaaataaaatcagtaaaggatccaccttaaacttgatctccttcaagcccagcactagaccgatggcagctagccccaattaaagatgaacagtgttggaccacttgatgtcgtggtcacaccattgccgcctgcgccttcctctgccgccacctacaacaagatccacaaaagatgtggtcgtcgccagccttcgcattgcttggtgccctccaccaatccacccatcgccagcctctgtcttgctagctgcgtcctcctccagatccaccgtcgccatggccactctaccagatccactatcaccatggacattgctgccgccttctcgtcctccttgccgtcatcattgcgattcgcctagcgccggcgcggggataaggcgagatgcacagtgggtggctggcgtgatgtggtcgtggcattgagcatgatgcggtgcatgcggccgagcggcgcgtgtgagtcgagcaacggcacaacgagcaggagagagggtgcgctcgaggcggaggatgagatgaggaggaaagaagaaggcgaaggcatggcagaggcagaggtggaggtagcgaaccggaggctgcttgctcgaaggattcgagattggaacgaggagtggtgggttggtggagagtggggacggggagggattaaagattgtgggcgaccttttgattttcttttttcctttttgtttttttgagcttctttcggctagggtcctttttcttgcaaacgattcgtctcttgcgggcgtgcatcactgctgccaccacatcatttataattgtaaattagaaataaatagatatagtattgtcgacgttttagatcacgactacggtatttgcatggtatggggatcgttggtaccagagtatatacgagattgaggtaaaagagccagagacaaggatttttatacaggttcaggccccttatacatcagaatcangttatagccctactcatgttggccgaagccggtgtaactcttattcatcaaaatcacacaagtacaatatttgagataacctatctaagtgtgtcgtcgacttgccggcttgaaacaccaacacctaatcgacgaccgggtagtccncctccttcaatacatactcggtgagatcaaagatagcgctagatccctcttgttggcctatgtaggcgccagattgggtttgtctaggttaatctttgatattgatgtttggtggcatgtattcgtgtctattctgactatttttccccctctcttcctaggggtcttgtatttatacccatatatgtccccttgtccaagtagaactagggagaccaatatagaaacaatctgagtagtccttattgtttccacgtagaactgtacttgtcattccttatccagaactccttttatatatacgaggtatgattccatataagacttggtatatggtaggccccgccgagcttagtcgattactattgggtatgtgttatctataaccctgacagtagccccgacttcaatgcaaatgaacgagttgatgatctcgatcgaataccttggaataacagttgttgtgctcatttaatcattctcagacgaccgagaaaatgcggagtatgcgactaaattccttgttttatcgtaatcgagaatttggattgaacataaggaattttgtttcggcagatacacaatcgctttatctgtaatccaccaaccattcttggataatcgagtagttgtagagtctgcaacaaagccctaaaatctgacttaactgttctgatatctgactttcctaaaatcaatactcagaacagattgttagattgaaatagcccccgagcgaacgctcaagggtaacacaatataatatgaatttaaaaattgaaaataaattgaatctgcatgtgacgataaaagagtactctcgccaaagctacccttagttggctttatggaaaagtcattttccaaaaggcagcttaaatcttataacaaaccaagctgaagctgacgaatccatggctcagttaatatgcatctacggagcactctaccagatatgacatggtcgtttggctctgaagcatctgacaaggacttatcagctctgggcgcgcgtccctagacgaaatccccttatgtttcttggaggctgtcagaatagcgtaaaggaacaatatgatcgacttcaagacacgacgatataagaaaaggggatcaacgaacaaattttgcacatataaatacttacagaagttgacgcacatgggataatgagacgaccaccacactgggcaaagaccagatgtgtagttgttctcaacaaatcgcagaggtagtgggtgaatctctacgccgctggttgaagaccagttgtagtcgtacctctgttgacggctgttaaatgctaattctatgccgccaatacctgcataaaacataattaatgaaacatccaacatagtagtagggtttaattctaacatattccaggagtgttggtgtatatttgaatgtaggtgataaaccgtcaaagttgggaggaaatatagacttaagtaaaggaagaatactctcaggctcaacgctaccaccgatgtcattcatgctctcgctgaagacctcttcatggcgcccacatacatctacactatcaccaccatcacaatcatgcatggcagaacatgaagcgaagaccgacaacgatgaccagcgtagcttaatcggaggtataattgacctggtgtcttccgaaaccacgggaacctggtaaacataattgtcaagtcagatccaccttgcctataggccgtggagcgcacactaaggattttgtattattgtaattctttaagaattataacaaaatgcatttttctatgtccattttattttttttacctagtacacaggcatgtccgtacattttattttactagcaaaaatgcccgtgcgttgcaacgggtgaaaaattataatgataatatacattttatcatgcataaccgtgtcaatgcaaatgtttgtatggatcatttattgctaagacattcagaaaattggaacatcttcaatctaatggcccaacctcaacgatgtcaaccataccgatgcttgtttacctaaataattagattattcatatgacaacatcaaatcaaatcaaatcctacactgcatcgcagggtcaaatctatcaaaacagagtcactgtgcactcttctctaaatactaaca

SEQ ID NO: 6342 - DNA, 19531 bp, Oryza sativa
ggtttttctctcgcgttgagtcggacggttttctcgaaccacttgtagaaacaacggctttttctcgcattgaatccgattgttttttagatttggcttcgttataaacagtgtttttttctaatagttttttcagagtggctttttttcaataaacggtgtttttttcttgcgcaattttctcaaaccattttcacaaacgttgcatttctttctgaaatttctttcctagcacgtttgtttttctgttttttacagacgatgaaaaccgtatttttctcgtgttttttttgccttcttttctcgtgtgttcttttgcctgttttttctgacatttttttctcgcgcatttttcttgcttgttttttctcgagtgttttttttttgcttttttctaatataggagcataaatgacgaaataaaagtcgtgtaggagatggaaaaaaaattgaaggattctatccgacccaagcgtccatcaatttagttttttttttgacatttttttagagcagcttgtttttttataaacgtttttttcctgcacagttttttcttacaattttttcctcgcatgcatttttttattttttacggacgatggaaatatttttcctcgcgtgtttttttattttttaggacgacggaatcctttctttgcgcttttttctaacttattttctcacgcgttttttgcttttttttttcttacactttttaaaaccgtttttattttatcgcgtatttttttatttttagttgtacgatgaaaacttctcttttatatagttagatttgatttgattagagatagagaaaagatatatacagtctcgcgtgtttttttattttttacgaaccgttatttcgcaactcttttaatgttttacctaattttttggatttttttttgtttttttgcctttcataggaatcatatttttttttgttcttcccatttgtttttaaggggaatcggatctatgatttttttcgcctttttttttttcattttttggtttttttcaccttttatcgggggaatcggattttttttagatttttctccgattttttttgttttccccatttttttggggaatcggatctacgtttttttttttgtttttttgctacttctcctgcgaatcggacttctatttttttttaattttttttgccacttcttctcagaattggatttttaagggtgtattttttaaaatttttttgccacatcttatgggaatcggacttagtttaggttgttttttttgctatttattttattttgactgacgaaggaaacattttgtattttgaatcggatctacagatttattttggttttttcaccttttatagggggaatcggattttttttaaagatttttcgctatttttctccgatttttttttgttttcccctttttaaggggaattacgttttttttttgttttttcgctacccctgggaattggacttctacgttttttttttattttttgccacttcttctcggaatcggattttttaagggtgtattttttttttattttttgccacatcttctgggaatcggactttttagtttagatagttttttttcgctatttattttattttgacggatgaaggaaacgtttcgtattttttaagtagtagagattttacttccttgcgtggagagacgaaaatttaattttctatctaaatacattgcatgcagcggtgaaaagtaagagagaacacacacacatgctcctctctccatcgtgttgatttttttactacttgctcgtagggctgtcaacgagccgagctcaagcgagcttacctatataggctcgagctcggcaccaacttgagccgagctcgagtcgagcctgtttaaactacaagcttagaaatgggctcgagctcggctcgctcgagcctcgagctttctcgagcctaactcgtgtgccctcaaataaccaatacagatgaaaggaggctgcatgcatgcttgtcgagtactactagtactagtagctttttcaaacatgatatgacaactagtagtactattaaatagagctgcatgtatgctagtagtactaataggctagtgctgcagagtaaagtagtactagtaggctagtgcctgcacggtgcagccctgcacgctctgtgtttctatacagcttttcattgggagtaggagtagtactagctgttgcattgaaaatttaagagagggaaatctgggctcgacgagctattcgagctcggctcgtcaagctcgcaagcttggagctaggcttgagttcggctcaaattgttgacgaatcgagctcgagccgagtctacagcgagccaagctcaagcagctcgcgagcctcgagcttttttgacagccctacttgctcgtgatcatttcacgtacacgtttaggttcattggttgtgctccattcaaggagctaagtgcctaagacaaaattagactacaagatcaccggtgttgtaagcttgtgtacgtgctattggtttccctattcctctctccgacacagataggatcgaaaatttggaaattgtggtaattttggtttgaattaatttaaaatgttaatcaaaatttgatcacatctaaaataaattttgctaaattctattttaatgaaagattcagaaaacaattaggataaatagttcctgtcagaaggggtgacaaaatccataacctcgggcagtgtttgtcaaatggaaaaggaaaatgatttcccacccatctttaaatcctaaccattcattctccctcttctatttaatcctaacccttcgttcatttccctatctcaaccccacccctcatttcccattatccaaacacacccttgatggtttagatcttgttggctagtgggaatcaaccatacagttcagggatacatggaaatgcaaaacagtttgaatttttaagttactagtaaagtgactgtgcgttgcaacgggaaatgttgtatatcaatttcaaattatattaagtgaaaagatattaaataatcattgagtgaaaatttgttgaacataggaaaaaaaatctggcaatcaaagaaactagaaatcataatagttatgtagattaatttcaagcaagaaatttgttttcattacagaagcataatccaagctttttgtcgcataaaacaatcttacagtgtttattaaattataaaaaggcaacataggtaaaagcctgctacgaaaatttgatgatgtcatacaaattaaagcacaaacattaaatctagaacattaaggattttcagatatggtatttctcatggatgatcacctcaaattaaattattctatataggtaaataactaccctaatattgtgtatttgtgatacacttaataatatcccgtgcgccattaggtatgttgctttcacactcattttgttggtacatcagtagatttagcaaaaaaaaattgcattagcttgtcaccatcctgcacatgtattttctttgtaagttaaatatttctaattatatgatataatattcaaatgatcaatgccagtcaggacttacattaatagccggcaaatgtaattcttcatttttccatgtacacatgaagagatgaacaagaagacccgatcaatttccccctcaatttccttaattccctttttcttaggaattaaacaaacaagttcttaaggtttagatgggttgggaaagggttcatggcttctgatccattaccgcccctgctctctaggcataccgcgtgcatacactcgccgcgccggcacgccattcccttctcatcaggtcacgcatcacgctctccccccttcttccgccccttcttccctaaaacaggcaattcaagcacaccatagctggaagccaatccgatcgatccaatcgagattcggtgtgctcggctcctatcggcttagaacaaggtcaatagcatggctagttgtttgctctaagtaatgtgttattttgtagtttataccacagacaaccaatacaatagattggctattgtgttaactctatcttattaattaagaatcaattatgcatgcacatataaaatatatatgatcaaaatgaaagtacatccttgtggccatctgtgttgtcgcatacagtctgcgacacacaaaagctttccaaagctaagcttgccatgacacttgcattttgattgatctatgtgaagatcctgaggaggctgactttctcggacctggccgagggagcacactggggggtggtgctcatgtcgctcagccgctctccgcgcagcgacggcgctgctcgtgctcacagctgcggcagcgacctgcgctgcaggcagcgatgaccatcacttggcgaggcacctcacgtcgtcgtccaattcaaacaaatcagaggctaacttcgacaagatttacaccgaaaaggaaactgcaagttgttctctgggttgatagggatcgggcatgacctccatggaccgatcgagaaatctaagaattaatcgcgatggttgagcggagtggagaggagacacaaaccaggtgaccacggaaaaggaacgtgcgagcaacggctgaacatcggcatgcgcgcgcagtcatcgatccggagaagggctgcccgctgtctagatctatttgctacgcacgggatcgttcgcgatggttgtgggcccactaaggtcttgtttggttaatcatcgtgagggtggaattggagagaattcattccacacatgttgtggtaaggaattattccccctcaatcctctccaatcctcttcaatcccctccaaatcgaacaagacctgaaagtgttttctatcgttgggggattaggggcgccgttattttcttgttgagtgcggatcgcgatccagaggagtcgcgcgatggtggtgcggaggagcacgatgggatcgctctgcagcgttcgattttttatccatgcatggttaatagatcgcgtgtctatgttggatcgtgtgtgttggcttcaccatcatcaatatggattttttaagtagcagagattatccaataagtgaagaatatgttgtctctttcttaaaataaattataatcattatcataacattagtttttcccgttgcaacgcacgggcagtttttctagtaatatataatagaaaaatatttataaggcttcccttcgtccgttttgtccatcctttgagtccgagttcatcgtccaaaaaaaacaaggtagatccccaaatcaatcaatcaacgacacaacaaaatacagcacggaaaagccaatttaatctagagctcatgaatttgatccccaagaaacttaatccccgtcgtactaaatcaacatccaaaacacaaaatcctcaaaatattcacaaatcaaaccgccgccatgctggagagaaccaccgtcagctccacgtcgaggaggtgaggggtcagttggggggaggggtggagctgctgccaccacaccagggagggaagtagccgccaccgccacgccgggggggggggggggagtagtagccgccatcggctgcacgtcaggaaggtgagtgggcaactggcgagagggtcgcagccattgccaccacgtcggggagggagagcagcagtagccgccgtcgtcacttagtatttgaggagacgggagaggaggcaagagaggatggaggtggcaaaagaggaggcgcagaaaaagagaaggaaaaaagaaaaagatgtgcaggtgcagaaaaggagggttgggcgaaaaataaaggagaagtgagggcagagaaaaaaaatgttcgcacggctcgattggataatatcggctcaatctgcataaaagtgtctgtttattaaccggaaccagcacctatgagcggcatctatttgtatactaagctgacggtttttgctattgacatccccatgggcatgtgtttaggccagaaatgcactatatgtgctggttttagccattccggtatctataatgcggacatctttgcgtgtttatatagtagtgaatattgcatcacgaggcaacaaatcgacgaatcaaacaaattagcggatcaagctgaactcaccaaccaagccactgtcgtcatcgtcatcttggatccgctgtcatctccctcgagctccagtccccaccgccaccgtctccctgatttgatggcagaaacgaagaggctaaggaggagagggagagaggggagggacggccgtcgtcactgtcttcgcgccatacccccgtcgacgaggagacggaaggggtatggatggctgtcgctgccatctccgcgccgtacgcctgccgtcaccgcatcatgttgaggaaaaggcttctgcggccgtgccctcaccgtcgctgcgcccatccgatcagtcaccacgtcgagcaggaggcaggagctcgcagtctcgcaccaccgccaccgtgccacgcgtggcacacccttgttgacggttgttaagtggaaactttaaccattaactgttacataaaagatatcaaatatactatcaaaacttagtgataggagtttactaccaaccacttccatctaaactgagcctattattgatatgttcttttatatgtacgatgagtttttcttttatgatgtattaaaaattgtttccttttaaaacggaacggtaacatctcatcattagtggggcatagtaggattcgaggcaagaaaactcagatgggctgaaaatggtccaaaagaaaggagggtttttattttcagcccaatagaaaggagtgtttttatttaaataaatgttgtcaatattattaaaattcgaaattgagctttaaaaattctgagaaaatttcacatagcgtaattaatcacggagagcttaataaaattaaatccaaccatgttttatttgggaaatcttatttgctacaacttatattttatttgagacttatatattaaggttgtattttttttgtctatatttgagtgggttaggtttgagtatctggtcgacatgtcaaggtttggtttcagttattttgtatcatgggggagcggcgtggtgaccgggcttgcccgcggggcggcgaagctggctgcggtggtggcagggcgcgggagcggctcaggtggcgacaacatgcggctggaggcggtttaaggtggtggcggctcgggtgcacggtggaaggggagtttcggcggaggtttgtgcaaatggagcggtggccggtgtgcggcgaggcatggcgaagctggcggtgcaagcggcgcggcgcggcggtggctacggcgacgacagcgtgcagccggagctcgccggaaagcggcggagagcggcctcgtgcggggagcacaggagagggtgcgaggagctcggggaggagggggaaacggaagaggagagcacgagggtggtttttataggctcggggaggagaaatagtggccggacgtggcggatttgaagcggcaacggccggcgacgtgggcgacatcgtgggcgaagtgggggctcgatttggcgccaaaaatttgggaaaagtgggggatttggtggaggaggtggaggggaaccgattttatgtggtttgggcgcgagggcgcgagcgggaggaccggaatcggcggcgacgtgggcggcaacgggcggcatggcggcttcgggcggttgctggccaggatggaggatggttggggatggacctgacaagtgggtcccgcggtcccacttgtcggccagagggagagagggactagggctttatttagacttcaagggcgagcgggccgagggggagagagagaggcccgatagggggaggggcgcacgcgggccgcggaggaggggaaggattcttgggccgaaaatggcccaaggaggaaggggagtttttaatttgttttctttttatttaattgattcaatgaactttgtgctattaaaattatttcttgagctccgaaaattcacggaaaattccggagaatatattagggcacaaagaatattacaaaatattctcggctaattatttttaaaggaaattttaatttcctccataatttcacttgattaaattgatttatcttttatttaatttctagacaatgcattattaaatgatttttaattccgaccgaaaatcggggcgttacaggtacttaccttgacgtattcggcggttgatgcgcttggtggacttgcggacgtcgacattgccggcggtgagggttggagttgcagagaatcgcatttgggtcgccggaaacttcgaaggtgtcgcgggagagctcgaggaagagattggggaaagttttttcactagagcggttaaaacgggagctgacgccgtgaaacgagcaaagcagtggttactatttaaaagggagtgcggtaacggccaaaacggaatcggttaaggaaaccctagttttaatcggaaagggaagttgagcaaatccgccaagcattaaggtatattaggcttcttgtttgatatattctgtctattttaatatcttaatataaagtggtatcggagtattagctgatacatgctagatctatctggtcggttatgctataaacgtttatataatcattgctttaatgtatacttcgacttaagtggtttataccgtctcggcatggtgaccgatctatcccaatcacttagtttaaatatacatcgaaggaaggattatacatcgttaatatctatacctgatcaagtagatttagttctatcttatttatttatgattgccgatcgattccaatatgacatcgactcgaggataaatgatatgtcatcagcaactagactatcggctatcgtttatggatttaaccgcggttttttttgtctttctttcttgttgattgcaggatcaaatcaactggcacgctcacgaacctaaaagcaagattttggacctgcactgaagttaagcagatcttccaggccagtgtgtgtttttcgcatcaacagtgattaactcttagattacctatttaaagattagagctataacctgcacaaaaggtgccatattttattttactatgttgaagctcactattttctggttctatagaaacttggttcactccatttggactaaagatgaattttctacaaattttacaattaaaggctattctatgttggttatttcttatataaatatttagaggcttttattataaagtaagtacataattttattttataacttggaagtatatgttttggtgattctacagaactttggtttactcaaaaaggatctaagatgaattttatataaacttctaaagttcagcctacagaaaactaattattttgattatactagttttagagacatttgacaaaaagtaagtagatgattttatttcactataccagagagtgtaagttggtgagtctgtgaaatgttaatttaccccaaaatgagttgagatgaatttcgtatgcattttataattttgtgtatgctttatgtataatttttcttagataaattttagaggtgaaatttgtactgtgagtgcaagtttttattccttaacattaaagttaatgacttggtgagttcacagaaattcgaatcatctcaaaaagagttatatttgattttatatggattttacaacttttaggtacttttcttatataatctcagattttgtttttagtggtccactatcagtcatacggacaatatgcaaaaaggcctttgagatttctagaaaccaacccgcagtcctaggcccatatgtcagtgtttagtatgttttcatattgaaccttataattgtttaaattctcaaaccaaagtccctgcgacctggacagaacagagcgccatggccgagctcgatctcgagctcgccggcggcaaacgatggctcgtttgggggtgcgaccaaaagacgccggagtaacgtcggcggcgagtccgagcggaggatgttttggcatgggtaggcatgttgtgccataggtgcgaatcgactaagggagtgcatgcatgtgctttctaaggagtccagggtgctgaccgagatgtaaaacaaggctggcgaagctaagttgacgacggcagctcgtgtgacggctcggctgcggcaagaacctccggggtgaacggcgacagctcaatcggctccaagaactatcgtgcatgtcagcatgtgtgtccatgaggttagtgagtccagagaaatggtgtgtgcgcgagtaaacgaacaatggctcaccggaggaggcggaatcgcgccattgcctgggatttttgaggggttttgaggaggacatcaaggagaagacgttggcgcgacggctcggctcggcttggtctacagcggtcggaacgaggacgatatcggctgctatggagattatggataccccatacctacacggtatgtatgtccaactgggtatggggtgccatgtatagatatactatctttaaagggactcgggttaaaatccaaacttgtatgtcaaggaaatacccgggatcttagtcggttacgattgtatcttatctgtaactacctattccgttaaggatatgggctgtactttgtaatacggactcctcccctatataaggaggggtccaggtgcctcttggggtacgatttttctcccagatcatacgatctataatacactcggcggatcaatcactggacaggagtagggtattacttcttgattaagaaggcctgaacctgtataaaatttcttgtctctaaactcatccacttttctagcttgatagccacccccttttagtattgccgaaatcttgtttcgacagttggcgcgccaggtaggggccgcgtcaagttcttcgaggattagtgcgatgggtttcgtctccggcatcaatgacttcgtcttcccacccgggcagacgttctggtttggcagcctcgacttcatcaccaacgacttcggcaagatttctctcttcgactcggattcgaaccagtcgggaagaggctaggtctctgccccgttcggtattccgaactcggcttagatctaccccaagatcatctcagccgagttggcctcaaaccactcggacgagatccaatctactataacacgacatgatcaagacgatggagcttatcccccaatcctgatgaaactccccgatgatttggctgccgtcttcaccacaagggcgtcttcttcccgtaggtctaggcgggatccggcctcggccccgatccagtctagctctaaggaagtcggcgtcatactctagcctctcggcacagttttgacggaacaactggatggctacctcagctcccccggcgtcgactcacggccaacggagatcattgagtacgacgacttcggctaccgctacgactaccgcaacctcgacgactttggcgaagactttgaagataattacacgcctctctacttcggcattttcatggccgacaacgagacggaagaacagcgtaaagcccgggaagcagaagaacaatgcgtacaaaaggaagccgaacgacaccgactcgaagaggagcgccaagcacaagagcgagaacggctgcagcatgagcaataggagcgcgaacgggctgcaaaggaggctgaggaccggcgacaacgcgccttggatgccaggtgacgagcacgagaactcattgggcagcaagacgtcaagggaactgcggtttttcacactcctcaacagacgcggttgcagcgatcaccctcctcgacaccctcctcatggaagacgcactcaatcaagccaatcacgtcgtcaacatcttgaaccagaccaagaccatgatcgcaactttggtcccgattaactccgcaagcattcgcacaccgactggcagtcgagtcccccctcttcgatcttaagactatcaccaaccgagcctcagcgccgtcggtgccggatctagtcgcaggagtagggaccacaacgagcgatccgtccactcgcctcctgaccgacgcagggagcgtcgagctgaacgtccccgctccccgcatcgcaggcgtcccatcgatcttcgcgaaactatcaaccagcgccgcgcagcgagaggctacgtccccaccattcaccagatcgctacgacgacgacgtggatggagtcgctgcattcacaagcgacctgcgtcgagtggattggtcggccggcttcaagccgactggaatcgagaagcatgacggcaccactaaccctgagtcttggctcaccgtctacggtcttgcaatttgcgcagcaggaggagacagcaaagctatggcaaactatctgcctgtagcactagcgcattctgcccggtcctggcttcacgggcttccccgtggcacaatcggatcttgggcggaacttcgcgaccacttcatcgccaatttccaaggcacctttgaacgccctggcactcagttcgatctctacaacgttgtccagaagtccggagaatcctttcgagattacatccggcgcttttccgagcaacgcaacaagatctccgacatcaccgatgacgtcatcatcgccgccttcactaagggcattcgccacgatgacctagtcggcaagtttgggcgcaagcctcccaggacggtcaagcagatgttcgaaaaagccaatgagtatgccaaagccgaagatgccattaccgcgtccaagcagtcgggcactacttggaagccgaagacagatatgccgaccacagggggggagtggaaataccaatcacaagaatcataagtgcaagcccgaggaacttgtggcaaccactacaccatcctcccgacaacgttcgcgcgtcaacacttttgataagatcatgaactcccaatgtccacatcatccaaattccaatcacacggccaaagattgcttcgtctacaagcagtttgcagaacaatacgccaagaacgcacgcaagacgaatgacggagatcaaagcacgtcaaagaagaaggatgatgaagatgatgccccgactggttttcaagaccatcgcaaggaacttaaccacatctttggtggacccttggcttatgaatccaaacgaaagcaaaagctgaccgaacgggagatcaatgctgttcagcccggcacaccccaatatctttggtggttagagatagctatcaagtttgactgctcggatcaccctgaccgagtggtccacccggggcggtaccccctggtactagacccagtggttcgcaacgtcaagctttgacgatccctcatcgatggtggcagtgcactcaacatccttttcgccaagactctggatgacatgcagatcccttgtacggaattgaaaccgagtaacgcgccctttcacgaagtcatccccgggctgtcttctactccactcggccagagcactttgccggttactttcggtactcgggagaactcttgcacagagaatatttgcttcgaagttgctgatttcgagacagcgtaccatgccatactcggacgcccggcgttagccaagttcatggctgtcccacactacacctacatgatgatgaagatgccaggtccccgaggagtcatatccctgcggagcgacatcaagcaagccgtcacttgcgacaaggaaagctgcgagatggcccagacccgcgagatcacgctcgcccgacaagagatccgactggccgcgtccacagcaaccgaaggagaagtgcctgcaaccaagatgacaaagagcggagaaggcgacgccaagaccaagaagattcctcttgatccctctgatcctactaagactgctgtaataggcgttgagttagattgtaaataggaaagcgcgctcatcacctttcttcaaaataataaagatatctttgcatggaaaccatctaatatgcctggtattcctagagaggtgagtgagcactctttacatgttaaggaagatgctaaacctatcaagcaacgactccgccgtttcgtacaagataggaaggacgcgatcaaggaggaattgaccaagctgttagcagcaggcttcatcaaggaagtcattcatcccgactggctggccaacccaatcctagttcggaagaagacggggcaatggcgcatgtgtgttgattacctcaacaagtcttgtcccaaagatcccttcgggttacctcgcattgaccaggtagttgactcaacggccagctgcgaactacttagcattttggattgctactcaggatatcatcagatccgactaaaggagtccgactgtttaaagacttcgtttattacaccctttggggtctattgctacatcaccatgcctttcgggttaaagaatgcaggagcaacttatcaacgcataatccagagatgtttttcaactcagatcggtcgtaacgttgaagcctatgttgatgatgtagtcgtcaagaccaagcagaaggatgatttgatcacggatttagaagagacctttgcgagcatccgcgctttcaggatgaaattaaaccctgaaaagtgcatcttcggagtaccgtcagggaagttgcttggctttatggtatcccataggggcatacaagccaacccggagaaaatcaacgccattctcaacatgaaaccgccgagctctcagaaagacattctaaagttgactggttgcatggcggcgttcagctggtttgtctcacgactcggcgagcgggggatgcccttcttcaagctgttaaagaaaactgacaatttccagtgggggcccgaagcacaaaaagcctttgaagacttcaagaaactcctcactactccaccggtcttggctttgccacatccgcaagagccgctgttgctatatgtgtcggcaactgcccaggttgtgagcacagttctggttgttgagcgtgaggaggaaggccatatccaaaaagtccaacgaccaatttattttgttagcgaagttttggctgactccaagacaagatatcctcaagttcaaaagctattatgtggtgttttgattaccgtcaggaaattatctcactactttcaaggtcactcggttacggtggttacgtcatttctactcggggatatacttcacaatcgcgaagcaaatgggcggatcacaaagtgggccttagagttgatgtctttggatctatccttcaagccgcgaacttcgatcaagtcccaagctttagcagacttcgtcgccgaatggaccaagtgccaagaagacacgcctgcggaaaagatagagcattggactatgcattttgacgggtcaaagaggctttcaggcactggagcgggggttgttctaattttcccgactggagagaggttgagctacgtattgtggatacatttttctgcgtctcacaatgtggcgggatacgaggcacttcttcacgggctaaggattgcgatctccttaggaattcggcatctgatagttcgtggagactctcagttggttgttaatcaagtcatgaaagagtggtcctgccttgatgataacatgactgcctatcggcaggaggtacgcaaaatagaagataaattcgatggcctcgagctaacccacgttcttcgacataataatgaggcagccgacagactggccaattttggctcaaaacgagaaacagctccttccgacgtgttcgttgaacatctttatgagccgatcgtaccaaattaagaaataaacaaggccacggacgcctgagacgtaaacatgattgaagccgactggagagagcccttcataagatttttgaccaaacaagaactccctcaagataaagacgaagccgagcggatctccaggcgtagcagactttatgttgtacatgagaccgagctgtacaagaaaagtccatcaggaatcttgcaacgctgtgtgtctttggaggagggaaaacaattactaaaggatatacattcaggcatctgtggcaatcacgctgctgcacgaaccatagttggcaaggcatatcggcaaggttttttctggcctacagctgtatccgacgctgacaaaattgtgcgaacatgtgagggttgtccgttttttgcccggcagactcatctaccggctcaagagttgcaaaccatcctgttgtcttggccgtttgcggtatgggggctcgacatggtcggcccgtttaaaaaggctgtcggtggttatattcatctctttgtagctgttgacaagttttccaaatggatcgaagccaaaccggtcatcacaatcacggcagacaaggctagagatttcttcatcaacattgtgcaccggtttggggtacccaatcggatcatcactgataacggcactcagtttactggcggagtatttaaagatttttgtgaggacttcggcatcaaaatttgttatgcctctgtagcgcaccccatgagctacggacaagtcgaacgtgccaatggtatggtacttcaaggaataaaaacacgagttttcgaccgactacatccctatgctggcaaatgggtagaatagttgccatctatcttttggtccctgcgcaccacacccagtctggccacgggccagtcgccgttttttctagtctatggagcagatgcgatgttgccaagcgaagcggaatttgagttgctgcgatttcgtaatttcagcgaggagcgctacggagaagaccgagtagatgatatcaaccgactggaggagcctgtgaagcagccttaattcaatcggctcggtatttacaagggatgcgctgttatcacaatcgcaatgttcgatcacgtgctttcttagttggagacctggttttgagaaaaattcaaactacgcgagatcggcacaagttatctcccttatgggaagggccattcataatttctgaggttactcggccaggttcttaccgactcaaacgtgaagacggtactcatgtcgacaactctcggaacattgaacatctccgtcgttgttatgcttaggcattacattttgtattttcctctttgaacgttaacatcaagtttgtacttgaagttatcagggggctattataataataatggagtgtgatctcttatcaattcaatttgcttacttgatttatcattgccttgtttgattttttggcttagtcaatgaggactgaaagtttttcaacaacttttgcgagttctaggctcaataaggtttgacaaaaacttttaagaaatcaggagctgagtttaaatcatcaagcacagcataaattcatcagtattgtacaaattgtaactccatcatcatcgtcatcatcattgttagaattcaacatcaatcagtatcagtcttttcatcatcagaattgttagatctagtcggctggaggtcgttgtcctagaatctctcaacgacgtcagcagctattttatcagcagctatttgtgcatcattgatgaggtcaagagcagcctctttgcttgtcccgtctgcaaagccatcaatggcattaatatcaatcttcgggtacaaggacttggtcatcgccaacgccaggcttgctcccatgcttccagcttccttgatattcttaaaatatgtatccggagcaattctcagcttgtcgaagatctcggcaatgtcaaatgaactcggaccattgttattgaagaacatggcttggacgagtggtgtagcggcgttggcgacttcatctctagctccttcaagcctcttgattttgttgaccaagacgtcgaattgagcctaggatttgattttacgatctgcacaagtacattcacatcagcaagagggcatgaagataagagtgattttttgaagttccagctgcaagtaccttcgacatctttcaaggccgagtccctctgctttgtcaattcatccttatccttttccagagccttgatccgcttttccagatcggatatctttgcggcttgcactgtattgcttcttgttggttgatagcatatggatagcaacatcaaatgagtcagacaaggatgagagttaccttttgatgagccgcttatcgagaaattggagtcttgaagcttggtgatacggtctctcagatcatgctcagtcttcctggcaagctccttggcttcgtgcagctggtctctggtggcttcaagggttccaaggtgtggaactaacttctcgagggttgctgtcttcgcttcattcctaagatggattctctacaccacaaatttatccctgttcaagtaaagtggtcgacaggatgattgaggttctgtaagagtggacttacatttacaagacgagtagcttggcccagtgtctttttcagtagacatacttcctcatcttccctctgcttatttattacaattccttgtggccgcatttcatcatccctccacttgactaatattggtgggcgggaatcttcagccgattgtacccggaggacctcttcttcatcaccaatcattggcccttatatattcatgagtaatagtgaagtaattgaataaaggttgtcgaatcaaagcaggtttggaggactagtttacctgtgataatttccggtctgggacgagcaggtccttgcaccctaacaggagaactagttccagagtcagcaccagtgtccgtcttgggagggctgttagtttgagcttctacttccgggatgtcattattttgttctgtacccaactggtttctagtcggttactagtcgggggctcctgattagcgccgactccagcttcggcagaatgatttccagtcgggggctcattgctagtctctacattgtcggttgctggttgattatcactcgggcgatcttcggcagtcggcccggtttcctttgaaggacccgtctccgtgtcagttggctcggggtcttttccagaaggatctatgtcagatggcttcctacaaatttgaggtatgctatcagtgctacttcagtagtgagtgagaagcaatacaaggaaaatggccaaatgatttgtacctggaggacttcctgattttcggcatagggcaactggatgttttcttctttgggttagcttatcttggttgttttccagtcatccctttgttgccagctttttcagcgtcatcgccctcgtcgtcactcacaaccaattttctcttacgagagtcagactggttagtcgactttgaagtgtcaggttgatcaatagaccggattttcggccctccactggcttggcttgtcttccaacggggtgagcggcgttgagcaatcggagggtcagatttcatcaaagcaaattcctgtgcatggtattccgagttttcaacctaccttacagaaaataaaagcatgctttgagagaggctgagatgtatgatgcataccggtgggggaggattgaaggcgttgtatggtatgactggcaacgtgtgtgaatagctgaccacgatggcattcgagaagattttttacatcctctcctgca

SEQ ID NO: 6343 - DNA, 6662 bp, Oryza sativa
aatgacttacattgtgaaacggagggagtattacttatagaaaggacacatgagacattttgttaccatcttttatttatggtggtttaatttcatatggaaaaattgtcaccaaccagtatcatataaagagagaaatatgtcaataaaaacatatttcttccaacaaacaactactgctataacgtgagtccgtgacataactagtttcaaagataaatatttattagtaaaaagttaagaacatatttctacaacaaacatgtgtcatcaatgtttgataacaaaattactacatcaattcagaatgtcagttgaaggaccactggattcccatgctagatgacaacaattacaaagaatttctaggaaagagccaatgcaatttagagacaggttacaagaaatgcatgtaagggaaaagtgcacagtactcattggctaggataccctgatatgtccctaaaacgacgtattcgtctcagatacgtgaggggatacgaatatgtatcgaatacgctccgatacgtatcccgtacgtatccttcgctccatcccgcgagagcagcgatcgatcctagcatgccgcgcgccatcgtagctgagtacagcaaaaaaaaaaaagaaccaccactgccataaagcgagtgaacggcctcggcgccggacggctggaggtgtaccagctccacgcctccactgttgcgcgccgcgccgccgtggtccctcggcgcaaagctatcgccagtggccgattgcttctttcatgcctaatgaggtagtaagatattggctgttgagtttcttccgtcgaacaattcatcttgtttcatctatgttctcctcacttattttcttgggacaaacaatgccaaatttcatagatttgatggattttagagttggtaactagctgcatctattcctaatgctactgcggctggaggttcaaggtaaaacaagcaagggaaagaacattatattttgtgattttgaggacttcttgttgtcttacactaatttatactatctttgttctttgctgtgtggacgtcggtgatagtatacaagactacaaactagaagggatattggaggtcatgtgctagcttagtactcaccgatctggtatacatttgcaagcatgatttagctacaaatatgcatggactaattttcttaaagaagttcaacatttttttgtatttttattaaatttccaaattcatcaaatttctatattttattaaatttctatatatatagatgtatctccgtatccttgttttctaaaaagtgccatatcctcgtatccccgtatcacgtatctgtatctatatccccgtatctaggtaacataggtaattggcctcatgagccatcttcttccatggtccaatcttttcgctctatgtctagatcaagcttctcatttaattctctttctttgacatcgatctattggaaagacaatggttaagcattgtgtgatgaaatattggataagagaagattgattggagagctatgccacaaaccgcatcatatatttcaccatttttctcaaaatctcctttctttctgggatgatatggatgtggacatgtggaaccgtttgactagcttgtgggccatcctgataagcattgtactggtgagcaaatagctaaatatttttatccaaagaatacaataagaaacaaaattctacaacaggtatataaaaggtatagatagagcaattgatcaaaagaaacaaatatatctttgtttcacacacaataagataatcatattttagaccccctacaatcaaaaccaatatggtactcctcttagtgatacgagtaaaacattaatcatgaaaaaacaaacaaactcttaatttagtagcatacaccaaacttcaatagaaaatgtgagtgaagatgttttatggtattgcaagagctgtacgtcaacatccttcacaataacccataattcaccgtctcatcagaacttagatcagcaaatcgtttcacttcacatttgggacaaacaagaacatatgtgtattgtcaaggtaatacaatgactaaaatatatcatattttcttaatatatcaaacttcaagtaaaagatagatacccaccaataaaattatgaaagctttgcccaacaatgcaatacattatatcaatcacaatcaagtagaagtaaacactacaaatagatcagttgcatggacaaacaacatgtcatggtcgagatgacactatctgagaacaacatgtcatggtcgggaagtatagttagatgcagcaaaactaaaaacttacatcgctgcttgagctaatcccccaaaatgaacaattgaagctaacatggtccccatggtagatttgatatttatcaagtataaaagaagagtaaagtaccgcattcttttcatgaataaaaaagttccacacgtctatttcttttgtattatctctcttttttaaaaaaataacttcttttatattagtttaaacagccttgatgaacttcaccaaagcacaaaacaacaaaagcaaacacattctatgaacaatcccattgggactagcagtgcgggcatatgactagtactagcttgaaattgatgtgggtttcaccttccaaggcccatttcagccatcttgttgtctggacaggtgggcctaaagcattaaaatgaggaggaagtccatttttttcatccctcaactatagcctgagtccgatttacgtccctcaaccaaaaagccaaaatagaaactctctcaactatcaaaaccagtgtaaagtaactcccttagcattgcaaagtggttttatctgatgtttcaatacaatcattagaaaaagaataacaataggacaccatgtaaataatacaccaaatctcttttgatctccaacaactcctcacctcccctcatgctccgtcgtggcatcaagcttgggacaagccacggaggtgcagaatgaggggtaggcagtggcggtctgtcacacccagaaattcacgaaccagaatttctaaggtgaatgtgcattaaacctctgtccaagaccagccagggtacacaaacgacaattgttgacatacagatccacgtcttacaaaaatataaaagattacaaatgcagcggaaaagataaaagcgagttaagcctgaaaacttgactcctgtagcgggcgactccattccacaggcatccttatcggaagcgacgaaaccaacttcttcgagacagctccaactgagaagaatttcaactctggtgtggggggggggggagagagagcaagactgagtactacccactgtactcagcaagtcataccggaagagaaggtatgatgcaagatataaccaaaggaggctagaggttcatttgcaataaagcaggcatttaaaagcagtagttgaaagcagtaaaacagttgtagtaattaatcaatattaaccaaccactgtccaacgctacaccacattgcaacaggcccaaccaaccacctgaactacaccagttcattagctaattaggggtgagactaatcacggtaaatccggttgaccgcccataacggcgggcacgactattcgaataattttgctctgatcagaggtgtacaaccgtatccacaagacatagccccatgacacgtttccgtgtgccgacatgccaccacgtcataccggaaagaggccgtgacaggatccttcgcataaccccctctaaccaatcgcaccacacctcaggtttcacccccactcctcgtaaggtagtgggcaatcccctctcgtgccacggtgaatccggaagccgatcaaccggacacccaggccgacccaactccatcacgcccaccctagcctgggtacgtcagctagaggaaagctacactacaagcccagccgttgcccacgctggcttgtggtaagcacgataaattcttccagggtttcccgcgaaccggtccttaatcgccatgggcacgactagcaaaaccatgcacccacagcccaccatgtggtgtattttaattaactaacaccattgcggtggcactaatccaaaactatgccaataaacaaagtctatgcattaatgtgattccccatttgtgtgctagttgaactaagcacggctaagcatctcctaaaccaacatctagtcattttaatacccacgttatcaatggcgtaagggaaacaacatatagctgagtaataggacccatcccacatgatatcgtataagaatgcaacgtttagcagaaaatacaggatatttgtaaattgggtacaatatgatcaattgtaatgtatgacttgccttgctctcgcactgatgagaccacagcaacgtcttcaagaaaccgcagattgacgaaacggccaaaatctacgcgacaaacaacgcacacaagcaaaacatgctataagtctactgaaacaggaaacaaccatttttaatggattctatgcatttttatgaatttattgagacttgaatggacttaatcggaactcggatgaattagttatgatttttagaagataatctgtgttttaactaataaagaaaaggccttaattgatttattgcgcaataatacccagggctgacgtcatccaagggggccggcaccgacaagcgggccctgcatgtcagcggctcatagagcgccggttcaccgtggaccgggaccacacgggtggtccatcgccggtccacgggaccaacggtccggatcgaccgggagccgatcagatggcgcggcggcggccaggcatggcgcggcctggcacaaagccgaccggccggccatggcaaggtggcggcggcgaccggcgcgagggcggcggtgcgcacaggaggcggcgacgcgcacgggtgaaggagaggaggagagggggggtttctcaccgaggttggccggcgcgagaagagatgacggcgaacgacgccggcaagcggtggatggcgaggcaagcgggtggacgacgtccggagtgacctaggaaagcaaaaaagaggattcagagggagagaggtggttcgcggcaactggcaacaccggccgaaggcgagtaaaatggaggggctcaccggcggcggggaagacgatttccggtgggatttcagcgacgggaggtggcggccgaggtagcttccgcggcggcgaagctatcagcggtggtggtgcggcgcagcgagggcgctagtggcgacggcgtgcggctggagatgggcggcggcgatggagctcggggagagcggcgcaatggcggtagagagcacgggaggatgcggcgagagcggaaaaagagagagggggcttgggggaatgttttataggcgaagggggaggcggacgtagccggggaggggcccaatttgccggcgacatggagaggtggagagagagagagagagttggggaaggtgggcgcgcgcgccatttgcggcatttgcgggcgcgcgcacttgcgggaggtgtggggaaggtgggcggcgacgtggagggcgtgtagtggggtgcggaaggcggaggaggtgggcggcagcggcggttggggcaggcggcggcggttgccggctagaggaggaataaggggccgacaggtgggccccacctgtcggtgacccggagggaggagggaggggacgtgggccggcccagcaaggaggagggcggcgcgggaggagtgggccgacggcccaataagaggaaaaagagaaaatggaaaatgaattaccagggacttaaatattgcttagaattgattttaaatgggttaaaattattttcgaggctctgaaaattccactaaaaatcctgttaatgtattatgacatgtggaacccaagaaaaatcccacaatgccatttcccattattgattgcatttattaaataaagaattagctctaggttaatttgaaccaatttcttcaagcgatttattaaacaaaaatttaaaactagcaaggggaactttagggcgtgacacagtccgagcaggcgactttggctcctagcagtgggctcctccacagcgtcgatctagtggcttaagaggtgtcagtctcggtcctcatctgaagttggttggcctcgctaccacctcacacccatgtcaatgcagcgttccatgcggtagttctcagaggcgcgagatggagctagtgttcatgcaataggatgggcttccatcaggcaacaatctgagctggctggggacaaaccagaaagctccaattagatatgttagcaagcacgggtatcaaaatgtacacaagcaaattggaattagcatgttgcatgtaccggatataaaagaagtgggactgcctatatatttgtcgataaattttcccccaaaaatttgacagatgtaattacagtacaatcgtagtgtagttacactgtaacttatatgtaattacactgtaacttgcatgtaactatagtataacttatatgtaagtttcacataattttgaatcgttagatctattacaagatttgttttggtgaggaaaaaaacaaatcatagcacacacatatatgaaagaatttgttctcacgacctccattttaccgaaataacatgttacggagagatttttgaaagttacat

SEQ ID NO: 6344 - DNA, 14399 bp, Oryza sativa
catccctttgttgccagctttttcagcgtcatcgccctcgtcgtcactcacaaccaattttctcttacgagagtcagactggttagtcgactttgaagtgtcaggttgatcaatagaccggattttcggccctccactggcttggcttgtcttccaacggggtgagcggcgttgagcaatcggagggtcagatttcatcaaagcaaattcctgtgcatggtattccgagttttcaacctaccttacagaaaataaaagcatgctttgagagaggctgagatgtatgatgcataccggtgggggaggattgaaggcgttgtatggtatgactggcaacgtgtgtgaatagctgaccacgatggcattcgagaagattttttacatcctctcctgcataattttgaactcaagagattctgggttctctcggttggggtcatgcttgccgtcaaattcaaaggctgttctagatctttccttgattggtgccaacaaggtcttgatgaagtgccgagtgatttgttccccttgtagaccctgttcgttcagcttcagcatgcgatcaaacaagtcgagcgcttgggcggcttcttctcccatcggcagtgagttccaggtatcgcgatagactgggggaagacaggagtatccgggaagcgctggcttggggttttgcacatagaaccagttcgcgtgccaacctttgttcgaggttttgaatggcatggagaagtatttttggctcaaggtccccctcagttgaaatccggctcccccaactacgcatggtttgcttttgtttgcctggggcttgaggaagaagatgcagcggaataaagcgaaatgtggcctaatccccagaaaagcttcgcaagcatggatgaaattggcgatatggactatggaattggggtttaggtggtgtaggctgattccatagaaatccaaaattcctctgaagaaacttgaggtcggaagagaaaatccgccgtagaagaaatgagaaaataccacgaccacatgtgtgtcaggagttgggaatgcttcgccgtatgctggacgccacccaatgatctcctttgccggaagaacaccgtgcgccaccatctccttcaggttctcctccgttacatcggagggcgcccactgactctcaaagctctctctctctcttccaccatggatgcgatctgaatgaggtgatttggttcggggtgtggctaggaatgaatgggagattgatgcggtggttgtgtgggagattttcgtgaagttttggaggatggagtggagcgaatcggtgaaccctagtttcgccggcgcgggttcgtactgtagcagaaaatggggaaagtggcgagggtttcggcggggaagacgaaacggcgcttgatcttcagtgttgtttcattagggtattggaagtactaatgggcatgggcctaaacagtacttcagcccaattttgctatcggcgtggctaagttgtgatccttagggacttaggcatttttgcttcggcaatatttgctcacaacaatatagcctaatgctgttaaaatcctttttgacgcagttaaataattctttggaattactacgatgcaaataaaaaggtgcccaacggaaaagtgttatactaattttgcaagctttttaggctgcaaaagctgtttgggttttgttgagatgactggttttgagtagtcattttctcggcacgttatatgcttattttggtcatggcgtgagtcataacttaggctatttagactcatcgtttgtcatgctttatatcacatttgatggatctttttgagagtttttactcggattcttatcatatgtgttgatttatagacctttagagtgtttctcactcgggtctctttatatctccttttttgtgtattaaagctaaagcagtcggctggatgttttatcaaacgtcgcatatgcttagctatgtgataccttggacgattcggttgtaaaaccactcggatggatgttagttgcactttaactatgtgtttagtttttatttaactaatcacatagttgggggctacacctaattaggtgcatctagttgatgcacctgattttttctattttagcccttcacagtctttgattttagtactcgggagaccaaggcagaagaagttggagcactcggattattgttttgaattacgagagaagactatttcgtcgactgtaaaggtctcaggggctactgtagagattatggataccccatacctacacggcatgtatatccgactgggtatggggtgccatatatagatagattatctttaaagggactcgggttaaaatccaaacttgtttgtcaaggaaatacccgggatcttagtcggttatgattgtatcttatctgtaactacctattccgttagggatatgggctgtactttgtaatacggactcctcccctatataaggaggggtccgggtgcctcttggggtacgatttttctccaagatcatacgatctataatacactcggcggatcaatccccggacaggtgtagggtattacttcttgattaagaaggcctgaacctgtataaaattccttgtctctaaactcatccacttttccagcttgatagccacccccttttagtattgccgaaatcttgtttcgacacttgcggcggcgcttggagcacgctctagagctcccgtagacgaggtcacgttcccgtcgttgcagtggacgaaacaagatggagtgaaaagaggatttgctcggcatggagagaagataacggaacgtgaattagatagggatggagacggctcgttggtgatcggcggccgacgacgaaagagaggtggagagggagagttggagctctctccttgggtttcttcggctcagggtggacagtgaagtttggcgatgcgtcagggagaggagtagaggaggagctcggcattttgagggcgtctacacgtcatagccacgcgtcgcgcgcgttcggactctgaagggcggcagagcgtgctccctccctccctatgtgtctctggtcggctggaggaggtgaacacttggacagcgacccagagatgatgacaggtgggtccagggtggtgtggtctaggtgtgggtgtaagggatgggtaggattttgagtgaaaattgatttttcagttattttcaagattatttctctcccccttactttttaaatctatagtttaatttgtggacatgataaaattagaggggatttttctggaggtagatgaaggtacctagattccatttggacgcgactacaccgagaccggtatcgcgatagccctatcgcgcgacgtgcgcgcgcccatgccaaaaaaggaaacagcgttttcccgggcccccgcgtgcgccatggctcaaaaaggaaaggaaagtgcgcgcttgcgcgcgcaagcgccgtgcaacgccacacgtcgctagctggcgtgggccccagctaagacagcgcgatgcgcctctctcccccgctccaacccatcaaatccggacatcggcgacatcaatcgccacgcagttgccacagcggtaaaaatcagaaacaaatcgccatcttggaagaggggaaggaggaggagcaaatctaagaagaaaaaaatcgccatcttggaagaggggaaggaggaggagtaaatccaagaaaatatccaggtaaagtacacatgaagttcaaattctgtcttctttgagatccatccaaaaaaaaaaacaaatagaactaacctagaaacttttagatcttttctgtattcttcgagaaaagaattcatatgaatatgtgctgtaattttgtaagtaatgagctgtagtgttgttttctgtcttcctttataccccaaattcactttctagtgctgctgagaaaaaaagttattgaaaaggcatgagtactggtgtttcaaaatctcaaagcgattttaacaggaagttacttctaacaaatcagtaagttacttcctatgaacttgcaacttacttccagataaacttgaattcacaatccctagtttacacagcatgatacattccatttggttgcctctcagagcaatttgaacaaaaagttactttacttcccaaaataaacttaaatttgcattccctagttacataggcatgagtaatggtgttggaaatctcaaagcaattttaacagaagtctcagtgcatttttaacaaaaagttacttctaacacttcaatgagttacttcctacagtacactaaattacttctcactgtgtattaagtaacttctcactgtgcattaggttaattctcatagcaattttaacagagtctcagtgtatttttagcagaaagttacttgtaacaattcaatgagttacttcctagaaacatgcaaagttacttccctataaacttgaatttacatttcctagttacacattttgtaccttgtttctatatacagcatgatgcattgtaacatactagatttttcagggtaaaatttttgtgaaaatatttaaagtcaatgttcttcgttctttcgaattggagcctcccaatccttatatttcttttgttccctctaagtttccgactcccacgtaaccttgtttagtttccctctccaaaccaaatctgagatatccagagaaaattccgaaaatcatcagaagagctcgtgtttattttaagttatcccggagtcatcattcaaatattctaaaaatcagtcttaacgatttcctattcaaaaatatcctaccaaatttctatacaaaaatctctccaaaaattcaaatagatcactgtgtttcttctcggaccgagttccttgcaatccagcccatattccggatttccttttccctggtcactctctgtgttgggctgttctaccccatgtcctggcccagcctaggcagcccggctccagccgagcctctgcaggccgacgccatccagggccgctctcgcgctacacgcaagcagcctcgcgaccttcccgtgctcgcacacgcccgcccgtgccgcctcacatcagccacgcgccgatctccattagccgtcgcgcaaatcatagcgagaggctgagctcgcctcgccatcgatctccccggtcggttcctagaccttgcactcttttcctttttctccttcttcttctttccctggaagcgttaaactcgttttcatcccaaaatttcctcagccacagccaaggccagctgtgtagccgattcgtcgtcgtcgtccctctgctgctgcaccacagcaccgcaggaacacctctcatcggtgagaattctcaataacctttgtccccttctttccttgcttctatcgggttcctatcgtgctcctgtccaccaccatggctgccaccgaggtcggcatggccgacgcttcatctctatcaactaaccacaaaaatggaaccttctcatccaggaacacgttttgacgcactcacctgcccgcgttcgccaccggagctgccacttccatgcccggtgtcaccatagctcccgatctggaactcgcgttccggttagctctgttgtcttccagcccagtgtccacgtcctgtgggggtgtcagcctgtggaacacgtcatgctatcgtatccatcgccgttccctcactggagctctagagcttttctctctacctctgttactcacgtgaaaagccacgggaagaacatgaacagttccggcagcgctgtttcctattggttgaacccaaccaatcccatcaaaaccacctaaatagtgcctaaccacaataaaccagtccaaacaattccattaggatgtttttctcatgttcgagctctaaaactccaaatcaatttcagttttcacctctgtcatctatagcattaattccaaattgcaaccactactacacataccatgaatcataaccctagaataaatcttttgtcatccaaatcaagttaactcttgatttatcattttcttttgttctggctccgattcacaatatttattttatcgtttatttgtagtatttttattataggcttatttggtcgtttcttcgtgtgcgtacgttagatggtgttgaagattccaccggactcacaggaactgaagtggacctagaaggctacgctgaagcttcggaaggccaccttccacaaggcaagccacagttccaatctttgatcatattgaaacctagtagagaaccacttagttattttatataaattattttgcgtataaattatttttgaataaacttattagtttagttattacccattattacattgttattattggccaaatccatgaattgctatatcacgcccctttgataacctagtggataagaccaccaaatatctatattcatatacatagtttacccgtcgtcacgtggtggcgtgacgggtgatataaaatatgttatttgatataagtcactcgcctagagtgatatggaagattaattccgggtgacgatggatgttgtggtgtgtgagaccgtgcatgtttgtcacgccttgaagtttccccctctccttgctttaaaaattggctaaataaattgctcgaagaaattgtttaaattaacctagagctaaatccctaattaataaatgcatttaataatcaaattcggcatggtggaatttttcttgggttccacatgtcacaatatattaacaggatttttagtggaattttcaaagccttggaaataattttaaccaattaaaaatgagcaagcgcaatatttttaatccctggaaaatcctttcttcttttcctttttcttttccttcttttttctctattgggccgtcggcccactccctcccgcgctcggcctcccctttgttgggacggcccatgcgcccctccctcctctctctgggacgccgacaggtgggccccacctgtcggtcgtctcctacctccagcaaccgccgctgccgtcgaaaccgcccacgccgctgccgccgtttcccgccgttctccgcgccccactccgcccgtgccgcgcgcccacgtcgccgccccactcctccgcctttcccgcccgcgcgcacgcacgaagtgggcgggattcattttgaatcccaccccactctctctctctcctccccacgtcgccggcggtttcgaccatctccccggccatgtccgcccctccctcgcccataaaaaccctcccccgagtcccctcccttgtttcccccatttgccgtcctctcccacgccccctaccgcgcccgcgccgtcacacccgagctccgccgctgccgcccattccggccgcgcgctgccgccgcgccgtgccatcgccgccgtcgcgctcacagagcccgtccgcacctcggccgccgcttggttgccgccgaacaacgccggagcccttttctcctcgcgcgccggtgagaccttctctcctctccatctccggccagcaattcaagccgccgtggtcgccttcccttcccctaacccctctctgctctctcttagggtgccgccgctgcccgtccgcgcctcggcatcgccggtcatcaccgccgttttcttccttcgcgccggccgccgtgctcgccggtgaggaatccgctctcctccttccttccctctctcccatgagcgccgccgccctccgcgcgtgcgccgtcgtcttcggccgccgccgccgccttcgcgccggccgccgccgtctcccgcgccgccggtcaccgccggtggaccacccgcgtggtcccggtccacggtggaccggccgccttgtgccgctgacccatggggcccacgtgctgacgccccccctgatgacgtcagccctgggcatttattgcgcaataaataattaaggactttttctttattagtaaaaacacagtttatcttctaaaattcataagtaattcatccgagctccgtttaagtccattcaagtctcagtaagtcaagaaaaatgcaaagaatccattaaaaatggttttgtttcctgtttcagtagtcttatagcatgttttgcttgtgtgctttgtttgtcgcgtagaattcggccgtttcgtcgatccgcggtttctcgaagacgttgttgaggtctcatcggttcgagagcaaggcaagtcatgcaatacaattgatcatattgtacccaatttacaaatatcccgcatttctattaaatattgcattcttttacaatgtcatgtgggatgggtcctattactcagccatatattgtttaccatatgccattgataacttgggtatcaaaatgactagatgttggcttaggaaatgcttagccatgcttagttcaactagtacacaaatggggatcacattattacatagactttgtctacgagcatagctttggattggtgccaccgcaatggtgttagttaattaaaatacactgaatggtgggctgtgggtgcatggttttgctggtcgcacccatggcagttaagcaccggttcacgggaaaccctgggagacttaccgtgcttaccacaagcgggagtgggtaactgcttgatctgaagtatagctcgaccctttcctaggcaccggtggcgagggtgggcgtgatggagttgggtcggccggggtgtccggttgtccagctgccggattcatcgcggcgcaagaggggaccgcccactgccttttgaggggtgggggtgaaaccttagcgtggtgtggatggttaggggagggatatgtggagggtcttatcacgatttccccctttgcagtatcatgatgatacttcggggtatggcgacatgtgtggaatcgtgtcttgtgggtacagttgtacacctttggccagagtaaaactattcgaatagccgtgcccgcggttatgggcgatcaaccagattcaccgtgattagtctcaccccgagtttagtttaatgaactggtgtagttcaggtggttggttgggcctgttgcaacgtggtgtagcgttagacagtaattggttaatactgcttaattactactactgttttactgctttcaactactgctttgaaatgcctgctttatgcacaagaacctttagcctcctttggttatatcctgcatcatacctcctcttccggtatgacttgctgagtacagtgggtagtactcagtcttgctttcttttcccccacaccagagctgaagatcttcctagtgggagctgtcctgttggagttggtttcgtcgctgccgtcaaggtttgcctgtggagtggagtcgccccgctactgaagtcaagtttccaagtctagctcgttttatcttttttgctgcattttgtaatcttttctatttttgtaaaacgtggatctgtaggtcaacaattgtcgtttgtgtaccctggctggtcctggatagggatttaatgcacattcagcttagaaattctggttcgtgaatttctgggcgtgacaatgttgttataattattttgtggaaagtgtatatttacacttgaagtatgcacgggcctgtgctagttttggtggttttccccggatataaggactacccctatgccatggaaaatgatgtaatttgcgcccatccacaggactgagtaatcaaacttagcctagtacattgtctcactatatgaaagactgtagggtggctctatgagcaggtttggggtggacatgtggaaggggctttggccaggttgacatgatccacaacggtggaacctgtaggatcgtacaagaccaaacgaacctaccagagggggggatgaatggtagcgaaaatcaaaaacccaaaatcttttgcggaattaaagattaccctcgaacgaagtcgatgacgaagtccagtcgccgccggttgaaccgccctcctgccgccggtcagaccgccaacacctcgctggtcagatcgcttgaacacctacggtcagaccgccgctatcccactagtcagaccgcgcacacccctccggttagaccgtcgggacccagaaacaccggtagatgacaaactcgaagatgtagattgaaacttttcgactttattgcatcaactagtgtttacaaagtgcaccaacagcactcctcaccaaaatctcgaactaaacttgaaaccctaactttctctcaacttgtgtctctctaaaaccgatcccaggaggccacccctccctctctatttatacccaaaacctcctactcaaagtaggaagtaggagaacaactcctagtcacactaggactcaatcctccaaactctcgaactgcagccgcaggaaaccaatccgacgtcaatacaccaccatctccgtatggcacccggtctcgatctcctgcgcacatcccaggccagctcgctcctgctgcttcctcccaggccgagctgcctgctgctgcttcacccaagcagcacacacatgcatgcaacgacatgcatatgcaccacacacatatatgctgctactgctcaccacagtacgcaaacacatatgcatactacagtaacccaaagcactgtagcaccatatactcctctccagtttcttccaatctccttcgcgaacaccgatgcttgcacgcacacctcgtgaagcccgttgcgaagatctctcctcatacgatgtccatccaccgtatgccatctcgtatccaacttcgtcaaccggtatccttgaccgtctggacctcaactcctctctgagtctagtcccgatcctcaccgttgaccgaagttgacctcaaagaatcctgactctagtcaccttctcacatggtatcccgaccgcactagacctctgtttctccctgaacatagtcccggtcctcaccattgatcaaggctgacctcaagtcacctgcacataatcagacaaaacaaccgtttctgggcacagatatcacaacctgtcccacattagtcacacgcactcacaccaacattcacacatattttcaaaccaattcaacgattaaatcatttgcatagccaattgttcatcacaaatattacagaacccgtgaaagcagcgaccgtctagccttgcttaggcccagcaagtgcccgactgctaggacggatcaatatcctactgagcagtaactagtagtaagtgggactctcgaacgactatgttgtcctcagcctagctagttgttgacatcaggtgggtaaagctgggcagtctctgcagagatgagtcttaaatcattcgaatgtgtcgtgcttccggttaagaagctatgtcattgggtgattcctatttatcatggtatgagtagattttaaattcaaatatggaatatgatgaagatgaggatgaatggtgattaatattgctaccgttttaaaatgatgatttacaattgtttgcgaataaaatatttgataaagtagggaaaaactatttataataggcttgttatgaaacctccttgatgaactatattctttgtacgccttgcatatattctatttgtattattatggatgtggcttgctgggtacctcggtactcacctcttgcataaaatgtggttcagatgatcagttcttccctgaggaggcgcaggaaggggaataattctatggtgctgacgagttcttgttctaggtcgatctgctctcaggcgttgcctgtggtgtttttatcctattttgtgtttgggtcttttgtttgtagggagtgtgtttggcctgtcggcccctaaaacctgtcttagttatcttttatataataatttctgtaaaaacttgggtatacgtatcgaaagctgttctgtatatcaatctatgcacgatcgaaatcctggacagtcgcgggtggttttgggataccatactcaaaccgggtatcccgacatgcatcccctatttgcgtctcaatttcatcttgtactgcataaaaacaaattgtgaaaaaaaatcattagtgaaagggtcaattaggcctagagggggggtgaataggctaatttaaaacttaagaaatgcggaagcagtaattttcggagctaggctaggaattttcggaacttccgagatgattttcggaacttccgaaaatgcacagagcagcgcacacaaaaaatgaaaactctagatctacaagactataacaggaaatacaaggcacaatcagcaactagaccaatagcggcacaagcaagcaaagctagaggagagggatgaagaaatttcaccaagatgtagctcccaaagttgttccccggagttcaaatccttgaggggattctactctccgttgaggagctcactaagagccgggtcttagctaaccctttcctcaagaggttgcactaagcacttctcctttcactaagaggtatctcttctcttgcggaggcgagatccggccttcacaaacttctcccggccaaccacaagtagatcgatggctcgggagtgacacctagccgtctaggagtcctcaacctccaagagtaaaagatgatgcaaagaactcccggagatgatgcaagtgctcacaaatcttcacaaagaccacaagaagcacccacacaagctcaaatccacactctcacacacacaccaaatccaaatcaaacacgggtggagagatgaatcgaggaagcaaggctcaaatgaatgagagagagagagagagagcaagccaagggcacaaataattggaatggaaccagcagccctcacaagatctgcccgttggagtgcaataaaagggattttcggaacttccgaaacaattttcggaacttccgaaaattccagatctgagaaaaatcgaagtcaacgcccattttcggaacttccgaaaatacttccgaaagtacttccgaaaatttccagaacgcttctgtgtattttcgaaacttccaaaaatcattttcggaacttctgaaaatttccagaaagctctcaaacggttctgtgtattttcggaacttccgaaaatgatttttggaacttccgaaaatttccagaacgctcaaacacggttctgtgtattttcggaacttccgaaaactattttcgaaacttctgaaaatttctagaacactcaaacacaattctgtgtattttcggaacttccgaaaactattttcggaacttccgaaaactattttcggaccttccaaaaatttccagaacactccaaaagagaaatgcttcgaagaaaaattgattttgagcacacgcatcactccttatatgtctatgcatcatcccccttaatagtacggctttcctacgacacaatgcgaggaaaaagatacaatataccatttgatcattgccgcattgcatcgcgatgtcgcattcacgggatatgcattgtattacaacatgttgaggacttaacaaccttcacatttgcttgaataaaaatgttagtcctctctaatcgcattgtaatcaatcatcaaaatcattaggggcctagatgcactttcaattagtatagccactggtctaatttgacaaaattgcttcctagaaagcatctaaaaaagacagaaatgtttgtataggttatttaattacatcgagtccagttataagagttgctatcctgttgcatgtaacttacttccaaactgtactggcttacttcaaaacatataaatgttactccctctaaaacatgcaagtaattttctataccacagatgtaattgtctgacaaaattactcctctgaaaaaaataaaagctttactttcatgtgatgtgcaagttacttctccccccaattactgaattacctcaatgaatgctctgtataaacttactaatagtctgaaacacatgcagcaaaaatggattttgacctcaacagtatcccggaattagtttctggtgaaaatgaacatccactacatcatttactaattgatgatgaagacagaagtgaaacataattccctgtaaatccaactgacactagcatggagattcctactataaatttggacaacacttttgactttgaaactatgtatactgctgatgatgctggaagtttacgagcacacaatgtagccaatgatgagatgcaagtatttgcaaccaatgatcagatgcaagtatttgaagccaatgatgagatgcaggtatttgcaaccaatgatcagatgcaagtatttgaagccaatgatgagatgcaactatttgaagaaatgtcagatcatgcagacacaatgcatactagtgttgcaactggcgcaacaactgctactgccaacacaatttcaagtgaacactctggcacagatgattcagaagcacagtcagcgccatcacaggattttttgtgcagcacacaagtgccatacctcaccttgactttcaac

SEQ ID NO: 6345 - DNA, 24609 bp, Oryza sativa
ccccccccccgcccgtgctgcgcacgtgctcgcgctgacgacgcgcgcccgaccgcgtggggcccacgcgtcaggccgccgtcgccttcttcctccagccgccgcccggcttccctctctcccgtgaaccctactccttccctccctcaaatccgtgtgattcgctcatgggattccaaaattaaataggggaaattaatccccattgaatcctcttcaatcccccccaatttcccccttgaatggcgcccccaatcgccgggaacgcccgcgtcttcctcggccgccctccattgccgccggccgtggttcccgccgccgttcccgctcctcccgtggccggctctctcccccatcctataaaatgggatcctcatcccccgttatctcgttttagccccatcccgagcctccccgtggtccctagctctctccccgccgccctcctctctctcccacgctgccggccgcctccagccgcctgtgccgcctcgaccgtgcgccggccggccgcgccgtcgcctcctccagcgtcgccgctaccccctccaccccggcctgccctccgtttcccgcggagacccccggagctacgtttccgccgtcgcccttccctttcctccgcaccggccgcctccagccgcctctatctccctgcctgagcgccggtcaacgtcgccaccacctccctcggctccgcgacgccgccctcatccccggcatcacctcctcctcgcccgaagctcgccggagtggcctcctcgccggcgtccagtggcgtcgccaccacttctccgtctccggccggctgctgttcgtcgccggtacgccgaccgacgtcgccgtctcctccgttgacgtcgcagcgtcgccctccaccccggcctgccctcggtttcaccggaacgtcgccgcgaacatctccgtccgcctcgccggagttgtttggccgcccgtccctcctcgcccgtgcaccggtcggccacacctccaccacctccggcatcgcagcggcaaggtcgtcctcggcatcgtttcccctccatccaaacccctccgcggtccatcatcgtcgtctccgatcgttctcgtcgtcgacgtcccatcggtcgcccggctcgtcgtctcgcggcgccgcctccgtcgtcggcaccgcagcggcgtggtcctcgccgtcctcgtccccgtgcagccgctgccggctgtcctcgtcgcctcctcgccggtcccggtcgtcgtcgtcgtcgtcgtcctctcgtcgttcccggtcgtcgtggcgttcgtccctccgtcgagccgttctcgtccgtcgtccgcgttcgtcaagcgagccgccgcagccccatcatcgtcttcgtcctcggctccgcgtcgtcaagtctcgtgccggccgtgtctcgccttcgttcaaggatcgccgccgaagtcgttccctcgccgtccgtctccgccgcgccgttcgtcgttgtcgttcccacgcctcgtcgcgtggtggtaaggttctctctccctcgctgccccgtccctgtcctttcggtgtcgcccgtgcccgttgtgcggttgtcggccccggtacccgtgtatcggtgtcggcagtcgttcgcttgtgcgtgtggtgaccgtgttagtgtgtccgctcggtagccgcgtggtttccacgtgtgcaacccgtgtggtgtctagtggagtccgtttgtcggccactcgcctcggttgacacacggggtccgcttccgtcgacccgtggaccgtctctgtgtacccggtctaccgcggtcctttaggttgacatgtggggtcctcatgtcaacggcgcagccttcctgtcttttccaggctagcgcttacacatgttttatagttgcaaagcttaattataataatccgcaaatctccatataacagcattaaacttcggatgatcatatcttggtcatacgaactctgaatcgacccgttcaagtctcctaatgtttgttataacctaaagaaccctgtgctttctttttatgtattgttattgcttctttataggcttgtagctttgcttgtgtgcttcgcgtagctttcgtcgttccggaggttcccgaagcgtggtttgcggtcgtcgccgaaggttcggaaggccgttctctctgagcaaggcaagtcccatcatccttgaacatattgaatcccagtttataaaattatgttgctttaaattattgcattatcgctttatttaaattcccgcgtgatcactgttttatttagccatgcctatttacctttgttatgaccttaatattattgttattgatattattaccttgttcaccctaggaaaataaaaccccaactagtgggtactctatttatggttccactagtatgaatttaggtagatgcttcgctgattaattaggtaacattaggtggttttataactttagactttgggaattctcatatcatttggacactatggaattgttggtttatggtggaattggacatacacctctcttcctctttcaaaacccctaaaacctgttttcggtggggtttgggtgcatgccagttgtgggaagtagcaccccggccactataaggattaagctcgggcctctgttgcaaagcactaccgtacttccacatgtctagtgggtaaggcttagtttgtggctcagtctggttataaacaaaagtacacggattggagatggatgaagtcgggggtcgatggacattctccagggcaaatgaaggctacacgagctgcggcccggtagtcgagatgtcatggcagagggttggtgccctgctgctaggggctcagtcctgcctgcctgtcccggaggttccggccgcaggtgggattgggtcggtactcttgtctatggctaggatgggttggaaactatgtcacgtcttccgtccgtataccgtggtggtatgtggcacgtggttacacgtgaggaagatgtgtcttgtgggtaaagatgtacacctctgatcagagtataatctattcgaatagccgcgccctcggttatgggcaagccgagcaatgtacccaagtcagtgttttaattcttaaaatttgctcaacaactaaaatgtggaatggttggcctgggttggcttgggacgagctgggacccagggtcgggttgccagttcggtctgaatcatcgtaggccttgggttaaggcaggttcgtgagggttcacggccttgtttaataatactgtgtagctctaggatcgtctttataaaatggctttgggcaactaagtgacttgtaaatgctgtttactgcaaaacttaacccctatattattaccccttgtacccccttgcattaattattcatctccggtgtggcttgctgagtactgtggttgtactcattcttgctctatctttctcccccccttcagtaagagaagctttggagaagaagtcttaggtggagtcttggcttataccccagttgagcgcctgtgaagatggagccgtaggcccgctagtccgctgctgtttatttttgattgccaggcctgaagcgcctttgtaataatgtaaatattatcgatataataaagatgtgcctgttatatcatgtttgtgtggtgtaccccggcttttcctgggacggggattaatacactagcgttcgggaaaaggcaattttcccggtcgtgacaacaatggcggtggtgatggtgaggatgatgaggcaagtgatgatgggagtcctctcgatcccaccatccaatttatgctaactttgaggaatgctcagcaatacactatcctccgacatcatgatcaattccggaggcctaatgattgtaatgatccaaggttccatacacggttccaaaagtccgtgtatgagcaagtgtatgccaacaaagccttcgccgaacacaagtggatttcttggaggcacattggtgagacaccggagtttgtggatttgcaagagatgttctgacccgttgggattgatacgattgtcaccatgaagcaacattttgatgaagatctcatatctaataggttaaggtgtgttgggccatattttgtatgggtatgggctattactctatattgtgtgttctttatcgttttgttgaactctatgtcatttggacccttcatggtcttgtaatagcctatgtttatttgtgagcccttttaggatgatgtgtgacttatgtgagttgaatggttaagtgatgtgaacttgtgcgatgatggatggtatatgtgatattgatatatatgtgaccatcttatgctcatgaatgaatatttcttgaagttcatattgagatattgctcttgtgtttgtgatatgttgaaatgtgaaattgaaattggctccatatttgctattgttgttatgcatatgtttagggggagcttttgcttgtcattgcaatatatctccatgtgctctgtgtttaattatatatatttgtggtgtttgtcatcaattaccaaaaagggggagattgaagcatctaggcccacggtattaattttggtaattaatgacaagcactaattgtggactaaccattgtgtttgagctatttgtttgagttaggttcacttaattgtgtgcacatggatgatcattgatggattaaaattgacggcgcaaagcaaaaggaagagaagatggtagactagtgttttcattttaaatttatcgaggcgttgggcgatcaaaattgtgctagtttattaatagctttgtcgtactattaagaggggtaatgacctagcaaagagatgattttaattgccacattaggtcattatgcatttagacttgtgctttcatttcatcacacacacacaatcatttatctcactgttttcggcctgaccagggccggtctgaccgcggcccaagtgccggtctgaccggccagggcagccggtctgaccgcagggtctaggccggtctgaccggcgggtgcgggccggtctgaccgaccagccatatggccgggatggtgccgtctcggtgtgctgatcccgagccgccggagccatattcggtcagaccgagctgatggcggtctgaccaagccgaggccggtctgaccggccaccccatgtcggtctgaccggctacggctgtggggcccaatgacagccgttgtagagtagcacagtttgaccggccacatacctccggtcaaaccggcagagcacagagttgggggatttcgcccccaacggctagttttggttggtgggagtataaataccccccctccagcagcaaggggactctcttggcacccaattcaattgcatacaccccttgcacctctctcacacccacttgagttttgtgttcatacatctagtgtgttagagggttaattagccaagagtcaagtgcattgcttccatttgtagagctagtgtggcacttgattgatcatctccacgcagggtcattgcttgttattcttggaggttgccgcctcctagacggcttgtggaggagttgcccggtgatctctccgagaagattgtggaggaggtccggtgccggttgtgagtggtttggagttcaccaccttcggagtgaaggaagaactaccctagtgatcgaggcttgggtagtcctctccatgggccggctcccgccttgcccaccccttgacaaagggggcgtgcggtggcttcgtggttgagcggcggagttgggctcgcttcaacggggagtaggaaaccggcaagtttccgaacctcggtgaaaaatctctgtctccttgtctcatttgattgtcacatttacatttgtacaatttatatttttagagacattcttgagatcatatcaccctaggattgctaaacattgacataggagtgtgatttactttcctagagatataattgagccactgtcaccctaggtttgcaaaacataacttagttacttagttagagttgaccctcaccaagcctagcaacttatgttagttttgattaggtgtcatttagttttaaatcgcctattcacccccccccctccccctctagtcgacatctcgatcctacaggtgtgtgtgtgagagtgtggattcgagtttgtgtgggtgcttcttgtggtcttcgtaaagatttgtgagcacttgcatcatctccaggagttccttgcatcatcttttactcttggaggttgaggactcctagacggctaggtgttgctcccgagccactgatctacgtgtggttggccgggagaagtttgtgaatgccagatctcgcctccgcaaggaaagagatacctcttagtggaaggaggggtgcttagtgcaacctcttgaggaaagggttagctaagacccggctcttagtgagctcttcaatagagagtagaatccccttaaggatttgaactccgggaacaactttgtgagcttcatcttggtgatatttcttcatccctctcctctagctttgcttgcttgtgccgctattgatctagagttatcctcttttgttcgactgctctgagtattttcggaagttccaaaaattcttgcttagttccgaaaattcttgcttccgctttacttaagtttttaaattagcctattcactccccttctagggctaattgaccctttcaaaaatgttctctgttgtttagtgcagatgtcccggatgagctacgggagaatataagacaggctttgcaggttgaatcaactgtttttgagacgaaatatctgggattacctactctggagggtaggatgaaggctggaaagttcaaaactttgaagcaacgttttgctaagaggctcactgactggtctgaaaaatatatgtcgtctggggctaaagagattctaatcaaatcagtcgcacaggctatcccgacatatgttatgggagtatttaaattgcctgctactgtgtgtgatgaatatacaaaatgataagagacttttggtggggagatgacgaaaacaaaaggaagattcactggacagcctgggagaacctgatcttaccaaaatatatggggggattaggttttcgggacttacaactgttcaatcaggctttactaagaaggcaagcttggcgtcttattcagtatcctgacagtctttgagcgagaattctaaaggccaaatattatccgaactgtgatctcattgatgctgttttcccatcggatacctcacctacatggaaagctgttgaacatggccttgagttacttaagaaaggcttaatttggagaatcggagatggaatttggaaggaccagtggattcctagagaatccagctttggactatcacgccagagtgggagatgccgcctcaggtgggtttatcaactgatcaatcaggagacaaacacctggaatacaaatctcatccatcatgtttgctcccagtatgatgccaatgaaaattttgaagattaaattgccgcaagtcagaacagaggatttgctagcttggcactatgagaagacaggatttttctcagtccacagtgcttaccgactagccttgacaaatcatatgaatatatctgagttgggttcttctagctccgagacaagcggagaacgaaaaatttgggcaagcatatggactacactagtgccgcaaaagattaaaatctttgctaggagattagccagggaaggtcttactacaatggttaatcggaagaagcgcaagttggaggtgaatgcaacttgccgtatatgtggatatgaagatgaagactgctttcatgctgccatctcctgtacccgagctgttgccctgagatcactgttacgggaggtatgggagatgccaaaggagagttgtctgatcaggagtggaccggattggctcttaatcattcttgattccatcaatccggagggccgggcaaagttcctcctgcttctctggagatcatggtttctccggaatgattgtgtgcatggctatgggaaagcatcagtgcagggaagctcaattttccttcagagctaatgggagtccttaacaatgaccaggattggtgggaagttagatgagaaaggaaaaggtcccttattctgcaacagagtgttctgaaggagaactgtaaccaaacccctgccattaatgatagatggactccaccaccgacgggctagacaaaggctaatgtggacggttcgttcgtccagagttcaggctgcgcgacctgcggggattgtcatccgtgatagcactggttcggttctgcttaccccatggagggtcattaatcactgtagctcggctgaggaagcggaaacgattgcgtcttgggagggtgtaaacctgtcagctgaatgggtgaaacaacctttgatccttgaaacagactgtgcaaatttggtatgtttgctgaagaaccagggaactgatagatcgaagctgtgccatacacttcatagcataaagtctttgttggctgttttaccggattttagaatccagaagactaggagagaatgcaatagcgtagctcataatctggccaagttagctatgcgaacaaatcactcagcagtttggcgcttgcaggccccttcatgtattcttgaggcactcgctaatgactgtaattatatcaatgagtgatcaataaagcattctttcccccaaaagaaagcatgagaaaaactgtacagtgtttatggaatatttacaaaaaggggaaaagcgtgagtcctaaggtactatgctacaaagaccctttgctcctgccaaggtccaagtttttgcctcctctttgatcttggcgactagatttgttgccgatagctttttgagttcgaacaccgattgatttcaccatttccatagtttctaagaagtcagaaggataaggctacgcaagccttttttttggtacctacggggtgaaagccaggttcgaccatcactcgtggatcgtcacagggttcctccaatttgttggttcgatttgatcgtaagaaatcaaactccaaaccttctggtgtatccacattccgccatgaggtgtaggcctgtctccatggtatgccggcaaagaggccagcgggcagtaggcattattttgccatccacgtgttgcgagtcggtctgatgtccatactctatttttgtacgattagctatgcaaagaacttattttctcagtgcctagggcttccatatgatcgtggtgtagtttgtactagtagatccaaggaattgccttaggctagaccatgtatcatacacgtgtacccaaaaagaccaaacctatataattagagatttgctaggaaggtaactgaccagacctatatataattagagattcgctagaaagataactgacgataaaattcgatccggtcacatgtggagcgtacagacgcgcggtgaaataaaaggacatctccgcttagttacttttctgtttttatacatatatttttagatatacgtttcgtaggtttttatcggagaatacatttaggagttaagacaatcaaaatatttttaaacagtccttagacttaccaccaaatgctaactaagtcttcgggttgatgccatgcattttagttacgataccccaaaatttatatatatataataattaattatcacgaaattaaatatttagtaaatattgtacaaattatgaaaatagtaaaaaaaatatcactgctgatttactggttatttaatttccggataattaattattataaataaaataatgggtacaattatttcacaaccaaactcaagaaaactttgatggactggtggggtatataagaaatcggaaatcatagcaaacacaaaccattgaaaacatattggaatcattctaatttaacaaaaatgagatgcgccaaaatgaacactcactcggttatacaacacatttgagacgttggacagaattgtgaaagcatgatatcttcaaggtcagcaagcccgaaacatacacgtctgaaatgatgaggaagccaacctatatcactttattatttaagatgttaccttacaaccgcaatgataactagtataaattagtgttttgccggtatttagtcatcagattcaccccctctataaattgcacaaaagaaaaaaagaaaaaaacttaagagggcaaaaaattacataattacatttacatggaccagaacatcttccaagatgtatccgtgctaaacgtgagcctgatattaaaaaaaaaagaatagcaagaaagtcactaatatataaactacagtaagcctaaacgcaacaaaacctactcccagagcttttcttgatcggttcccacttatttgactgttgcttgaagacatcccctcaactatctccttggccagctctgtttaaaatgcttttttctaggtataccttcagctttcacgcaagacatccacgaatttttcagtcagctagcaaaagaattagtttcgtcatctgagactgctgggccgctcatatacttcaatagaactccaggccacaggtgggcagcaaagcaaggtagaataacatgctttccaccacagcttgacttagttgaagaaatatggggatcccaggacatccgtgagatcaaaatctcccctctctggcaatggaggaaattttaattcagggaaagatttctcaaagctctccaacaactgcaccaaaaaaatactgtcagttatgcaacctgtcacttcaacactcactatcacacaaagaataacacagaaaaaccagcaaatgccaacacggtaaacatgcaaatcatgcactgcaaagaaaaactgtattaatactgatatttctaggatattatgaaagagaacacttatctcagactatctttcagctaccctacatagcaaataaatggaaatgcttaacactcaacaactttagaagcatgggaagacaagggaaacacacatttattattctcaattgcaccattagacaaatatttcacactgaaaaaatgctttctgaggagagatacaagcagaaacaaattaatttacccaatactctcacctggtaacatgcttagcaacaaactaacgcaattgttattagaggcattctcttcctctcttttattagttatttaaactatagtaactatctattgggaatgccctaattatgctaggaggtgcacataactcacatatttcgatggtctcattctcatattaatccatatatttgttggggaacttgaaaaataatccaagcaaaattacttaaggagcaagaaaagtatgccagaaaaaaaaatctgatttttcttaagtgatattctgaacaagatagaatggttgttaaatatctgtgataataaccgggataagaaaatacacacattttcgaggataggcgtatcatagagttccacaaacttctctcgtagtattttgttcattgtatcaacatcacaagcatgtgtccaatacgaatcatgcactcctgcattgattttaaaaaaatgttgcgactaatgtacttctccttaagcgcttaatgcaagggataatataaacacttcccagaacacagtaaaactggtacctgcaaaatttagtccttgccttttgcaagcaacagcggtcatcatcatatgagaaccgtcaagggagtgcacgaaatttggaggaaaagcagtcctctgccgcttcaccataacctggttgagtgaattttagtgtaaagtatcaagtattctaaagatctattagattccaagatacaacagcaagtgatgaggaaaataatccatttgcgtccacagttcaataacccattttctgcacaattaccacagggattgcacaggcagtgaactgatcagtaagcaaatgagcaaaacatggcatcagtctttgcagattgtacatagtgctgatgttgaatgatgattggagtaccacagttgatgcgatgagctaataaattgcagttgccggcctcagcttgtttaagcagatgtgcaaaatataaaaatataatggctgttcaccttgatttggtaatgtcaaaagttcaaaccagacacttaacaagagcatacttgtggactcaaaagcttgttttctcataacacatgtgctaaacaaaactaagttctaagcgggaaatctgaaaaaaggcactagcacccggtagtcagtgactggtggaatgtttttataaaaaataaaatagaaaccaagtgaggtgtttactttgaggaaaggatatgggttaatcctagttcatccgatcttaacatatgtccacgatgaatgaaatatcaggaataaagccgtgacacaattcattagatgacccattgatgggaaatctggtccattccttaatcaaaaagtgcactacactactacatgtcatcatcacacacacttcgaccagcaaccagctgatagcgatattgtcagaatgtggaatatagtccaaattgataataccttatctgtttcacgttgaagagtcaggacttgtaatgatgttttaatctgcaaagagaacatcaagaatgccactttaatatcagaacaacagaaggcacatgttgccttattacatcatgtctgaggcatattgcaagttggcaacaataaaataaatacttataacacttacaagatgcctcccaagcttgcgatatggttgaacaactgggagtccaagaggggttgtccatctcacaggttcattttcacaagcaattacctgtcataaagaacaggtgaggtaattcacaacttgcgtctttcctaaattgcaataccaattaaagaggtaggatgccactgtagaaaagtgacatagacatggattttgttgatgcaaaaattgatatagacatgaattttattgctgcaaaatgtatttacagcatcaaattggtataatgcagctgtcttaggataactatcgtaccttggcacagtcaccaagccagttcataatgctgcgggcagcttggaacatctcaccaagtgctgtcagagtaacctatcaagcatcaaaaataaataaataaataaatattatatggtcaatttaattacacttatgtaggataatgaaataaaacagttccactgaataagacattcgaccttagcagcatagcatgatgcactaaaaagttctgaatcatcacaaatcatgtctctctcctttaatcttctttttatttgctcacgtgctccaacataagtgacaccatacacagatgtcatcacagtttgctttaccaatttcctgtcaacctgcaattgataatcaagcaggtaaaagattaaagggtaaactctaatccatggacctctcaacagcaaggttatgtatcaaccgaacagcatcaagcaccaaaacacccttctatcactatttcataggcagcaaacttttacataaacagatcaattaagtgaaagaaaagaatcccgaagtaatttcttctttcattccctgagcactgatttaacaaatttccaaaatggctaataagacaactcactgtgaaccattttgggcaaaattggatgatgaatcggtacttatcattcaaaaatatgaaataaagtgttgtttaggaacctaattagccatttttaacatatagttatcgtaaatagcattagagaatttaatagattgtagcaaaacatcagatggcgattttcttgaggactaatgttttcaggcctatattcatctgaaaaccaaatctcttcgattttgagaacatccatcctgctagtcatgtgagcaaatacaacaggaactaaaaaatatatgaagaactacctgatcaagtagcagacgtgcgcgtgctgcatcaggatctgtagcaggatcttttagcgcatcgttcttcataatttccaccaccctagcacaagtacagaaactatgaaccactcgccatcttaattctaagatatggcatcagttgcatcaagattgataaactagacctgatgatcctcaaatctagatttaatcaatttttaggcactagtttaaaatgactaagaaggacctcaactaaatatcaattttgattgtgtatgatactgtacattagaatattggcctattccagtgaccttgttacagataaataatagtgagcatgaattgtatcagtgagtacattttctaatcaaggattaaaacttatatccaatattgtacatcatgataacaaaccaaattctcatgcatctctatgatctggtaggacccaatttggttatatagttctaaaaattagaataatactggaatacttgcttactcaatgggaagtgttgtaacctgcagaaacaaaattctttctgctaagccatggattaaaataacacactacatctttgaactaatctagaattagcttgtaatattgcattcacgcaataatttggaattcaccaaaaatgaggaattcagtgtgcatgatgcacagaatgcaaataggtacgggtacagcatatgctatgggtctgtttggttgcctggtcaggattggcttgcatgagcggatgtaaaactggactgtttggttgcctgatctatgctcccagccaggcccatctcatgtaaacggctcaccaagccaaggcctgatggaaacattctctctcctctaggctccactcacctccccttcctcatttgcgttcatctttctctttccccctctcctcggtcatcctgattgagcttgccaatcgactgccgaaaaccagggaatctcagcaccagtcaccacagaagcgattcccggttcttccactccagatccatgttgtcactaccgcacatgtgctcccgtcaacagtatcatctgtgcatgtgctcttgtacttgaggcaaacctagtaatctggggataggaagagaggcagagcttgatgtctacgtcagaagtgtgctatttggatctgctcatggtggaaactggtatcaaggaggcagtgcatgcctccttgcgttcctttctggttttcccctcttgtgatttttttcgctctagcgtttgatttatcatgtacctagtctgggcggagtaaagttgctaatggtcaattctcctagctttttgggtttatttgagatcaatcttggctagatctgttaattatgcataatggttggaatttgacattaaaaactactccctccgtttcataatgtaagactttctagcattgctcatattcatatagatgttaatgaatctagacacatatatatgtctagattcattaacatctatatgaatgtgggcaatactagaaagacttacattatgaaacggaggaagtaagtgattgaaatttttgcaccgaagctaagaactgcatggatctagcaattggtggcatatttgtttgattcctcttggatttatctcatgtaccaatttgatttgttacttcaattaaccatactatgtcttgtagttactactgcttgctgtgtatctgatattttttttcttttttgaatccaagcaagctggtggtgatatgcagctggagaaggttgccacaatcatgttttttcctacaagaactactgctacaaaggctatccaacactagatggctaataaaatgtgtgtgtactatgtagttagtgctaatgagccagtcaaaactcaaaagtattctcaagacatgtaaatgtgggaccaagaaccagtggcaggtatatcatcattgtctttcttctgtgtattcagacccataacaattaattagtacaggtaactacaggtgttaatatattgttaacgaatatacaatagctaattcccatgagcaaagtgggtaatctcaccacccaagtgacaaggcaaccaaattcaatgttcatgcaaccaaccaaccaatcaaaattttatgcatgcaaaaatctgaccaccctcctttcctagccaaccaaacatctcaaatcttaatcaaggcccaaaggatacaggcaaccaaacaagccattttttatctgcgaagccaggccaaggctagccaggatgagacatgtgaaccaggctgggaaaatgcagacaaccaaacatgcccagtatgttgcaatggagcattgcatcctaccataaacaaggtgcaatgctaaacacaatgccatccaaacatacctggtagctattccagtataaacatctgcaggcttctccccggcaactaagttcacagcaatggctcccaactacatgaaattgataagaaaatcattaactctactagccaaaaaaaaaatgatgatgatgatccatgcctgactaaataatccttatgaaaacaccaaaactattcaaacacaaactgaccttatcccttccaagagcagcatagtgctgcaggccattacaagaaccatcctgaaaaaggaaaatgttattgtagttatgattaaacatggaagtgaatcttagcgaaaatcaaaactgtgttgcgagtagactgcatttagaaggattaaaacataaacaaatttaacaacacactagattttgctattctgtctaggaaattagtggtggaaaacagaatccagtgtgaggctggcaagtgagccatgtgcgagttttcactatcacatgaatgttattctccctctccaactggaaaaaaatatataatttactcaacaaactaaaaaagaaggaagcaatgttagacatcatttttaagtctgtttatcacgttgagtcaagtcagtataagaccaattcagcgaagtgagcaactagtcaaccaactacttgtggttcgaaagcagatatggaatgcctacaatatgcatgagatatgttagactgcatcagttacctacctagtcgaccaaccaattatgattaggaaataacttgcaacaatgattcaagtattggaaagttataactcacaacaaactctattaatacaaatagatgataacaactgagatgaaccataggaaatgggcgtgcagtgccatatgaaaaatgtatcagtagcaaaaaaaccatatttatgagaacaagagccccatcaaatgatcactacatagctatattgcataaataaggaatttaccaattgatcattgctctctaaagcaaatgagagaaagttaaggtacctgatgcacaggaatatgtgagatcatcgtttctggtgaggggcttcttaaagcttcagtgagatttatgcacactgcaaggcattggaatggatcctcagctccaagccaccatcgtttgccttcaagaggtctatcagctgagtcaaatatgtcctccaagtgattctccgtgaatgcaattcggccatcatacgataacttgtcaacaccaccagcatataaatttgctagatgtatctttagccagcgcaagcctgatttaccaagcggacgaccttctgcaaactccaaaactccacggcaaagatctgaacccaagtggttcaggtaaggatgcattggataagcacggcctctaaaatcaaggttgtgtggatagtagaaaccatcttcatccttcattttgcgagctacctgttaccaacatgagtattcattagatgaagcaatgaagtgagtaaatgatggttacccgttatagtctcttacggcaagttttagttctacatcacatctctgggagtgcctttcactattttccttcttggctgctctcaaggtccatctccatttcttcaacttgtcttcatcttctgtgtcaggcttctctggtaaagcaacctagagtacatgaaactttttagttgatatctaaaactaaagtatcttgataaaaccaccaccattgaatctgagtcacatgctcacagcattattatgagaataaatgacaactcacatcagtgcgatcgaccaagtcagcaagccggccaccacttgaccatattctgtcgacaatactaagaactcttttgttaaccctccacttggtgctcccaagagtatttaaggcctgtgaccaataatgcattaaatggttgaaccacaaaagctcctcttggcatttaggtggattatgatagatctcatttggtgcagctgttttagaggttttggtgtttaaaaattgcttttcttttaatcaaagctgcaaatgataatattattgtgttccgaaaaacagaactagggttcctgggaggagctggaggtgcgtccctgggggtggagaacgttgccgacagggtgcagaggccgagctggggaggaggctggcattgggtgcggtcaggggtggaacagtgggtggaggcgagcattgccagggtgagaaggtgggtggtgtcaatggcagttgcaaacagaggcgaacagccaatcatagtcatgagatgcagaggcaagcagaagcgagcagcatgtggaatgtatcgtggggatggggatttgggtgggggggagggggggttgtatttagggttatgacccagacacccagtacacttatggcaattcatgttaacagagtggatatgtagagtatagagaattttctcttcataaaaaggcatcaacatgtcaatgtccaagagcatatgaacaatagaagcaactgtaacataacaacaggtgtgctcaaatatcttatgattgtatcttaaaaattattaatataatttgcataaaaattatgagcaagttaaatgaatacctcaaacacagattgcatttgttcccttggagctcttctgacagcatctctctgttgtctagctccatgggtgcgcatcacataggatggtaaaaataaatgtgcacccttgtcatacctatagaatatttgcatgatgtcaatagagagcagtctgcttcatattcagagtgtcaatgcaacaatggcctcaccaaacagcaccaacttgcactgaactaatcagataggactagaaaaaaatatctcgactattaggtgcaataacatattatttaaaatataccacatatctaatttgttaaaatggatagtatagcagccaaagaactccaagaaacatagataagcaaaaggtaccaacccagtccaactgataggcggaattaacataggcatataaggtatgaccatatgctttgcctgtcaaaggaaaaacattattcatgaggaaatcaaggaatgcaagatcagaagagtcttttgacagaatcaagacgatagcagaaggatccactcactgttctatcaagcccttgccggaccagcggatcacacttgatcacaccatatcgccgactactcttcctgtttgattacaatgatgagttaggacgaaacaccaaactgcttttgtaaaagaagatataaaattagagttgccattattactgttgctctcttgccacagttctcatttcatgtgtgaaagcaggacggatatcaggtggaccatctgctgattggctagcaggtggttgtatgtaggctgtctcaatcataagctcaattaaacgactaccaacctaagcagcaagacatagaaactatcatcagtcaaaatagtgttgtaatgaaacattatattaaccagattcagcaagagacacgtacttttgcatgagcatcttgaccccatggcttggagttatcttgcttctttactatatttcttacttgccgtattttttgctttttcatcagatcagtgactttctttcttagacgctcttgttctttggcaatgtctgaatcacctccttcttcttcattatccatttctttattgctttttttctttgtcttctctagaaatttgtggattcgaacctatacaggaacaaagggcaaagacatatacatttattcattagcagcagcaatgttattgcataaattactgtcgccataattggtgcactggcaacaataatagtttagtcgaaacaaaatattgaaaattgaaaattaacatattctcaaaatatttaagaaaataatagacgaatgagagccaataaaggtataatttcatggcataactttgtttggacaatagttggaatttttttaactaaattggtgggttcagagggaaacatgaactagctagataatcaaagctctgcaagaatactaccaaattatatctgaaaaacacgaacactattctcagttatggtagaaaaaattctgcatatttgacaaatatttttacctgaggttatttgaaggagccccactgctagcaaagcacaattctaaggaactaaccaaatcatataggcttctgatgaggcctatattaggaggctcttgatctttatttcaaccatggttcaataatagttgaactcatacacacatacttctccaataatttcatacaaccatacgtctccaaaagaaaaataaattggtaatgcaatcatgataagctctaatgatgttaagcgctgaaaactgcaggaagaaatatatttaacttaatagtattgaaatatagaacattttgaattctgccagcgttcatcctaaaggtccaatggcctatggtcatatcatatctccgcacctaccgtggcatgtcgtgatgcgtgtaaaatattttgtgacccaaggactgatacccctgaattatgttttgttctcattcctaaaagctatcattaaccaataactattcttgaatggagcgcagagttgaaaagtaaaacaaacaagaagatacagaactcagccacagccgacaaacctcatgttctattgcctcgccgatctggcacgcagcctggatgactcggacacttccatcgccgctaccggtcatgagtagacccatgagcttgtgcatggtgatgacggccatcatatcagccgggagcatgttgaaatagcgggcatgggaggcccgcgcgccgcgctcacccacgagctcctgctcggcaatgatctggtctcgcagtggctcgaaccagccaagaaagagcgacttgacatagggcaggttgggcgccagcttctgctggcacatgtcagcaagcagctcgcggtactcctcggcggcctgctcccacgcctccgtctcaatctggatctgccgccggcgcagcatcgcatacttgtggtacccgaccccgtgcaccgccatagcctcggccgagtgcttccctctcccggacctcctcctatgcccctcctgccccgccgccggaaccgccatagcctcggccgagtgcttccctctcccggacctcctcctatgcccctcctgccccgccgccggagccggggcggagacgctcgggtccccgcgggcgatctccccgatcgcgtggtgcaactcgtcgacctcctcggaggagacggactcggcggcgacggcggcggaggaggacgcgaaccgcggcagcgtctgcgacggcgcgagacgctgtgaggcggcagggaggaggaggaggaggctgcggtggagagggtggggcagcggggcggaggaggagaggagggcggaggcgaggcggcgggcggggaggcggcgccacatggggggcgctagggtttggcggcgggcggtgaggtggaggtggagaggaggagatggcgaacacgagattggtgcggtggccggagttggggaggagggcatcaacaggagggtggcggaggaaggggaatggcgccgcgccgccgccgccgccgccaacggaaggaggggggtgcggttgggggagccggtgtttggttcgatgcgggggctttcgcttaaaccctcgtggcacctgggtggttgatcttgaggggtttaggggctcagatttttttggccttctcatcttcgttaaacaacatgtaatattgtaattatacccttcttgcttcggatttgttacattctaacccctcaggcaagccaaacctcatctctggctctctgctgacaagtgacaaatgtggcttagttcaagatttcttaataatattattcatgaggtgattattttttttacgaaatttaaaatccaaacaacatcaaaagttttagaattttttttttgtccttttagatgagatcatgtagtgagcaagtagatcatgcgccaagcagtgattatattaggagatcaatcagtatacgatataatcgagtatatcgattgttggtagtggatgacaatcaaaacaattaggaatgtcaacgagctgatcagctcgaccgagccaggctacataggctcgagcttgagaaaagctcgagccaaatctataccaccttgagcttttaagtaggctcgctcaagttcagttcgagtatacaatacttcctccgtttcacaatataagtcattctagcattttccacattcatattgatactaatgaatctagataggtatatatgtctagattcattagcatcaatatgaatgtgggaaatgctagaatgacttacattgtgaaacggagggagtaatatttattttttataatatttttttataataaacaatagttttaggttaatcatattaaaaagtaaggacttgtcgacgtttgatgtcgcgattccggtatttgcacagtatggggatcgtttggtaccaggatatatgcgagattaaggtaaaagagacggagatgaggatttttatataggttcgggcccctgaattgtcaggtaatagccctacatcctgttggccgaagccgatcgttgctcttattcaccataatcacaccagtataatatttggagtagcctatctaactgttgtcgacaacagggtagtcttcctcctcgagttcgtgcccggcgagatcagagacagcgctagatccctatacccggcctctgtaggtaccggatagggtcagtccaggcatttctctgatgtcgatatccggcggtgtgtcttggcgtatattggcttgtatgttgatcttgtgtcttgatctattgttctgtgtcccctctcctcctagggggccttgtattttatacccataagtgtccccttgtccaagagtagtccttgtcgtttccatgtagaactctggttgtcttcccttctccggaactccctccatatccgaagtcagttttcgtataagacatggtatgtggtgggtcctgccgagatttagtcaactactattaggtatgtggtatccatatagttgtttatcacatgaatagataagtatttcagaaaaaaatacatgcaaaaggccaaaaatattgaaatgtatagactaacttttatgttattccaggatagagaaaaaaataactatataaaacttctagtatggccaatcattataactctttgagtccacaatggcattttcagtatttttgaaaaagtattcggccaaatggcatattgtaaaaagtatagaaatatcctgatggtaaattattgaactagagcaaacttaatgtgatagaatagattatctcttaattaaacatagaaaggttaaaaaaaataagtcaaaactaattaccttacacaatttatacagttcatgtcattcgaggaattaataagtaagtaatacacgattgatgaggctagatctgtctctaacactaacactaaatgttgaaattaaaactaagcaattagggacatggccatattctagtcttgaaaacggaaggagtaattatgaactgtgtgacctaagttcgacgacaacgctacggtgagaaagatgaagttgtggagatcgtggatcctcccggaatcaacttgacatcattataaggaaaaaaatccatcttgcctccctcaacctcaactgtagcctgagttcgctttacatcccttaactataaaaccaagagactacctcaactattaaaaccaatgcatagtagatagtttgcataatgatttcatccgacatggcactttgacttgttcatggtgatgagtcagtttataggacccacctttcactgaaccctattcatatctctccatccctctcattgccctctctgtgcatgtccaccaccacaacctgcacatcgggcatgttcgttaccgacttaccgtgatcccttacatcaccggcaaagcagcctccaccccaaaagccacacaagaccatatcgcctagagaggaagactatgataacgaggatgacatgccaccgccgccagtgcgcatgagcctagagtcctcgttgtgtcagtcatcgccatcccctcctccaacgtcgccactacctccgcccactgaaccaatcactacatgtcgcgttgggtctagggaaattcactggcggagcagacactgtggtcgtgcatgtcttcctaatctacttcttttcgattttgctatatatttgtcgataaattttcccccaaaaatttgacagatgtaattacagtacaatcgtagtgtaattacactgtaacttgcatgtaattacactgtaactatagtgtaacttgtatgtaactttcaaaaatctctccgtaacatgttatttcggtaaaatggaggtcgtgagaacaaattctttcatatatgtgtgtgctatgatttgttttt

SEQ ID NO: 6346 - DNA, 57345 bp, Oryza sativa
gcggcttgggccaggcggccggcccagtaggatagaaggggagccggcctgggtaaaagaggtagaaggagggagtgggccgggagggggaggggaggcccgggagaggagggaaagagagggaggagagggagacttcggccgcgggccgaaagagagagaggggagactttgagctgggcttggcccaaaggaggaagaggattatttttaggttttctttttattgaactttgataattgttgttgttgtttaataaatatttccggtgctctgaaaattcaagtaaaatttgagggctcattttagaccaaggagaatttaacaaaaattctccaggccacattcgaatttttcttgtacgtattttagtgtttgccaatttctttccgaattttaattaattctattattccttttagaaaatgaattttatttcgggatgaatttatcaggacgtgacaattgtcatcaccaccatcactaccattgtcatcactacttacttccacctcatccccctcaacattttccatattttcatcctcactttgaacatactcatctccgcttgattcctcattctcactgacgggatcgggcgtgggctcacgacgatcacgacgagtgcggggaggcatagctgaaaaacaggagcaaaggatggataagcaacaattttagaaggcacttggcaagatggaagtaaggtgtgcactgcctgtcaggggcggtcagaccggatgacataagccggtcagaccggggtgtacctgctggttagaccgcaagatgcacgctggtcagaccggcggctcgagcccagttagactgccgggaacaagccggtcagaccgcctccttgttcccggtcagaccgccactgacaagtctcatgccacaaaatttccacaccacacaaatgattctaaacatactaggacaaaatttgcacatgatttgagcatggatatcaaggtgtaggtctatttcatcaagattggaacaaagggggaaaagtacccttaaccctagagattaaaatagaccgattgagagcaatgcacaagagggagagtgatttactggttgaaggagttgaatcacaccaagaaactaccctctattggtgcaaatcgaagaacacctcttccttcacctagggttccatgccatggatcacaaactcaataaaaactcaaatcagtccatggaatagagagagaaagaggaggagattcacttacggtgtaaccggagagaaatctatggtcaaaccgaatggattttgatggagggaggtggctagggtttgggagaggagagaggagaagaaaattcgagatggagaagtgaggggatgagaaggagagagagggagtcgggttggagaagaaagggtaaaaaccctgggcccacctgctaggccggtcagaccggccctatgtggctggtcagctccaggccggtcagaccgggcctatatggccggtcagaccgcccgctccagccgactgtgcacaacccttgcacagttcggctacccccacacaataaaaaacaacaaaaatttgatttttggagcaaatttgaaatgtgtgagttgaaatatttccaactatttataacatttgaaaattatgaagatttgcaacaaaactcacttgagtgctaggaggtgaccttttatggtctataggggtttttgggcgaatttgatgttcaaacaactttcgaaatgtttgatttttgagataggtttgaataccaaaaacatttcaaatcctcttctctaccaactttgttttgaaacttttctcaaattccttctcaatctcattttggccaaaactaagaatctagtttcttcaaaagcgggcaaaaatggcattttcattcaaaaaaacatttttcttgcaatatgaggcttggaaaacatataggaaaccttttgaaacattttctaagagatagttttcaaattacattgattttgtaaaagttttgacttatgttgacttgggcattttgaaaatactactagcaccactagttgatttgctcacatataaaaggaagtagagcacatgcaagagtgcaaaactcccccttaatgtgacatgcttcattttcgtaatgaagaaccaaatggcagtaaatccaaagcataagcgtgaatgagagcaaatatacacaatgcaaaagaagcaaccatggtgcaccatctcaagccacattagagaaatctatgacatttaactcattcctcaacctgcaaaagcgggtttcatcaagaggcttggtaaatatgtcggctagttgatcctcggttcttatgcggctaatgactatgtcacacttggcaacatggtctcttaggaagtgatggcgaatatcaatatgcttagttctagaatattggactgggttattggctatctttatggcactatcattgccacatagaagtggagttttggtgaaggatataccatagtccaacaatatttgtttcatccaaagcaattgagcacaacaactacctgccgaaacatattccgcctcggcggtagagagggctacggagttttgtttcttggatgaccatgacacaagggatctaccaagcatttggcaactaccggatgtgctctttctatccactttgcaaccggcatagtccgaattggaatagccaacaaatttaaacttagcaccttttgggtaccacaagccaatagtagaggaatgttttaaatatcttaaaatccttttcacggccactaagtgacactccttaggagcggcttgaaaccgtgcacacatgcaaacactaaacatgatatccggcctagatgcggtaaggtaaagcaagctaccaatcatagaacgataaagctttaaatctaccggtttacctccctcatgaaggtcgagatgcccattggttgtcataggtgtcttgatgggcttcgcatcctccaagctaaaccttttaagtagatccttgatgtacttggtttggctcacgaacgtcccatccttgagttgcttgatttgaagtccaaggaagaagctcaactctccaatcatggacatctcaaatttcctagacatcatatcaccaaatttcttgcaaaatacctcattagtaaaaccgaatatgatgtcatcaacataaatttgacacacaaagaaatcatcaccaatgatctttgtaaaaagggtggtgtcaacttttccaattttgaaaacctttgacaaaagaaaatctctcaatctttcataccaagccctaggagcttgttttaaaccataaagagcttttgagagtttgtaaacgtggttaggatttttaggatcttcaaaaccgggaagttgttcaacaaagacaagttcggcaatttcaccatttagaaaagcacttttcacatccatttgaaatagttttatatcaaagcatgatgcaaatgcaagaaggatgcgaatagcctcaagtcttgccacgggggcaaaagtttcaccaaagtccaaaccttcaacttgtgtgaaaccttgtgccaccaaccttgccttgtttctcaccaccaacccgttctcatcttgtttgttcctaaagacccactttgtccctatgacattgtggtctctaggtctttcaaccaaagtccacaccttgtttcttgcaaagttgttgagctcttcatgcatagcattcatccaatccggatcacaaagagcttcatctacttgtttttgctcaagacaagaaacaaacgagtaatgttcacaaatcgaagcgacacgagatcgagtttgaacacccttactaatgtcacccaacacttggtcaattgggtgatccttggaaagagcggtgtgtatccttggtggcataggtggattttgtgccttctcctcctccacctcaacttgagcttgacttggcgtagcggaagtagatggctcatcttgagtggaggtggatggcttgtcttccacttcaataggcttgacatctccaatagacatgttcttcatagctctcatcaagccttcatcacctacatcatccaaattctcgtgcccctcttgggagccattagtctcatcaaattgaacatcggcggtttcttccacaatacctttgttcttattgtagacccggtatgccttgctatttgaggcataacctagaagaaacccttcatcaacaccgactttcaaatttggttagtctaacaccctttcgataaatataacacttgcaaccaaaaactcgaaaataggcaacatttggcttcctcccaacaattagctcataggaagtctttttcaagagacgatgcaaataaagcctattggttgcatggcaagcggtgtttatggctttgttgacataaaacacgaggcctgggagatctgcttaactccagtgcaggtccaaaactcgccttcgggtatgcaagtgtgctagttgatttgatcctgcaatcaacaagaaataaagacaaagaaatcatggttaaatccataaacgatagccgatcggctaggtgccgatgacatatcatttatcttcgggccgatgtcatatgtaaatcgatcggcagttataaatagataataaagaactaaatctactcgatcggctgtagatattaacaatatataatcctgatgtcgatatatatttaaatcaagtgattgggatagatcggtcgtcgtgccgagacagtataaatcacttagaccgaaatatatattaacaacaaagctatatatgttcatagcatagccgatcagatagatctagcatgtatcggctaatactccgatacaactccatgttaagatattaaaacaagcagaatataccaaacaaaagcttaatatacttagatgcaataagatcttaatataaagggcaggtttaacatgtcaacgaaacatatagagcaaatataattaaaccagataagatcagttgaaaccccgatactaccctaatcggcaaccagaaggcaggctagagattgatattctaagcacgacttaatagatcaaactcaactgatgcagcattaagtatgaaaagaagaacaatatctacacaatcaagccgctggaaatttcatagagtggtagatatcttatataatctaaatcaacgtcgacatctaacctaatcggttgccctctgccaacagatgttagccgattgtgggttagatggcggtattgctagagattatgtaagatatatgataactcgacgaattacataaacaagattagagtatcataaagatggaagcactaatcccgagaatgcaagccatcataacaagttttacctcttgttgaagatcgaaaccgatgcagctcaacttgaaagcaagaactcgtcgaaataaaacaaaagcaaaagggtggcgatgcgccgaaattgtattgaacgtgtgtgttaactgattacatggggttcggggtctatttattcccgaaaacaacaaactatgtccatatcggacacgactcttatctctaacaaactctaagataccataagtctttgcggcagacttttgcccaaacatatctctaaggaatttacataaaatatcctaatcaatagatacaattgccttctcaggactctatccatgcgtggtaatcatcttgaagcttatcaactcaactcgatgtcgtacacaagtcattttgccggaatcggctgtatcacttaacccagtctgactcggacttagccgatccaatcatagccgatccggactccagccgattcctactctgtttctgcaacgatcttcatctttggttccacttcgatcttatcctcatctccgatactgatataaccaaatttggttgttaacacatgccccccaagtccggaatatttggtaatgtttcggatttgccatataccactccgagcaagattcgcaatctgtcgtttcccaaccgttatcctcagcgctttaaatactaaccgtcgccctaaaaaatcttcaccccgttacttccgttttcaccgccgaagccaaccttctcctttctctctccggccatttctccgacgctcgaggcgatccccaagtgatttcgtctccggttagacctccgcccgcgccatcggcatagtatgctgagataagttctcaccggctagatcccttttcctcgcatgaaatcgatttccccttttctcatcttgttttcttcttcttgattcctttggatttgcagcacctttccaacctagttgctattcccagcctgtcacatgaaaaccactactttcttggtccaatcggcaatcttgaccccactgattttatcatcggtgaaaccagcataatcccctttagattagccaaccctaatctgggtaactagaagaatactttcaagtcttggccatctcttgagaaaaccacccctgagaagagttggaccaaatggtaccagcacgtatcgcctagtaagaaagttcactgggatgagattgggatcggccaagcgcttgccctcaccatagccaattctgctaaggatgaacctctgatggctgccgccacctatttctggtccaacaccatcaacgccttcttgttcaaccaagggccaatgactccaactttgatcaacattaccatgatcatcggtttagatgtaacttcatcggctaatcctatgagtatgaacaccaagaatcaattcgatttcaggacaaaaagcataggtggttggtctggctatgtggcagcatatatgggccaaggatctgttactcctcgagaacatgtggcctttttactcatgtggctagaaaagtttcttttctgtggatccagttgcagccctacgaacaactggcaatttgtagccgaagccctagaatcaaagagacaatttcctttgggcagaatccttctcggctatctataccaaatgctgaatgatgcatcagccaagatagctgttggctcagtagttggagcaggtggaccatggtggctattgcagacttggctaaatctgatggttatgaaagttatcaatcgaccatctgtgacagaagctgaatttctaaggttagagctgattgtagacgatgatggagagtaacgtactcatcgtagatgcatgacatatgaagaatatgcatccacaccagctgatgctggtgcaaaactatcggctgaactactcaaggattggttctgcagcttttatgaaggctttcaaaaagatgcccgagtctggtttccttatgaatattcagcagacctcaaactaccatcagacttcagatttgaagacatcaaccatgaaagataccaaaaagtccgagaagttttcacagctgcaatcagcccatgcatcttacccgtcggcattcaccaagggagaaacatacaagtcttctatgaattgtaccacccaatgagttcagctaggcaacttggattgggccaactcccaatcggcttattctttgccgacaagatccagtgccgaggagaaatctcatcaactctgatgatggatcggctgcttaacctccaaggacctcctctgggtagtattgaaaatatcgaattggcaggattcaagagcagaaactttgacagatggtgggggtgaatggaagctgcatctatttcatcaaacggcctcgatatacatgacagatctattccttgatgtcataccccaggtaaactttgtcattactaaactacataaatgtcagccgattcattacttgactaatcttttgttcctgttttgcagacaacagaatcttcccctccacatcaaagcaatagtggtataaatattcaatatgccccaggtttaattcctaatggaggtggaccatcccctcctgtcattggctataatgcccccaagacctcaactcttcttcaaggattcatcagagaaccagccgatacaggtaagaagagaagaacgaggttatcggccgcagatacattaactctagccccaaagaagaaggccaaactcaagaaacctaaaccaaccgatgatctgcctgtcctggatccatctattgagcaagctctggatgaagaagacattgaggataatgttgatcaggctgcagccgaagtgagtgacacagaaagaacaccatcggcttcacccaagcagacaacgccgactccttctgcccccactcatctcttaagagtaagcagctcccttcaatatcttttgtaattatttcactttttggccgattactcatagactttgtagctgcagaagaagaaaattgttgtaaagaagaaatcggcagcaccaattttcaaaccagctccaccagtaagttattcttaaatttactagttgatttcagcggattttgtataacacttgtttcttttactgcttcatcctcctccttcttcccctgtacaacaatcgtcgagtgaccgaactccatcggctgtggggagtcatcatattgaggcagaagtacaaccaactgctcctgctatcccagtacttttcctcctgatgcaaaaaattagatcgactatatctacttagctctcaatcttcctgaaattgtttctgcaggttttagccgatctcttctcttttgacattagagattatcttaacgaagaaacagaagaagacaccaccagcaaatctttggttctcttgcccgatgacgtgaagaaaacactcgaagacatatctcatcggctggaagcatcgtcactagacaacttggtggtaaactgtgggccaattaggactcgctacatgaaatccgagctctaatcccagatgagctagccgatgttcttactccagcagtctatcttgaacaacatcaattcaagctggagaaggccaagctaagactagccgaacgtcgggagcgcaaggacattgaagccacaatccaagccaatcgacagcttgttcatgaagagaagaccaaacttgatcagctatctaagggtccgattaagtccaatattgatcggctcgaagctcgcaagattgagctcttggcacaacttgaagaatgcaatgccgagctggatatggaacatagaaagttggccgatctcccaaagtctatcgaagagcagaaagtgagactcaaatcggctatcaagaatgttgccgatctgaccaagtctttgaaaatcatccgtggaaccgatgctcaagacgcccaagccattgaagaagtagaacaaattaggcaaagggccatttcggctatccaacaattcttgtctcgatgactttatttgtaatagacctcataaatttttgtaatcggtcaagatactctagtactttactatcctgataatccttcgtgccaattaatataacttctaaattcgctcaaaaatttgcaattttccatatatgtgcccccctaattttacaatgtcaaaagcattgataaaattataaaaaatgactaagggcgatataacaatatcagccatttgtacatcggcaaaccacaaccgattacaatatgaaaacaactaaggacgatataaccatattggccactgtacatcggcaaatcacaaccgattacaatatgaaaacatctaagggcgatataaccatatcggccatctcaaggcgatgtaaacacattggctatcatgtatcggcaacatgggggatgctaattggcgcgtacgcgccgcaacgtaaagtcgcgcgcacctgctccctggaatacggctcagccttgcgttgaatgccgctaatctatagagattagcactaatcccttttgtttagcactaattagatttttttatagaatgataaataaatagttgagttgaaaattttaaatatgaattggaaggtttgaaaattaagtttaatgtttgaaaaataagagagaaaatttcagatttagagttgaaagtttcaaaattgagttaaaaatattttcaaatcttgagttagaaagtttttaaatttaagttaagagttctcaaatcttggcttgaaagttttcaaatataagttgaaaattttcaaatcttgcattgaaagttttcgaatattgagtcgaaagttttcaaatctaagttgaaagttttgaaatcttgagttgaaagatttcaatctcgagttgaaagttttcaaatatcaagttgaaaatttttaaatctgagttgaaagtttttaaaatttaacttacaaatttgaattttgagttaaaatttttttcaaagttttaagttaaaagttttcaaattttgaccttaaaatttaaattttaactcgaaagttttcaaatctaacttaaaaatttcaattaaaaaaatcttctgttaattctataattatccttaactaaacgaattagttacgttaacacgttgaaaaaaaatctggaaaaaaaaaatctgcgcggcgtgcacctcgccggcgcgtacacgccggctagcttttctgcggcaaccttagccgatcatgcgttaacccaaaaacttgggtaatatttcttcaagtatttgccatttagtgctctgccataaacttctccatcaagtccttgcagtatgtaagctcctttggatacaactttatgaatttggaacggtccttcccaattcagcgaccacttgccgaatttgctatctcgagttccaatcggcaaaatcaactttcatacaagttcaccttccgaaaaatctttgggtactaccttcttgttgtaatgccgagcaactcgtactttatctttagtaacctttgcaagggctcgcaaacgtgactgaaccagatcttccctctcatcggccataaggttataatactcatcggctgttaaatcattttgtaattccgttctcctggagccaattctaacttcccatggcaaaacagcctcatgcccataaacaagtttataaggagggacttggatcgatccatgacaaaccatccgataagaccacaatgctttggccaaccgagtatgccattgccgaggataatcagaaatcttccttttaatcaacttaatcaagcttttgttagatgcctcggcttacccgttagcttgtgcataatatggtgaagaattcaataatttgatacccatgctatcggcaaactgaacaaactcatcggacacaaagatcgaaccttgatcggttgtaattgttttaggaataccaaatcggtagattacatgctcctaaacaaactgtatcgcatccccataatcaaccttcttcaaaggaatcacctctacccatttggtgaaataatcggtcgccaccaatataaacttatgtcctttactcgatggtggatttatcatgccgatcatatcaattccccaacctctgaatggccatggcttaatgataggatgtcacgccctgaaaatcgcctattttaataattcattctttaattcatttttagaaattattttaaaagcttacaagttgaactctaataatctaggaaaaatttcaacataaaattgagctagataaaatttcagtaaatactttgcttgtttatctattttctagatttttctgggaattatttgagcaaggaaagtatttttaataaatgaaacatcattccactaattattttaattgaaaaagtctttaaaaccctcccgtaggccgttgggccgtttccggcccaactcctctctcctcgcgcgcgccatgcagtccaagtcggccaaagccgagccgccgccccactcctcccctcagccgccgacatatggggcccacatgtcagggttgtcttcaacctccggccggccaagccgagaccgagccgccaccgttccctaccaaatccgccgcctccggccatctccgagtccgattggttgaggggtttttttgtccctttgttgtcctctatcttttccccccaagaatcggagctaattgctttcttttttatccgaatcaaattcgttttcgagtttatctctccaaactaaccctcagattttccggctcaaatcctctcgtttggagtccgatctctctaatccaagcctatataaagcatcccctagtcgtcctcttccatttgcctcaagttttagccgcagccgtcgcccgtagcaccgccgccgccgacgccgtttcagccgcgcctcgccgctgctgtggccgtcgccgccgccttccgtcgctgccatcgggttcacacggtggaggagcaccccgtccgccccttcgcagccgccgaagaccgccgccgtcggacctcgtcgccggccgtcgttcgtcgtcgtccgtcattgtgctttgtaccggtgagttcgcgtcgtcgtcctcttcgcagaggtgtcctcggatagcccggccaagcactctatcgccggtggttgcgtggagccgagctatggccggcgatgatgccatcgatgatgtcataactcttcttattattttttctttagtagattaaaatcgattaaacttagaaaattcataactaaatcatcataactcggattcaagtggttcaagttgctaaattcataaaaaatcgagatctacatgttaaaaatatccacatgtactgtttatgcttgtttttgtactgttttgttgattttgttcatttgctagtttccgacgttctggaggagagcgtttacgttgaggaaggttcagaagcatttgaggaagctcaatgcaagtcacatagatcccaaacaaccctttgagcatgttgaaccagtttaaagctaatgttttatttcaacttatgcattattttcgaatgtcatcaggtggtgagcctttcccaattaattatggccgaagatgactttattttcctatgggttataatttgattagctagaaccttatatattggtttggttcagctaaatgctatatatataattgcttagtcatgcttagaaacattagctcattaatgggatgaatcatactacattattaattatggttatatttaatggtaactcacgatggttaatcgtgttatgataattaattaataattaaaacctgattaaaggtgggttgtgagcacatggttttgatggtcgcgctcatgacaattaaggaccggttcacgagctactgttgtgaaacatttaccgtgccaaccacaagccagcgtgggcaacggctttaccttttgtatagcatggttcattatggggtgccagactgagaagcagcgagaagtccgtgggggtcgctggggagtccatgcctctggttgtagagggattgattatgatcgaggtgtggtgcactgtggtgagttgtgttgtgcgaggggtattgtcacagttcctttccgaggtatcgtggtggtattgaggcgcatggtaacatgttgtggagctatgtcttgtgggtacagtggtacatctctggccagagtaaaactattcgaatagccgtgcccgcggttatgggcgggtctaacaatgtttttcgtgattagtctcaccctactcattactggtgataacttgtgataattaaattgactcctggtttggaatggtatattcctggtatggaggtttgatttgtacaactggggttggctgttcagatgaggttgggcctatgcaacataggtgtgttgtatagtgtttatttaatattgcttaattacttaactgttttactattctctcaaatgtttattaattgctgtttatgcaaataagctttattatgccatcctttgttatcctgtgcacttgcatatctgctgtgtggcatgttgagtatgtcatatgctcattcttgcaatattcattcatcagaggaggagtacttcagtgaaggtgatggtccggaggattaggctttgttcgggtcaagttgcttgtggagtggagtcgccattgtggagtggagtcgccatagctgttcagtcttttgtttttatttccgctgcgtagaattctattcttttgagaggaactatccaccactgtaaaaatttattattttgcgaatattaattaactgtttgatagtactctattatcaatttgttattgtgtgcctcggctgattcctggaggtggatttaacacgcatgtaagcgtttggaattttggatagaaattctgggcgtgacataggattcatagctgacgccggtgctcgctgaattgctccaaatttctgacaatcttgacatcctttgtaatatctaaaacaatcctccagcattgtcggccaaaaatatcttgcacgctgaagtaaccacttcatcttatgagccgattgatgagtaccacaaattccttcatgaacttcaccgattgcaactttagcctgatcggcactcaaacacttaagcaacaccccatcaattgtccgataataaagctcatcatccaataaagtgtacttcaatgccttatatcttaatttcctagaagccgattgagatggattcagtaaatattgatgcacatcatacctccaatcatcagctgttattgctgcgacttcgaccttaacatctttgatcatcggcttataccccgacgccccttgcgccaaatcattagcttcaatattctgttctcgggacacatgctttaaagtaaccagcctaaattctttcatcaattcttggcacttctcattacaaaccattaatgtatcatttttgcattcatattctcttgccaattgaatgattactagcaaagaatcccccattatttcaatagcatcggcttcaacttccttgagtaattgcaaccctttgagcactgcctcatactcagcttgattattagttgcataaggtttgatagtataagcaaactcgaaacatgtcctcctaggggaaattataactaatccgataccacaaccatgagtacacactgatccatcaaagaataaagtccatggcacaatttcaactgagccgattgaatcatcacgatgttccacaataaaatcggctatagcttgccctttaattgccttcggcgactcatatcgaagatcaaactcagttaaggaaaatatccactttccaacccttcctttcaaaatcggagccaataacatatacttgacaacatcggccttacatatgacagtgcactcattggatagcagataatgcctcaaccttgtacatgaaaaatataagcacaagcataacttctccacaggggaatatctaatttctgcatccaagagccgacgactgatatagaatataactctttcttttgcttcaagctcctgaatcaaaactaagccgattgacttctcaccggccgatagatataatctaaaaggtattcccttctgtggaggaattaaaacaagaggagagttaagatattccttaatattatccaaagccttttgttgctctgccccccaagtaaactgctgattggctttcaatctcaacaatggtgtaataggctctaaccttccagacaaattagaaataaaccttctaacaaaatttatcttgccgatcatctcttgtagttctgtcttgttctctggaggctgaatcttcttgatcgcattaacactcctctgagtcacctcgatccccctctcatgaacaagaaatctcaaaaactggccagccgatacaccaaaagcacattttgtcgggttcatcttcaggccatattttctggttctctcaaagactttccttaaatcagctatatggtcttctatttccttagatttaacaaccacatcatcaatgtggacctcaaccaaccagccgattagatcatggtatatataattcatggctcgttgatatgtagctcctgcactcttcaagccgaaagtcatcacaacccattcaaataagccgattgcaccaggacatctaaaagctgtcttatgaatgtcttcttcggccataaaaatctgattatatcctgcgtttccatccataaaactcaaaatcttgtgccctgacacagcatcaaccagctgatcggctactggcattggttattcatccttcggggtagctttattcaagtttcggaaatcaatgcacaccctgaccttaccgtttttcttatatgaggaactatactagaaacccactcagcatatcggcaaggacgaataaaaccagcatcatataattgtttaatctcagccttgacaggttcaagcatatcagctttgcatctcctcggaggttgttggtgtggcctaacccctggtttgataggtagccgatgttcaacaatcgatcggctgagtccaggcatttcataatactcccaagcgaagcaatctatgaattctctcaacagctctatcaacttggttctaaattctgcagataaattcttactaataaatgtcggcctaggtcgatcacctggacctatatcaatttcttcccaatcatcggccgacataaaaccctgtccttgtttgtcatcgagatcatctactgtgtccttgttgtagacatctgaaccctccacaatgccctcaaaataatagcttgggttctccatcttcaattggctatatatcagaatcagacacttttaaaaaatctccatcccaaacttttccagataaacaatcaagaccatccatctcccaaagagctaaatcggcactggcaacattgactgacctgtcggctagcacaatttcaatcttgtcaccttgccactgaatcaagccttgatgcatggttgaatgaatgcaacaattagcatgaatccaatcccttccaagcaacaagctataagaacccttcccatcgatgacaaagaacattgtagggatggttttgttgccgactgtcagctccacattcaaaactcccttggtttctgatggattgccgccaaagtctttgagcaccatgtttgtcttgatgagatcttcagcatttctgcccaacttcctaaacgtagtgtaaggcatcaaatttactgcagccccaccatcgaccatcaccttggacatcggcttcccattgacataaccatttatatacaatggcttaagatgccgattctccgtcccctctggcttctcgaaaactgcctgctctggtgaaaaaatcaacttagccgattcttcttcaacttcgtcaatatcttcttgcttaatcccagattcggcaggcaatgtgaaaaccatgatgaccgaagcagctacaacactttttcctttggccaacctttttgcttcatcggctgtggcttcctcagctacaggaacttgattcttaacacgccactcctgcttcggctttgtcttcttcaaccgatggttgatttcctgctcgacttcctgaaagtgctccctgctcctcaatctttgaacccttctcttttgattctccgtaaagataccggaaggacaccattgagttttcctattttcatcgtcctcctagccatgatcttggttcactagacccaacctttgatgaacaggaagtcttgtctgctttagccgattgcccctactatatgatcggcttgagctcttcgcaacataactgcacccaggacagtcctcaatagacggcagcctcatacgttcattccagcaaaatctaaagaactcgcaaccccaatgaggatcaaagccatcgtcatcttcttcataatgcttctcctgctacttttcatacctcctctgatatttgttgataatcttagccgaatttacctgaaaacctcttgcacgacccctatcggttgttcggccagctgtatgcaccatattaacaggaaaggattgccatcaaccttcatcggcctcttagagtcatcaaatttgattttgcccccttcaatagccgcttggatctgctgcctgaagaccttgcaatcattagtcgtatgagacccagaattatgccacttgcaatatcttttcttgcccaattcctcagccgatggaattgtgtgaccagtaggaagttgaatctgcttcttccggagtaacaagtcaaaaatcttgtcagccttagtgatatcaaagtcatacctctcctcttttctagagttctttacccattggcatggtataatctttttgctccttacccattcggctgcagctatctcagaatcatcatcctcatcgtccgacccatacatgtaaggacatacatgattaaccttcctagaattcttcctagcctctgcaaatctttgttcatgcaaggttaccttctgtgtgagatgggacaagctttcaaaatcctcagatgagaatttctccctaattggagcaatcataccctgaaaagctaaatcggctaactgggcatcagtcaaacttaagctgtagcacttattcctcatctccctgaatctctgaatatactcatgcacaggctcatcatgtctctacttgatcgatgtcagatcggacaatttcatctcgtgaaccccactataaaaatagttgtgaaactatttttctagatcggcccaactgttaattgatccatatggtaaagaagaaaaccaaataaaggccgatccagacaaagataaccggaacaacctaaccctcagggcatccacagccgatgcttcaccacactgggctaaaaatcggctaatgtgctcgtaagtcgatgtactatcttgtcctgaaaattttgaaaattctggtgccttaaaccgattgggtagtggaaccctctcaaaccattcaggatagggttgtcgatacaaatttccagcatctttcggcctaagcccaaactgctccttcatgacatctgcaatcaaatctgcccatggtcgttgttgaggtgttccttgaggttgctgtggcatagcctcccatacatgtcattcacactctcatgaggcaacatggagaatgtctcatattggatcttgaggaaatgaagcttggcatccttgtactcgcttctggcctcatggatctccgccaacttgttccaaatctcatatgcgatctcaaggttgctcactctatcgaactacttttggctcaaagagttgaacaaagcattcatggcttgggcattgagttggaggttccggtgatcaatcaacgtcaagggcgtgtcggtgatagcaaagcctatatccacaatactccaaatatggaagctcatagctttgaggtgagtagacattttaattttccaagtggagtagtttgtgccattaaacttgggagccttccttacatggttcacctcgttcgacatcttctttctaggcgctgaagcccaatcaagagagaccaagctctgataccacttgtaggatcgagatgtcgactagagggggggtgaatagacgatttaaaactaaatgacacctaatcaaaactaacctaagttgctaggcttggtgagggtcaactctaactaagcaactaagttatgttttgcaaacctagggtgatagtggctcaattatatctctaggaaagtaaatcacactcctatgtcaatgtttagcaatcctagggtgatatgatctcaagaatgtctctagaaatgtaaattgcataaatgtaaatgcgacaatctaatgagacaacgagacaagagatttttcaccgaggttcggaaactcgccggtttcctactccccgttgaggcgagcccaactccgccgctcaaccacgaagtcaccgcacgcctccttcgtcaaggggtgggcaaggcgcgagccggcccacggagaggactaccccaagcctcgatcactagggtagttcttccttcactccgaaggtggtgaactccaaaccactcacaatcggcgccgggcctcctccacaatcttctcggagagatcactgggcaactcctccacaagccgtttaggaggcggcaacctccaagagtaacaagcaatgacccggcatggagatgatcaatcaagtgccacactagctctacaaatggaagcaatgcacttgactcttggctaattaaccctctaacacactagatggatgaacataaagttcaagtgggtgtgagagaggtgcaaggggtgtatgcaattaaattgagtgttgtatgcaattgaattgagtgccaagagagttcccttgctgctggagggggggtatttatactcccaccaaccaaaactagccgttgggggcgaaatcccccaactctgtgctctgccggtctgaccggaggtatgtggtcggtcagaccgtgctactctacaatggctagttttctagccgttgtagggatgtcattgggccccacagccgtagccggtcagaccgacatggggtggccggtcaaaccggcctcggctcggtcagaccgccatcagctcggtctgaccgaatacggctccggcggctcgggatcggcacaccgggatggcaccatcctggccatatggccggccggttagaccggcattgaggcggcgatcagaccggcctagaccctgcggtcagactagtgcccttgccggtcaaaccggcacttgggccgtggtcagaccggccctggtcaggccgaaaacagtgagataaatgattgtgtgtgtgatgaaatgagaggacaagtctaaatgcataatgacctaatgtggcaattaaaatcatctctttgctaggtcattacccctcttaatagtacggcaaagctataaataaactagcacaattttgatcgcccaacgcctcgagcaatttaaaatgaaaacacttgtttaccgtcttctcttccttttgctttgcgccatcaattttaatccatcaatgatcatccatgtgcacacaaataactgaacctaactcaaacaaatagctcaaacacaacggttagtccacaattagtgcttgtcattaattaccaaaattaacaccggggcctagatgcttcaatctcctcctttttggtaaatgatgacaaacaccacaaatatatataatcaaacatagagcacatggacatatattgtaatgacaagcaaaagctccccctaaacatatgcataacaacaatagcaaatatggagccaatttcaatttcacatttcaacatatcacaaagacaagagcaatatctcaatgtgaacttcaagaaatattcatccatgagcataagatggtcacatatatatcaatatcacatacaccatccatcatcgcacaagttcacatcacttaaccattcaactcacataagtcacacatcatcctaaaagggctcacaaataaacataggctattacaagaccatgaagggtccaaatgacatagagtttaacaaaacgataaagaacacacaatatagagtaatagcccatacccatacaaaatatagcccaacacaccttaacctattagatatgaggtgactaacctcactaccactagtcctaacccacaagacataaagcacacctaaggacatttttctcccccttttggcatcaagtaccaaaaatgtcttcattcttgaggaggagaaggaggatgcaccgaagaggaaggatgaggagcatcacggtggcagtgatatacaaaagcatgggtgctctccaacatttggactcgagaatgcaatgcacccaccctagtttgcaaccttcccactgaagtattcaagttgccaacatcggtacgcaagccacgaacatcctcatgaaaagcttcatgcccggtagacaagcgttggatgctttcacttagggtattaatagccttaagtaccggattgaagtattcattgggttgcgttccaaagtaggcatattgtggatgaaagaaagcacatggatcatacccatgaggaggaaggggggttgcacttgaacaccaaatccgaatcaaacccgggttgaaagagaaatcgagaaagtaatggctcaaatgactagagagaggagcaagccaagggcacacatgtttgcaatgagagcagcagccctcacaagtgaggggagtgggctatttatacccacagctccaaatctgcccattggagcgcaataattctgattatcgaaactttcaaaaaattccagatctgaaaaattcgaagtcaacgcacttttcggaacttctgaaaatacatccgaaagtacatctgaaaatttctagaagcatatttggttcgcagacattttcggaacttatgaaagaacttccgaaaatttccagaagcttaaaatcggttatgtgtatttttggaacttccaaaaatacttccgaaataacttccaaaaatttccagaagcttaaaatcggttctgtgtattttcggaacttctgaaagaacttctgaaaatttccagaagcttaaaattagttctgtgtattttcggaaattccaaaaatagctttcggaacttccaaaaatttccaaaacccaagagagaaatgcttcgaagaaaaatagattttgagcacatgcatcaccccttatatgtctatgcatcatcccccttaatagtacggctttcctatgactcaatgcaaggtaaaagatacaatatatcatttgatcattgctgtattgcatcgtggcatcgcattcaatggggtatacatcacattacaagacgtcgaggacataacgaccttcacatttgcttgaataaaaaagttagacctctctaatcgcattgtaatcaatcatcaaaatcattaggggcctagatgcactttcaattttgttgggctcaacaactatcaagtgcatctctgatacttaacgatatactaacaaatagtcaccgattactgcaaataagctttaaagaacagcaaactatcatcagcaaacaacaagtgtgacactcccagcgcacgacgacagactttcaactcatttagttgtccctcctctaccacctgacataaaatacgagaagggccatccgccacaaataagaacagataagggaacaagggatccccttaccttagtacctgtgaaggagagagaatccagtaaggaaccattaaaacaaacctagtatttcaccgttgttacacattccataatccaattcacccgctgctcgcaaaaaccaagtttcatcagggcgtagcttcagaaagtcccaatcaactatgtcatatgcttttgctagatccagtttataggcacaaaactgactaccattccctgaagctctttgcatagagtgaatacactcaaaagcaattagtgcattatctgtaatcatacgtctcgaatgaaagcactttcagttggggaaatgatatcatttagaatgggtcgaagcctattgaccagacacttagataccactttataaatgacactacataaactgattggactgaaatttttcaactcaaccggctgatttatctttggaatcagaacaatgtatgtattattcacccctccaggcagaagtccatatgagaaaaacgtcctaacaccagcagcaatctcctccttcagcacaccccaagttcgctgaaaaaaccgggccaggaacccatctggtccaggtgccttcaacggtccaatctgaaaaagcacatctgaaatttcgtcatctgaaaactctttgcagaggacctcattcatggcgtcatctactgctggatttatgagatcaattagttcatccgataccactgaatcatctttggtatgtaacttttggcaaaaagaggtagccatcttttccatttcccccttattctccacatatctatcatcccaatcttttaatttcttgatcttgttcttcctcggacgccaagctgcttgccggtggaaatatttggtattgcgatccccatcctttaaccaggaaactcgtgatcgctgcaaccacatcatttcctccatgtacagtagttcatccatatgtctgaatagaccattgatttcctctgcattgcccaatggatcaccgactgaaagtccttccactttcttcctaattccatccagttccttagtggcagagccaaacgatttgcggctccattctctaagtgttccaaaactgagttaagcttttttgcaacctctcccagatcatgcgctttgattctctgctcccatgcaagttgtatcacctcaggcagagtttcctccctttcccacatgatctcgtacctcaaacaacgattgcttgaaggagtttgctctttctctaccctaaggaggatcgggcaatgatttgatcttggggagaacaaatgtgtcaattttgcatccgagaaatggttcatccaactgagcgacgctactgcacgatctagccgtactcatacattttgatcacctttttgcttgttattataagtccatggtgtgccggaaaaaccaacatcatgcaagtcacaatgagctagcacttcccaaaaatttgccatcatcttttccgaccttcttcttaaagaaaaatgttcaaaagactacattatctcattgaaatcacccatcatcaaccatggtgcattcgaggatggttggatttgcagaatcagttcccacattaaatgtcggtcttgtgcttttggttcaccatagatgaaggttcccctccactgaactgcatctcctgattccttgattaagacatcaacatgtgcgtggctcatggacaggagatctaccagcaagccttcttcccagagaagagcaataccacctcctgacccatcactcatcatagccaaacagttccttaaacctagtctccacctcaacttactaatccttggttcatcttgtctagtttcagataagaacacaagcttaggcctatacttctgcataaggcagataagttcgtgaactgtttgaggctgcccaagtccccggcaattccaagccaaagcattcattgctcctggtggggctcgccatgagctcccaccagatcttccttcgccttgcaagaattctctaccttatcacggcaactagcctcatagtaggaggtgttcaaacttgggtgttcctgttgatgattaaaatccacaacggtagacttgagcgctatcatggctcttggtgaaagtttgatggagcccttctttgatttcccaatatcacgcccccaattggccacctttggccttgatatcttccctccttctttaatggctaatcctttcttcttcttctgaagccaatctggagactttttgctggctacattgagattagtctcagcagtactgatcttgattgagttttcttcactaagctcataattagagcttaaagacacatattctctactacaaggtcctctggcctacaagttcagattagaaggcaccccgtctacctgcatatgctgcgcccctttttcaagggccaaagaaaccattggtgcaagagtttcctgggccatcttctcttcatttgcatgcccaactttagtaacttctgggtctaaagattgtcgtcttgggcttgcaaggttagaggcgctcccagccgataaaaccttgtctttctgagcaccacagaagtttaaaactctagcaaccttttggggagctgcaggaattgaaagcagtcgaagcgcagaccatttagttggtgaagctctgagttctttcccaaaacgcaccctattcaggttggattaatcctccaggcattctctctccacatgtccaaaacggccacaagaaaagcagaaaaacggaacattctcatactttaaagggaatatcattaatcctcttcccttcccacgtgctttgagctaaactttgagagcctcagctaatggatagtccactcttacccgtaggtaatctctcacagcaccacccacctccaaaactttacctagcttttcacccagatggtgagcaaaacccgttatcatcattgcctctagaagatcataaattcggacctaaatcgctaaagattcaatgacaacttcagaagggcgacataggccatcataagagacaataatgagagcatcacccttgtgtttccaggggcctccattcatgacacgataaaaatcaacctcatgatcaaaatcaattaggaatctattttcacctagatcccttgcagttctaaggttttgcaaaccccaagctgtgctcatctcatcaaacagacccttgacattataacgctgcgctgaataaaatcttgcaagagccaggaatttacatttcatctcctcctcaactttgccagatccacataaaaaacattatcttcttcctcaacgatatcctcatcatggttctcctcgaacaaaatgtcacgcccggaaattcactagtaatttccgaactaatttgtgcattaaatcctcgtccaggaatcagccgaggtacacaaactgacaatttaatatacaaattcatcaatataataacgttacatacttacaaaagaaaagaaaactgcagcggaattacggtctagcgaagctccggctccactcccataggcagctcaactggggtataagccaaacgtcttctccttcgcaacttgtcttcaactgaggtttgattgattattgcaaggtgagcatatgacatactcagcaagccacacagcaaatatacaagtgcacaaggataccaaagaatggcataatatagggctcatttgcaaaagaagcatttagcaaacagtaagaattgtaaaacagtagagtaattaatcatcaatattaatcaacactgaacagcacacccatgctacacaggcccaaccatcctgaacaaccatacccggctgcacagatctatctccaaaccaggaatataccattccaaaccaggagctaaattaattagcatcaattaccacattattattaatgaatagtgtgggactaatcacgaaagacattgttcgacctgcccataaccgcgggcatggctattcgaatagttttactctggccagaggtgtaccactgtacccacaagacacaacccaccgtcatggcaccgtgtccgcgcagacacgtcaccatgatgagtgattgtgacaagacccctcgcataactcaacctaaagcagtgcaccgttcctggatcataatcacccccttataaacaaggcatggactccccagcgacccccgtgggcttatctccaccacttctcagtctggtgttccgcaatgagccttcttatacaaaaggtaaagtcgttgcccatgctggcttgtggttggcacggttaatgtttcacaaccgaaactcgtgaaccggtccttaattgtcatgagcacgaccatcaaaaccatgtgctcacaacccaccattatcaagttttagtaagcacattaattaattaaccaatcacgattgaccatcgtgagctatcattaaatatccatcattaagtaatagtgaaacattagttatcccaattatgtgctaatgtttctaagcatggctaagcaatgatgtctaacatctagctgaaccaatatataaagctcaactaatcaaattataataacccaaggtatcaaggaatatagagtaatcaatgcaaacaggccataacaaaggaataagttcacaccacccggtgacattcgaaaataaatacacagttgaaataaatagagaatttaaatataggatcaacatgctcaaaggaactgtgtttgggatctgtgtgacttgccttgcaataaagggtcttcaattaatcttcttgaatacttccaacgcactcacgaaccttcgaaacgacggaaacgacaagctaacacgcaaaacgagaaaaaagactaagaaactccaaataaatagtacatataaagtaaacaaacatgtagatcatgattttagatgaatttagagacttgaacgacctcattccgatttcatatgaattaattacaaattttacaagattaaattccaattaaatctattaaagaaaagactattccaaattaattaaataatttacaaatgatttataactgagataaaagattaaaacaacctccggaaaagattagattatatttggtagatgacatatattaaaaagaaataatatgccactgaaaagagaggaaatgatttatattgattttggatggctaagattaatcttgacatagagttgaccaagattggatggcttggattgatctggcaagcgggcctcacgagataccaactcaacgagtcaattctacgtgacacgggatcactctaatgatcaaccgaaaccggcgaacggaatcggcggctctgaacggctctaaattaaaggacgactcaacacggacaaacgaacgaagcacggggaacacctcgttcgaacgaacgagcgaacgactcaacaacggctgtggctaaactggtggggtaaacacgattcacggtaaagcccaggtacggcaaacgataggctggtaggaacctagggttgcacctacggctagacaactcgactactgagcaacgagctaaagcggtggctaggtttaagtgacacacagctgcgacatagcggcactaaggtgacttggctcggctaggcggcggctcggcggaaacgcaaagctagggttagggtgacggcacagccgatagcgatgcacgacagcggcgcggcgactgcagtacgtgcactagggcagtggctacgcggtggctagcagcggacaacagcgggtgcggtgcacggcaatgaccggctcgacgctagggcggcgacgcggtggtagcaagcggatgcggcaaagcgacggcaacgctgcacggcgtgcaggcgcagcagcggtgacgcagcaaaggcgacgcagcagcagcggcaacagcaagcgacacggccgacgtggcagcatgcagcagcgacacggcacgcggtatagcagcagcttggcagagccagcgcagcaagcagcggcacgatggcagcaagcggcggcgcaaggcggcggcttggacagcagcggcgatgcaactagggcagcgacggcgcatgggtcggctgcggtggctaggcacacacggctacgcacgggctaaggctgcacaacagcgactacacgaagacacgattgcagctacacaaagattaaacctagggaacagaaaagaggcctcaccggggaagaccgaagaggaagaggcaacggcgacgccagcgacaacacacggagacgacgacgacgctagggccaaacaagattagattaaattaaggccctagggaaaaacctacaccggtgaacggtatgggagcggcggttgccggtgaaccacggcacaaatatgcaaacggagggcaccaggagaaagagcgcgaggcgacggtccttaccaacacttacgcgacgacggacggcgacagaagatagccggtgaccagcttggaagggcggcgaggtactgtacacggcggtgacgactttccggcgatgagagacgacaaccgaggggtggacaggcttcacttcgcagctgcgaatccaatggaggcgacggcgaagcttggcgatgacgggaggagcagcagggcttcgccggagatcaaaacgcgacggcgaacttcgggttgacggcgacgatggagctccggtggattttggtggcgacgaaggggcggacggggtgcagctccttcttgcgaacctgacggaggcaacggcgagcagcagcggcgaccacagcgacggcgcggggcggctggagacacggcggcgacggcggcgctccggttcacgacgacgggctacctccgattggatttggcgcaaaacaacagcggccggggtagagctcgacgttgcggagccgatggaggtggcggcgctgatcggcgacggccggggcgatggcgatatgcggctggagcggcgccggcgcttggagagagaaggagagcgcggggagaaggtttcgggcggcggcagaagaaggaggaggtggcggccgaaagaggagagggagggggctctatatatagccatgggaggccgggatcgagcccacaacgacgggaaaaactcgggaaagtctagggttctcgccggaaaaaggaaagattgaaccgcgaaattggaaaggatctccatagaaacttttggggattttttggggaaaagaaagaggagattgagaggattccattcccgcaactaatttggaaaaaggagcaacgaggtggccggattttggaaggggatcggcgacactgtgcacggcacgggagacagtcggctggaggaggaagatggagtactgtagcgaggggggggggcaaaacaaactttcggccgggctgagaggaagggagggaatgggctgaattcggcccaagactaggaaggatgattttattgcttttccaaataaattaaccaatgaaatgatctttcaattgttaaaaatacttccaatgctcaaataattccaagaaaactcttgaacatacttggacactcaaagtatttaatataataatatccagataatttaatgattaatttattatttaaataattactgaaatgttctttgtataattaaaattaggaattgagctccgaaaaatatgagaaaatttcagagaatataattattcatggagaatttaataaaaattaaatccagccatgctttatatttaggaaattttatttcccacatttaacttcacttgtaaattaataaacatttaatataaattctattaataatttattaaataatttataaattctgaaatggaaaattaggctgtgacacaaaactatcgcaccgttatgattatcttccggtttagatgcatgaccgaaagaaacaagtcaagcatcctccttctccacttgatccttgtccaccatatgcacttcgcccttgccggcgtcttcatggtttgacatggaagcccacgtcctgcctgtcgacgatgatcaagaaacacagatgttcctgagtaaacatcgtcctaccctagacgtcccactaacaaacggcttcgggcgggtagaatcctcaccggaatccccttgatcgcccacaccgatgttagacggcgacaccaacgcagaacaggttacaagaaacaaagaagcaacaatacgtagagttagggttaccacgtcacttgcacagaaatttgtcgtcaaccagaatcttccaagaatcaatcttggcagtagcagattaaaacaacccgagtcgctcccgtcaagatacgtagcagtagttgcaatccaaaacagattaagagaacttaacacctacgaatcacaaccaaagatcaaacgagaaaccacgttgatcttggctaggacttgtcagcgcttcagattagagatgagcttccaagatcgcctcctagtcaccttccgtagattgcggacacgttgttagctgatgttgtcgttctattagtttttctcgggaaatttaactatttaccactcttgtgacatggcaattaacgatttgccacatcctgtcaatgacatgtgggcccttatgtgtctatgacatgtgggtctagtggcaaatcgttaagcaacatccgtaagagtggcaaatagttaaaagccccgtttttctcctgctctattcaattaaattggcactgtcttgtgctggttcattaaaaaaaagggaacaattgagagcgccttgtggcctgatggaggcggagtgcgagcaccgggagtcgcgcaaggagcgagggactggcgagtaggggtcacagtgcgatggtgatgctacttgctgtcacgcccagaaattcacgaaccagaatttctaagctgaatgtgcattaaacctctatccaggaccagccagggtacacaaacgataattgttgacatatatatccacgacttacaaaaaaaatataaaagattacaaatgcagcggaaaagataaaagcgagctaagcctgacgacttgactcctgcagcgggcgactccattccacaggcacccttgatggcagcgacgaaaccaacttcctcgaaacagctccaactgagaagaacttcaactctgatgtggggaacagagagcaagactgagtactacccactgcaattagcaagtcataccagaaggggaggtatgatgcaagatatatccaaaggaggctaaaggttcttttgcataaaacatgcatttaaaagcagtagttgaaagcagtaaaacagttgtagtaattaattaatattaaccaatcactgctcaacgctacaccacgttgagacaggcccaaaccaccacctaaactaaccagttccattagctaactaggggtgagactaatcacggtgaatctgattgaccgcccataaccgcgggcacggctattcgaatagttttactctgatcagagatgtacaactgtacccacaagacacagccccacaacacgtttctgtgcgccggcatgccaccacgacataccagaaagagaccgtgacaggacccttcgcattaccccctctaaccaaacacaccacacctcaggtttcacccccactcctcgcaagacagcgggcagtcccctctcatgcctaggtgaatccgaaagccacataggccatcgcagggcccatccgaactccatcacgctcacccttgcctggatgcgtcagctagaggaaagccatactacatgcccagccgttgcccacgctagcttgtggtaagtacagtaagttcttcaaggacatcccgcgaactggtccttaattgccatgggtgcgactcaaaaccatgcacccacagcccaccatttagtatattttagttaaccaacactagagcggtggctctagtccaacaccaatattagaatttgaaatctatgcattaatgtagttctcccattgtgtgctagttgagctaagcattgctaagcaatccctaaccgaacatctaatcttgttatatccccaagctaacaaaggaacaagataaccaatagtatggctgagacaataggtaattatcccatagtaacattataaaacaatgcagtatttaaggaaaataatagagcatttgcaatatgggaccaatatgtttaagtgacaagcatgacttgccttgctctgcggctggagggacctcggcgactatctcgaagtacaccggagcgtcgggagagcaggaatctatgcgacatacaaagcaaacatgtcacgccctgaagctttcccccctttttcttgctttaaaaattggttaaataaattgcccgaagaaattatcttaattaacctagagctgatttcctatctaatgaatgcaattaataattggaaatggcattgtggaatttttcttgggttccccatgctccaatacattaacaggatttttagtggaattttcagagccttggaaataattttaaccaattaaaaatgagcaagggcaattttaaatcccaggaaaaatcctttcttctttttctttttctttttcctcctttttcctcttcttgggccgtcgacccacctttctcctcccgcgtgccccttgctgggccggcccgctcctcccttcccctccccgaagtcctccctcacgccctctttctccgggacgccgacaggtgggccccacctgtcggggtcgtccccttcctccagccgtcgaaaccaccgcgcccacctcctccgctcctcccgcgcccacaccgcgccgctcccgcgtcctccccacatcgccgccctctctcccgcgtctcccggcccgcacgcgcgctcgcaaggggcgggattcgaatttgaatccccccattctctctctccaccccacgtcgccggcgaaatcggaggctttcccggccacgacggcttccccctccacctataaattgctcccccgagcctcctcttccccttcccgctctcgccgccccctcccgtgcctcctaccgagcccgcgccgctcgccgctagcgccgccgcttgccgccgcctccggccgcacgccgccgtcgcaagagccgtcgcctcgccgcgcaatcactgccgctagcttcgccgccgtgagagctacctcggccgccgctcgctttccgttcgccaccgccgtaccgctctccctacacgccgctgcctactaccgcctccggccgcgcgccaccaccgctaaagccgccgccgcgccgtgaaaccgttgccgtcgcgctcgccagtgtcgcccgcacctcggtcaccactcggttgccatccgccgccgccggaacccgattccctcgcatcgccggtgaggaccccttccctccccctcctttcctttcccttccagcaagcgccgagccacgccgccgttccggccgtgcgccgtcgccttcgcgccggccgccgccgcctcgccgtccgccggtcgtcttcggaggccgtgtgccgccgccgccgccctgccatggtcggtcggcttgagccgtgccgagccaccatccactccccctcccgccttgtgccgctgcccggtgggcctcacagactggtggaccacccctccccttgagccaccagccggcgccccctccctctccccttgtgccgctgacaagcggggcccgcatgtcggcgccgccccccccctttgatgacgtcagctctgggtattattgcgcaataaattaattaaggattttttctttgttagtaaaaacatagtttaccttctaaaattcataagtaattcatccgagctccgtttaagtccattcaagtctcagtaaattcataaaaatgcaaagaatccattaaaaatggttttgttccctgtttcagtagtcttatagtatgttttgcttgtgtgctttgtttgtcgtgtagatttcggccgtttcgtcgatccgcagtttctcgaagacgttgctgaggtctcattagtgcgagagcaaggcatgtcatgcattatatttgatcatattgtaccctatttacaaatatcccgcatttctattaaatgttgcattctttttcaatgttatgtgggatgggtcctattactcagccatatattgtttaccatatgccattgataactggggtatcaaaatgattagatgttggtttaggaaatgcttagccatgcttagttcaactagtacacaaaaggggatcacattattacatagactctgactatgagcatagttttggtttggtgccaccgcaatggtgttagttaattaaaatacaccgaatggtgggttgtgggtgcatggttttgctggtcgcacccatggcaattaaggaccggttcacgggaaaccctgggagacttaccgtgcttaccacaagcaggagtgggtaactgcttgatctgaagtatagctcgaccctttcctaggcaccagtggcgagggtgggcgtgatggagttgggtcggccggggtgtccggttgtccaactgccggattcaccgcggcgcaagaggggaccgcccactgccttttgaggggtgggggtgaaaccttagcgtggtgtggatggttaggggagggttatgcggagggtcttgtcacgatttccccctttgcagtatcatggtgatacttcggggcatggcgacatgtgtggaatcgtgtcttctgggtacagttgtacacctctggccagagtaaaactattcgaatagccgtgcccacagttatgggcgatcaaccagattcaccgtgattagtctcaccctagtttagcttaatgaactggtgtagttcaggtggttggttgggcctgttgcaacgtggtgtagcgttggacagtgattggttaatattgattaattactacagctgttttactgctttcaactactgcttttaaatgctagctttatgcaaaagaacccctagcctgctttggttatatcctgcatcataccacctcttccggtatgacttgctgagtacagtgggtagtactcagtcttgctctcttttcccccacaccagagttgaagttcttctcagttggagccgtctcagagaggttggtttcgtcgctgccgtcaaggtttgcctgtggagtggagtcaccccgctactgaagtcaagcttctcggtttagctcgcttttatcttttccgctgcatttgtaatcttttctatttttgtaagacgtggatttgtatgtcaacagttgtcgtttgtgtaccctggctggtcctggacagggatttaatgcacattcagcttagaaattctggttcgtgaatttctgggcgtgataaaataatacaaacaggctataagactactgaaacagagaacaaaaccatttttaatggattctttgcatttttcttgatttactgagacttgaatgggcttaaacggagctcggatgaattttctatgaattttagaagattcactgcgtttttactataaacaaaaaaaatccttaattgatttattgcgcaataattaaaccctggagagagagagggtggcacgggcccggctcaagccggctcggcggccatggcgcgcggcggcgcggtttgacgcagcggcggcacaaggcggcgaccggcggcggagagcggcggcgacacggcagtgcgggcaacgctagcggcggaaaatgagcggctaggcagcggcgcggcggctaagtggcgcgggagagagagagagaggaaggtgaggagttcctcaccggtgacgatcaatgatggtgagcggcgggatgatgatggcgatgagtggccgagcttcgggatcacctaaggaacacaatgggaaagattagagagggagagagagatcatagaggacggggacgccggccgaaggcggcggccatggcgaagctcaccggcgtgcggtgcgaacggggctccagcggtggaggggctgacggcgtggccctcgggctcgcgaatccgatggcggcgatggcgcggctcagcgcagcggctagtggcgaccgaagctacggcggcggcggcggagaggagggcgactgtgctagggcgaaggagggcacgggggagctcggcgaaatggggaaaaagagagagggaggggcggtggtgcttaaataggggaagagggggctcggggaggctgggagtgggctgatttcaccggagtagtggggaggtggagagagggagcggggcgcggggaagacggcgacgccggcggcgtggcccgggaggtgcgggagaggcaggagcagcgatttcgggcacgggcggcgccagccagaggttggggacgggcccacctgtcggtgacccgaggggaggaggggctcgggcggccggctgatgggccttggacttcggccggcccaactggtagggggagggggaaagagaatgggccagcggcccattaggaaaaaggaggggaaaaagaaaaagaaaaagaaaaaggagaaatgaattttcagggattaaataattgctcgtgctcatttttatttggttaaaattatttctaaagctctgaaaattccactaaaaatcctgttagcgtattttgacacgtagaactcaagaaaaatttcacatgtcatttccgattattatttgcatttattaaattaaggtttctctcttgccacttcacaaataatttctcgagactatttattaattaatttagacttgggagaagaacttcggggtgtgacacttgctccctccatcccacgccatggcttcgttgccggcgagcagccggaagggaagaagaaccaagggtatttttgtgtgagatgtcattgttttcttttttgacgtaaacatagtggcattgtggcgatggcaatggcaaaatctcggatttctcgccgtatggtatggtacggcagacagagtacatgaaaagtggttttgctttgcttggtcgtctccaaattgaccatggcaatccaatcctattcttactcgggtcgggggtcagagcgcaccgcatatcgcatcatttttttcgggcaatccaatcgtataggtttccactacatactttcccatttttttcttacactttggttctataaaacgccgcacatgacgtcgaaagtcaccccgctatcgcagcaatccaaaatccccaacccaacccaacccaacccaaccgcactatcacgccactcttcgcccgcccgcccgccgccggaatcgccatcgcccgaccgccgccgcgttcgtgtccccacaggcggcttctctccctgcatcaccatgggttctgacttcaaggcaatccccttgatcggtaagattcagattcagattctggaatcctgcgtgggattcttttttttcttttacctgctttgccaccaccagttgcagttagttcaattaaccacagattacgactgcttgtctgcaaaggatactagatacagcttttgtagaattttgtgtaaagatacttggtgggatgagatgatatatgcttgtactttgaaatctccatttgaagaattcctctatctttgttcatttgtcagacattagtccccttgtcggaaagattgatgatccgagcatggtcaatgacgaggatttgctgcaagttgtgcaaatgttggacgatgcctgcagggaggctggattcttttatgtggtaaaatttacttatttacttactagcctacttcagactttttagcatcagtttactacaatgggtacagcagactagctacacaatatcaatcctaatcaaatggtgtctgtatgttactaacagaaaggccatgggattgctgactcgctaatgaagcaagttagggatgtgacacagaagttctttcagcttccttatgaggaaaaactcaagattaaaatgacacctcagagtggatacaggtgtgatataaaatgacagcttcaacctgtttttaagtttccaacatttttccttgttccacattggatccttctaatcctccttcctgtataacataactttgttgtctttactgtcagagggtaccaaagagttggtgaaaatattaccaagggtaaacctgacatgcatgaagcaattgatgtaagtttaattttctctttattatttttttatcatccattaatttgttcctgagttaatccctggaagaaaaaacatcacagtgctacacgcctattgaacctggtaaatatggagaccttgctaaaccaatggtaggatctaatttgtggtatgtatccaactctccatctctgtttttttcctacagcactgtattatttgacatatgcgagacagatattatgtacttgactttgatataaaacaataccccagttttgatctattgcatattttaataatactcacaatataaataatttagcttatagcacacctctatttggaagaatgtgagggaataaaatttatatttacaatattttatctagtaccaacatgtattatgttacaatatgggtagaattatgaattatagtaaagaaaatagaagttatggctacaattgtacttgcatacttcaatgtatttttgttactagaagcatattaaatagttggtactaggtaccacagaattattgcttgttgaattacttcagctattactgaagaagttctgaactttggtagactgcctttgagtattttaggtcagagatctatcaaaattcaaataaccggttcatttatttttatgcaggcccaaatatccatcaaattttgatgtactgctggaaaactatatcagccttctaagaggttaacttctatacttagtttaaatctttatttgtgcatgtatgctattgatccatttattatttgttacttatgagtgacagcatttgttatgaaaatttacttgtagatctttcaagaaagatcatgcgaggtatagccttggcgttgggtgcgccagttgatgcttttgaaggtacaaccgcaggagatcctttttgggtttgcaggctgatcggttatcctgtatcaactgatattccagaagagcagcgcactgatactgggtggtgagcaaattgtatctacgtttttatttggtaatatatcctgcaaatcgtgtgtattgagtgtagagtcatctgacactgcttttcttttacatggcatccattctacgatcaattcagtggagctcacacagactatggttagtacatatctttcaaaagttctgttggaattgaactcatatgtggaaatacgcatatatgtttctttgattgatgtattgtggaaagtttgttttttctttatttgtgttttaatcctaaaaaatcagtagaggttatatcaaaaccatggggatcatatttatcatttgttaaatttgtaggtcttctgacattggttaatcaggatgatgacatatgcgcccttgaggtacttatttcttcaccatctaatacatatcttataggaataagtcatgtctttgccctcgaactctactcagattccaattttcaatgtggatttaaaaaactggttgtttatcaccagaaatctggacaaatatcattggttaccctattcagagattgttttaattgagatattttatggccacactgtttgtttgcttggtggccttttctccttgcaatttcttatcgccaaagttatttccatgttatctctgtctagtaataaagaagaggggacgtagaatggatagaagataagaacttgatttcagattgttttatttttcattagagtgcagtgcatctgagctgggcatctttgtacagaatttgactcatataacctaacaagagatacttctctacttttctaacattctacgcatcttctaagatgcattagtaattaggagtatgcaattagcatcttacagtttcttcccactgtccatatttagcctgaaacagggtgaagcaaacaattttgatccgtttgtaatatctggtgaatatgtttcaggtcagaaaccaatcaggtgaatggatatatgccaaaccaatcccaggaaccttcgtctgcaacatcggtgacatgctgaaggttcttttcttcctttgcagtttcactgatatctttatggtcatcaaacatgagacgcttatcaattgtcttctttggttaggtttggtcaaacggaatatatcagccaacacttcatcgagttgttaacaactcccctcgctaccgtgtatctgttgcattcttctatgaggtatgtcttgcttaatctctagtctcaatcctacacatagtttatgtgaagttgatttctcatgttctttcttttctttctgaattttgaatgctacagtcaaacttcgatgctgccgtagagcctgttgagttctgccgggagagaacaggtggtgttgccaagtatgaaaaggttgtgtacggagaacacttggttcagaaagtcttgacaaacttcgtcatgtaaaatttgtggaaaagaacatgcattgtactccaatgtctgatcgcaacattcgtcactaaaataaaatcatttgtaaatttgtcatagcacagtagaacagtcatattgaagaatggaatgcatccttaattgaaatcacaagcgatgtgaataatcttttcgtgcatggcatagatgtgtagatcatggaatgattgcagttacttcttgttacatgtcccagcacaggaggaagatgagtagcaaaaactaaatcagaaagaaaaaatctaaaatcaagttttcctaatagacgcacacttatgaaaaaactcacgagcaaactaccgaacacggacgtagcgggcttaaacataagcgtgaccaaggcactaccttttctgtcttatatactccctccgttgagtttcatttaaaaatttaatacaaatatgaaagtatataattactagaaaaatgcccgtgcgttgcaacgggtgaaaataatctatctattaaactataaagatagcttaaaaatgacacgatatttgctttgaccacattgaaattgttacattaattaatagaaaaagataatagttgtatatacattatagaatgattgtatttatagtaaatgtcacaaaactaaaattatttggttaaatccaattatgtttttaaaatatgttactgaaaggaccttgatgtcgcctagaggggggtgaattggcggtttttaaaaatgaatacggaagctaaaacaaaacagggtcggattgtctgatatgatatcaggtcggatagtcctatgtgatcggattgtctgaactgagatcagactatctgacctacacaacaactatacaaacaagagaacaacctaagagttctagattatacacaggcaaagaggtgagctcagccaacaacaatattagcatagcacaaagcaatggaacaagaaggtaaagagagtgaagatatcaccgaggtttacacgccgatgtatttcccggagttcaaatccttgaggggattctagtctccgttgaggggctcgcaaagagccgggcctttttcaaccctatcctcatgaggttgcacaaatgcactcctccttccactaagggtatctctttccttgtggaggcgagatccggccttcataaacttcttttggccaaccacacgtagatcggtggcccaagaataacacctagccgtctaggagtcctcaacctctaagagtaataagcaccacagaactcttggacaaatcctaatgctcaagatcaagagaaacacacactaggctcccaaactccaaatccacacacaaagatccaagtcacaaagaacaaggaggatttgagatagagagggagagagcttaaagatccaaagcacttaacacaaagctcaaatatggggggttttaagaatactctgcaagaggatccaaatatgggtgttggaaagccaagagggaaggcagttaaaaagctgaagcagttggctgaggcaagtggaattgttttcccatctgattctctatcttctactgatttaaatcctgatatatcttgtgaatctgaaagtgatcttacctctgttatacctgctgattgtgatatatctttgcttcaaaagataggatctgagatgtgtgagacttccgggtttcaagcttggtggacttgggagatgttcaggtcatcaagccaaaagctattggaccatccactgatgaagcctagttctgtcaaacttttagggctgctagtggcactctttaggggcatgtgtttatccctatatcagcccttttattttgtgtttaagttatgtaaactctatgctggtactatgcgttggtgtgcttgggatctgcatggattattcctgcttgttatctttctctctttaagactagttatcaaatgaattcggttatgagaaattggaatgtcctccgctggaatgttagaggtctaaattctgatgacaaatggttagccattagaaataaaattgaggaaagtggctgtgttgttttttgccttcaggaacaaaaagatcctcttttgatcattcttatataaagaagtttgctcccaaacgttttgacaagtttgctttctctccatctgttggagcttctggtggtattttcgttggatggaatagttcaatttttgttactttcacctcaaaccattctggtttggtatgtactatagtttcagtttatggtccttgcactggtcctgaaagaaataatttcctgtcctggctccaccagttgaacattccagatgatgacctttggctcattattggagactttaatttttatagatcggttgcaaatagaaatagaccaggtgcagacatgaatgacattttcctgtttaatgcaatgatcagtgatctgggtctggttgagctgcccctcaagggaagggctttcacttggagtaacatgcagcatagtcatttaatagagcaattggattggttctttacctctactacttagaccttaaccttcccccataccatagtaaaaccacttgctcgttctacttcagatcacataccttgtgttgtgcaaattggaattgacatccctaaagctgacatcttcagatttgaaactttttggatagagcatgatggtttctttgatttagttccatttggcaaaatcatgggtatgaaggtaatgcagccaagaatatttctattaaattgaagacattgagaaagggtttgaagaagtggagtaaatctgtctctaaacttcaattgttgattaaaaattgtaatgctgtcatagcttttttggactccattgaaaatttgagagatctcactttcttgaatggaattttagaattcctatcagaaacaagctgttgttatacctaaagtataaacaaatttattggcaaaagatgtgtaccatcagatgagccaagtttgggggtgagaacacaaaatttttccatgctatggctactgagtcttatagaagaaatgcaataccttctttagtagactcttctagtttagtctgtacaagacatgaggagaaggctcacatagcttggagtactttttcttcaagaatgggttgttcccagtttgagtttatgccttttcagctgcaagattttttccatgcaaatcaatctcttgctagtttggatcagccctttggtatctctaagttggacaaaattataaagaatttgcctatagacagggctcctgggcctgatggatttaatgggatgtttgtgaagaaatgttggccaatcatttgtcaggattactacagacttgcagctaaattctactctagtactctggacctggatcctttaaaccattcttttatcatcttggttccaaagaaatctgtgcccgaaggtataaatgactataggccaatatcactcatgggaatctctcttaagattctaacaaaaatcctggctgatagactgcaaaaggtgatattggagttaatcagtcagaatcaatatggtttcataaaagggagaactatacaagactgtctagcatggaactttgaattccttcattagtgccatcactccagaagggaaatagttcttctaaaattggactttgagaaggcttttgacactattgaacatgaagctattttgctagtaatggaagccatgggttttagtgctacatggcttggatggataaggaagatcttttcttctgcttcttcttcttcagttctgatcaatgaggtacctggaaaaaatttccattgcaagaggggagtaaggcaaggtgatcctctgtcacctttactctttgtattaggagctgaacttctctaggtcattgtcaacagagcttatacaatgggtcttctatcaaagccttttccatcagactttgacccaaatttccctattgtccaatatgctgatgacatcctgctctatttaaaagctagtggtaaagagctctttactctaaaggctttattgcaaaccttctagctgggaactggtctgaaggtaaattttaataaatcttgtctcattccaataaatgttgatgaagggaaagctcaaaacttagctgcagtctttggttgtcaattgggatctttgccatttacatatttgggtttaccccttggtaccactaagccaaaggtaatagattttgcacctttagtggatagaattgaaagaaggcttacatcaaacgattccttcctgtccaatggagatagatttacgctggttaattcagttttctcttcactacctacttattacatgtgtactctaatgttgccaaagacagtgattgatagcattgacagagcaagaagacattgtctttggagaggttctgaggtcaactccaataaaaaatctttggcagcctgggataaggtttgtaagcctaagagaaaaggtggcctgggagtgctaaacctttctatccaaaatcaagctttgctcatcaagtttttggaaaagttttacaataagaaggatttgccctgggtcaatcttgtttggtcctcctgttatggtaactctgtccctcatctgacaaacttgaagggctcattctggtggagagacatttgcaaattaatggatgtctttagaggtattgcaaggtgtcatctgaaaagtggaaatacatgctccttttggtatgatgtatgggctgatcaacctcctctttttcacactatgtcaaagctttgttcttttgctcaaaaccagaatgcatctgtctctgattttccgtccattgaggccgaaggaaattttacactacctttatctgttcaagcttttcaggagtttcaagagctcacttcttcccttgtggatatcgagttggttaatgaaaatgatgcttggtcttatatttgggggaatatgaaatattcttcacaaaaattatatacactgaatttcagagctattaagcctccagtccattttctatggttatggaagtgcaaagcagtttcaaaagtaaaggtttttgggtggctactcatgatgaatagattgaacaccaagttcatgctagattataagaattgtgctcctccggattgtgatctttcttgtgttctttgtcaatcggtagctgttgaagacttaatgcatctgttctttctatgcccgtttgcccaaaattgttggagtcttttaggcattacctgggatactactcttcctttggaaggaatgtttataaggggcaaattggattatcaggggagttgtttcatggagaaattcctttatgctgcttggcatatctagaaacaaaggaatgggttcatcttcaagcaaaagatcccctctttcatcacttggaggcaactcttaatgggtgacctcttccttttgttgtttagaactactgcgagatatcacggtgtaatcataagttggattaatatgttataactttgttcttggtttctttaataaaattattcaaacagcgggggccttccctgttctgttctcgtcaaaaaacaaagctcaacccaaaacaagttttgaatgaaatgtatttgggcaaccctagaaaagggttggtggggggtttatatagatcccccccaaaatgtgaccgttggaggggaatctttcaacccacgtcggatagtccgatacaagatcggatagtccgatattttaaacctccaaggcaatgagaaacagagaacggagttccatgaaattttggactttccgagacatcagactatctaatgttaaatcggagtatccgatattttagaagaaaaacttcgtcctcaaacagagactcaagttccatgaaattttggagtctctgtgtcatcggactatctgatccggcatcggatactccgatacttagaaaaactcactcgataggattttttcaaatcaagatagagagtgaagttctgtgaaaaatcggatagtctgatacatcggatagtctgatttcaaatcggataatctgatgttgctcaagtaaaaatgcaataactttttactccgaactccgatttcgaagatcttggactctatagaaagctagttttgtgtgctatcaaacccaacataaaacatggcctaaaaccttcaagagatgttaaaaaacttgcaaagaaacccggtgtaagtgttgtgacaagtgaaacaactcaggatttaaattttggcataggtttttcaactcacacaaagatgaagcattttgagcactagtattcaaccaactatatgcatgtggtatcccccttaatagtacggcatcctaaactcaaatgtaaaaggaaagttataccaataggaataccttcacaccaatttctttcttcacttggaggattaccaatgacaaggtcatttgatcatcgggaagatctcatcttcttgatctttgacatttcatctttcatttctcaaatgattgatgcggataattcatagcttcaaatggcctcgcacggttcatcacgacacagtcttcactcgcccttcaccaccggattcggttcgtcggcgccaagccccttgcttgcccttcaccaccgcatggtccatcgcagctgagcggctcttgcgcttcaccgtcttgccataggtagtcactttatacccgcatcttcaatatcttctctttaattttcatctatcgataagtccatttcctagcttcttcatcggactaatcacttgcctatacactcaataagtgcattagtcccttaatcgtttgtcatcaataaaccaaaacccactaggggcatagatgctctttgaatctccccctttttggtgattgatgacaacacgattaaagcttacaaaagattgataataaatgattttgaatccaaaggttagtttgagctcccctaaatgtgcgcatacaagtttatgaagtgaacacatatgcacataattttgaaattgtgagagctcccgctaactctttgcatccatggggtgtattgtgtgtgaaggagataccaaaattaaaacaacacacacaactaaaattcttggcagattcaaaatgtatcaaatgaaattcttgatgccaattgcaaaaacttgattctatgccaattgattccgttaccgattgagaaagcatgagtaatcaagttttgtaaacaatttcaagtatcaaaagataatctcaattgcatgtggcatggtgatcaaataataagcattcacaccaattgataaacactttcaaatattctctccccctttctcatttactctttgcatctttaaagcatgcatttcgataatttctctcaaatatctcatcctttgatcaatcttttctttctccccctttgacatctaacaccaaaaagggcataagtagggaaagaaaagcaaagggatccttgatgagggatcatcgagtatttacctctcaattttatatttcatcacttgtgattagaaaatgaagatcaatttcacataaagatcacaagtaaatcaataagcattgagatacaaattttgcgcatagaaagctcacatgcagaggttttaaagcatagaagaaaaagtcttccctttagtccttctctcctactttggcatttaagcatggtaagaagagaacatgatatacaatgaagaggatcatcgagatttgaatttgccaaaccacttcttcacaaattcaagtgagattcaagagttttgttaaaaaaaaaatctcacccaagattttcacaaatgagttgcgcatgtatgaatctaatagtttgtgctaagaccaaaaattcacatagaatgaggtctccgagcacattgattcactaagaacaactttgtgactaatacttgcttattgactaaacaagcatttcgtcacaacattttgcaaattaggctaattagcaaggaatgaaacttgtcctagatgcacagacaaggcaagtgatccaatcataccaatttagataacaagctatggatcatcgagttaccttccttgtgaatttttgagatgcccatacgataaaattgatatcttgaagccaatttgaatttggcaccttgatgggcttgatgaaatctcttccttgatttgcttgattccaatcccgagaaagaacttaagctttcccatcacgaacatgtttaactccttgatcacagtctgcgtcctgatagtgcttgtgctcttcttgtaaggccatgacccgattcgttttagcatgtgcaccatcttccttctaatagttcaaagacaacaatagagagtaacattcacaaattttgcaaattgagaatgaatagttactccctttttgtatgtcatcgaggatgttgtagggatgatctcgttgaacgatgtggtgaattcttggatggtacaccgatgggacttaagcttgcatggtgtaactttgctcttgagttgccctaggcatcaatcccatccacttgtgccggaagcatgtcttcatgttcttcatggttaattgcggtaggttgacttcagttgtttgaggttgatcaagtagtccaccttgatcatcatggagttcttgtggtctcaccttccaaactgtcttcgaagatatttttaatatcctatgagactaatcataaaaatacacttgataacaagttagtctcaaaaaacacaaaacataggatataccccccctaaaagtgtgcatccaagttcttaaattacttgtagaaacgcacttgtttaatgaaaacaaatggggagtgtagcctatattttagagaaaggcacataaaggattctcaagaaaacacttgtgccaaaatataacacacattataaaatgagcatgtaaattatcggaagatattggattaaagcatgacaatctaccatatgaaaaactatttgggttacccgtgattcttgcatggaaggataacctttaagtatgcatgttcttgtgagcttggagcctccggcctagattcttcgggtgaccaaggaatcttcacggagtctccggggtatccacccagagactccgggctcgatggcatggtgatagatgagcttgattgcaaatcgagcagtcttaccaaagcctttggttccacaataaaatctgcaataaatcttgtagataggtcatagaacattacatatctttcattttgggagttttacccaattctcaaacaaatagaagccacaaaaatcacaaagatttagaaaactgaaagtttcaggatttttagattttggaactcaaaatgagcttggaaagggcatcataacaatatccaaatgactttagaaaaatccaagtaaatttagaagtgaagtccaaccatagaggatcaaaagtaattatgtaaactccttccaatttgcaatacattgagagatataaaaatcacaaatcagccaaaaatcatgaattttctgaaaatttcagcaatttgagcaaagtgagaaaaagtcaaattctttccaaattaaatcggaatgatgccaaaccatgcagaaatgatcatttcacttaatagaaacttttccaaaaataatttctcaaaaagatttttctatcaagagaaatgtaaaaaagagttttgtaggccattcacgtcaataaatctcaactaaagtgtcaaatcacatccaaataagatttttatgaagtttgacatttggaaagccttagatgggttaaagatactaattcatgtcaccatatgcttttgccaaatatggttaaatcaagatttttgatgaacttcgcaaggctgcaacatttgaatggttggtcttttctaaaagctttgaactaaagatatgtttgaattgactaaccctaaaagttttaaataggaaactttttcaaaaactcaatagattttgatttggggtaaaatctcacttttagcaaaaacaagatcgcaatagattctttcggaaataagaaattttggctccaaaagcattgtaaaacatttcaaacacatgttacacttttgaaaatatttccacaaattttggccttttacataggatttttgacttttgaccaaatatgctcttttaaaaaaacaatagatgcaacttttgaaaacttttatgctttgagagcaaagggatacatgaatgtggtttgcttaagttcaccataatgtatctcttacatgaaaaaaaaattaacatttagggataaatcacaagattgagcaaaaagatacataaaagctcacttttcaaaaacagtcctccaaaagtcaagaaatagcaaatgagaagatattggattggaatgcatatgtatgagcttgacatacctccatgaaccaatatatatcaagatacatggttctagtggcaaaactcactcgatactacaatatgaccaaatagcattttaaagactaccacaacatcgatttgagccaaacacatttagaggatgcaaatgacaagaggttatagatttccccctaaacgtgataaccaattacttaaattcaacttattgcatcaactatgaaatgttcaagaaaagcattatgcacaagtataacctacacaatgttaggacataaatatttaaatgtaaatacttgttaccgagatgacattggttcttgatgtagaacaactatcctcatatttgactccaattttgcatattgtgtgaacttgattttccacaaatgagtcaaacctccaatgcatctccaagtacctatttctcactttagcacattttggtccccaaaacattagatccataaaggttagtcacaagagacttaggcacccaaatggcctttgtgctagtgtgtggcgaacaaatcaccctagtagcacaaatgtcatttttggcattcctaagcaaattatgatcaaatgagagacttggcttaggaatgttacccatgggacaatttttaccaatatgtccctttgcccggcaattatagcaaagtcgacttttgcttctatattgcttttcggtttgcttgttgccggtttgcctctcacttgatgttttgcattgttcatccaatgtgcaagaataccttgaggcaaagtgtcccacttcggtgcacttgaagcacttgatgtgaggaatgtccttcttcttgtttaacttatttcctttcttccaagggcaatctctaacatgatgtctcactttcttgcacttgaagcaagtaatggaactcttgatcatcttttgatttcgtcccttgatataagcattgatggacttgctatccctttgatggatcttggtgcaagccacggttgattcctccacaagcttcttcaccatgccctcatggttatcttgagaaggttgagcaatgcacacaagtccataatctatttgcttctcccttttgcctacacaatccaagtcacatatagtgctcggggaaatatttgcttgggagcaactagggttagtacaagtgagatcaacttgaacatgaggctcataggattttaccattggaactatcacctcatgagatacctctagcatggcatgagaatccacaagattctcatgagaacacaaaagttcatcatgtttttcttgtaaatccacatacttgttagtgatctcgtcaagttgagatttaagctcttgattttgcttctccaaagatgctacacaagcaatagaattagtggcacaagcaaattcattttccaatttttcatacctcataatcaatgaagaatgaaaatccttaagtttcttgtgttcttcggttagactcatgatatcttcattcttcttaatgaggcatgcttgttgcttcttaatggtctccatgagctttatcacaattgtaatatccttcttgctcaagtgatcaaactcgaagtcaccatcttctcccataaagcaagcatgatctttggaaatagaagatgagcatcttggtgaggtggattcttcacttgtccgctggcgctcatttacttctcccttctaaaggttagttccacaagtactatatgaagtagagcatttatccatatcatcctcacacatatacttggggctaggtgagatgcatgagtcaacaacacaatagaatatgacaaattcattatcggtgttgttggaatccaatgggagaattggacgatcatcaaccttacacaccaattcattaccttcaatgtagtcatgtgttgatgataaggtggttgtgggatgattatcttgatcatcgaaggtagtcgcaatttggtgatgaagttgaacactcctcaagtgcttcttccaaaaagagtacatcatcacatttggaatcatcacatttggacttgtcgtatctctccttgagtgtggttgtcacgcccggaatttctatccaaaattccaaacgcttacatgtgtgtgaaccctcgtccaggaatcagccgaggcacacaataactgtcacaccctgaaaattcaaaatatataaattgttgtttaattggaattttttagaatttattttaaaagcctagaagagaagatctaattttaattaataaattccaatataaaatggggccagataaaatttcattaaatactttgcttaattctataattcctagatttttctgggatttatttgagctaaggaagtatttttaataaatggaattgcatttaagaaataatttaaattgaaaaaggttttaaaaagtttcttttggctttggaccgaaagtcggcccaaaacctttctctctctcctcggcccagtccggcccagtccgccgccgcgcgcgcgcgcgtccgcccgctgacaggtggggcccacctgtcagggtcatcgtcaacctccggccgcgccgcccgaaaccctagtttcgcgccgccgccgttcctttccaaatccggccgttcctttttgtttccggtgaaattgattgaggggaaacaatctttgggatctcctctaccttttctcctttggaaatatcggctaaatcggtttggaatgtgtttgattcgagttcgaatcggatcggtctctttccttcaaaccccgatctttccttctcgtcgccggccgccgtgggccttcttcgtcgcctcctagcccctttaaaaggacccccaagctcttctctacccgccgccaccttcgccttcgcctctcgtcgtccgtagcgccatagcgccgtgtgccctagcgccgccgtcgccgccgtcgctccagtcgtgcgccgccgccgttctagacgtcgccgtcgctcgggaagaccgccgtcgtggtcgccgtcgcgtcgccgtcctcgttcgccctttcgccgtcgccgaagatcaccggagcgccatcgccgccgtcgacccgaagaccgccgccgtttcttcgtcgtcgccgtcgccgtccgttggtcttccgccgctcctttggttaccggtgagttcgccgcgtcgcgctctacccgttggtgctctccgttcgtgccgaagtgccgccgttcgccggcgagcatgcgcgcccgagccgccgagccgccgccgccggtggtgacgtcaccgccgacgtcatagtcgtcctcttccgtgagccgccgtggacccgatcgatctcggccgtccgttttggatggatcgatctcggccgtccgttcgcgtgaaccgccgccgtgcgcccggtccaccgaaaccctagccgctgacgcaataaaccctcttttccttttcaaaaataattcattattacgtcataattcaattaaaatcaatttaagtgttttaatccgatttaatcttcaaaaattcataactaattcatcttagctcggatttagttggttcaagtctctaaatttttctaaaattgagatctacatgttaaaaatatccatatgtactgttcatgcttgtttatgtgctgttttggtgattttgcttctttttgtttagattctgttgtttccggagagtctgttttcgccggagaagaatttgaagagttccaaggccagcaaggcaagtcacacagatcccaaacaaccctttgagcatgttgatcctgtttaaagctactgtttctattcaactattgcatttattttcgaatgtcattgggtggaattaacctattctttgttatagcccttttgttcttgattactttattccttgataccttgggttattataattagactagctgagctttatttatattggttcaactagatattagatataattgcttagccctgcttagaaacattagctcacttttgggataacttatgactcactattacttaatgatggcttaatgatagttcacgatggtcaatcgtgattggttaattaattaatgtgccaactaaaacctggtaatggtgggttgtgagcacatggttttgatggtcgtgctcatgacaattaaggaccggttcacgagtttcggttgtgaaacattaaccgtgccaaccacaagccagcatgggcaacggctttatcttttgtatagcatggttcattgcggggcaccagactgagaagtggcggagataagcccacgggggtcgctggggagtccatgccttgtttataagggggtgattatgatccaggaaaggtgcgctgcagtggattgtgttatgcaaggggtattgtcacaactcctttccgaggtaccgtggtggtattgaggcacgtggtggtattacagtggtacacctctgatcagagtaaaactattcgaatagccgtgcccgcggttatgggcgggtctaacaatgtctttcgtgattagtctcacccttctcaccatagtaaatgatgctataattggaaataatttgattagctcctggtttggaatggtacattcctggtttggagatagaactgtgcagccgggatggttgttcagaatggttgggcctatacaacagggtatgttgtatagcgttggattaatattgattaattattacttaactgttttattaaattctcaaatatttgttaaatgcggtttatgcaaatgagaccctactatgccatcctttgttatcctgtgcacttgcatatttgctgcgtggcttgctgagtatgtcatatactcaccttgcaatcattcatcagaggaagagttctacagtgaagctgatggtgtggaggattaggtgtagccctggtcaagctgcctgtggagtggagccgtctgcgccgtttattttatttttttccgctgcttagatctttattgattgagaggaactatctacctctataatgatattttattcgcttattaattagagtaataattgtactctattatcaatttgttattgtcaccatgtgcctcaataccaccacggtacctcggaaaggagttgtgacaatatcccttgtacaacacaatccactacagcgcaccattcctggatcataatcacccccttataaacaaggcatggactccccagcgacccccgtgggcttatctccgccacttctcagtctggtgctccgcaatgaaccatgctatacaaatgataaagccgttgcccacgctggcttgtggctggtacggttaatgtttcacaaccaaaactcgtgaaccggtccttaattgtcatgagcacgactctcaaaaccatgtgctcataacccaccattatcaagttttagttggcaagtaattaattaatcaatcacgattgaccatcgtgaactatcattaagctatcattaaataatagtgaatcttaagttatcccaatagtgtgctaatgtttctaagcagggctaagcaattatatctaatatctagttgaaccaatataaataa

SEQ ID NO: 6347 - DNA, 66379 bp, Oryza sativa
attgtgaaacggaggaagtaataatttgctgactttataagtttctgagcctacaaaacaaagaaggcttattcttctagatcaagtatatgacttacgatccatgctatccatacattgtatttagttttagcttaaacatggacttaagatttaactattcaaagacaatattttgtttagttaatcatgtcagtcagaaagcgtgttatgctcttttgcttatgtgtattgctacagtaaaaattctgtttaaaacatgttctatattgtgaaaagtcggaaatgcaacataggcatacgagccatgcatgatactcttatgactatttatttctttgtccacgaaaccaacttcaacgagaattacgggtaaacaagatatacaagccatacatgatacacatctaaccaactctaactacatgcatgtcaagagttctagttgagtctcaaaagtaccaagattcaactcagattccccactacaactagaacaaaaactttacattgcatgcgtagggaaaatgatcatacatttgagattgagtgatttgcacatggttcaaatcaagccaatagtacgacgtctatctagcaacccggatgcaccaaactccaatatcaggaaaagacaaaaaaaaacattcttagctacattatacctttgccttgctctatccaactcggggtcaaatgttgagcttggatcaacagttgtgaccatctgatcggaccatatttacgccaaggtcctaaccaacctttgtcaagtctttacaagcttgaactcatccttgtcaacatgatgttcatgtcttgatgaccatcaacacatggtgtcatccattagtctcatcacgacaatacataactcaaaggaaaacattagtcctgacaaatcagttgtatccttccatagatgactaatcggttgcatatgaaatatatgaatacaatagttgagtactcatcaagaccacaagtgccaaatacttgcatgtaagcttaagtgcaaagatccaatataaactagataataccccgcacgttgcagcgggacatagtgcataccaacgaaagagggaaaattcaatgagaacatttgatccatcacaatacatgtaacaaaattctatgagaatatttgatctatcacatttaacaaataagtgaaattgcgttcttgcccctctttttagggtttttgattttatctcatttgatcaactatagaaaaaggaattacgcaacaacaaatgttccctcttttttaggattttttattttatcttatttgatcaactataggaaaaagaatttcatgacaacaaattttggaaataataactcaataagtagaaattcactgagagatcatgaaagttttgagtattactgtcggatataaaaggtctaaaaatgtgtaatgatcataaacctgtttgttgcaccttgctataaatgaccacctgtaatattcttttcatcttgatatatatggttgattgatagagatgggttacattatttgactgaaataaattatactgcaataagaaagaaactaagttacgggatacaaccttgaaatttctaaaataatcactttaattgaagaggaaaactgaattctcttctgaatcataacataagtgaaatatgaaggtacatattagtgatcagatttacattcccaattggtgaagcatataatgtattggcacgcttaatatgatctactccaatatgaaaggagggggaatgtaacataaaatttcataaaggataaaataagtgatacatggtgtcaccaatggacaggcagacggaaagcacacccagtgaactcaacaaaaaaaaaacttttgttttaatttggtaagccaattaactcaacatgaaagaatgagggaagagaagaatgtaccttatccaacttgaagattgatgaggacagaaaacgaaaagttgagaccgtgcagaaacacaaaaacaaatctcagctggtgtttgtaatggaacaatgtcgctgaaggacatcatggttgattcgtagtagttcaattactacgaatctcagctggtgtttgatgggttacactatgatttaaaggtgggtgtcatgacagccatgaaacgtagatgagggtttcctagttttgccatacatgaaaaaggcatgaaggcatcacgccgtggaatctcaatgatttgggggagcgataacgatcgcgacgttttcttttcctgccgttccaattgatgactacgggaaaagaacgatctgttttgcatgatggctggactggtgtggtggacttcaatgggcttcattgtaggcccgtccactagaagcctagggacatgacgtttaacgctgatcaaaccacacaattccaatctaatggtccaaaacaattaagatgatgtggcaaagcgagagagcaggaaaataaaattagtggggatgacttgtataggtatatagcactacatgaattctaggcttctgtgacgattacattatgacgatatcagcctgtttcgtgtcactgcctgccagcagtgatgaaatggctgtcatcacaaaaggtgggtcactaaccagcttctgtgaccaccaaaggacatcgtcattgatacaatgacgatagttctcctgtcattgatgaatgacgagacaaattcgtcataacaaattgaaccgaataacaccacgtgtatgatgacatgtgatacagatgacaaggcaggtgatgtagcaaatgacatggcaattcacattcggcccatatacatgggcttttttattctcaattacaattggcccaaatattttttttgacccagctacaaatttgcttttatgggccaatccaattaaaaagcaatcacagaatataaaccacaaccatttgaataattatattataatcacattccagccataattaatttcccagctcatacaaaagcaagttccagcattcagtttgcaacatgttccatacaaaagcacaaaacatgattacaaaatgatccatccaccatccaactacacaagtcccagccgactacaaagttcctataggtagtgccaagttcttgcaccaaaaaattccacctagcagccactacattaacacgagccatcaaattccaagctcagacacctcattcctgccatcaaaaggtgcatgttttcagttgctgatgaataaaaagtccattttgtttggatttggaggcaaacaaatgagcaaacagtgtttagagagtaataatccagcaggtaaattgagtaataacaatatattgatatggctcttttccagcaagtccaaacaaatggctcttttctagtcacaactaaatccaaacaaatggctcttttgcagctaataatccagaaaaaatagagtatctagattaatcaatgaaatggctcttttccagtcacaactaaacaatatctaatttcacagtaacaacaactataaataatccatcaagtaaattgaaataggcaattttgatacacaccatgaacaaaaaattcagccaccaatgaaacagtacaataggcttgatatggatgcaaatgcacaagaaacaagttaaagctatgtacctgagcatacaactagcttagggaggattgatctgaccttgtccaaatgctattatttgtcgaaggaggtcctgatggtgaagtgagggattcccgggcatgcatatcctcctagcaattaaagcaaggtttcagttttgcattattatataaataaaggttcattacgatttatcacatcttattaattaaaaaaaatagcacatcttacctcactacacaactgtgtccttggagattccaaatgtataaaagaaaagacaagttttacagcggatctaggagtagcagaatcaatctagacctttcatattttctcatccgatggactatatctatttatactaccaccttaaccactagcagtagaacttataaatcaatgtcttagatttatactactaaaggagatcactgtaaaagcccttaaaaaaaaggcatctgcttggtcaatcttacatgtttcagatagcataaaaagactccgacatctcgtgcaaaaattgaacttactgtttacacccaaatttggcacctatggacgaaatagaggaaaattgccaaagtttggaaagtaccgggtttccttcacggggccggtcagaccgctggtatatgggcggtctgaccggctagtagggccggtctgaccacaggtatgtgggcggtcagaccagcagggtctgagtccaagtctgttttcgtcgggtctcaggtttccttgctcgggaagacatgttttgtgtttccattggtttctatcccgagttggacatggaggagggcctgtagagggcaaaaccaacccctatttaagggacaaggccggttcattgtaaaacccccaaatagaatttacttgaatcgttcttttactatgtttttctattttaccccagtttagtccatcttcgtcggtttgcgccgtaaaccgtccgccgccactgcgagagtgcgacatctctttgtaggtttgtcctgaaaaccttccgttttgcccacgagacgggtagttatcctcatatcgatctaaatcggcctagaggctgattttgatctctaaatcggctccgctagccggtttagctgtttttcctcaaaacccatcttgatttggccgtttggctagattgagatggttggcgactccatacgaccgcaaggcgtttaggtgttgcgatcgtgcttgtcgacttgtcaaaaaagtcaacacgatttttgacgactccgctggggaacgatgtaaccggccatatcacggccgaattttgtttaatctagtcatctcgtcgaatagtttgtttcggccaaacggccgaaattaatctataccttaattagtcgctgcactgttcttatcgctggattaatctattcggcggcgaagctatttggtcgtcatcaaattcatataagcacttgccgtgtgtatcgaaaatcattatcaggaagcagcagacggcttagcaacgtttccttattgtttcacacggcaacagagaaaagatcaggctactagagccgatctaccgggtcacaagcagcagaagcaacatcaatctgttagcacatacattagcacatctactgaagagaattaaaaaaaaatcaaagccgattcatattgtttcggctgttattgtgagatcgaatttctgaatttttgcttacacacgaggagacagaagcaattctattttagttgcacacacgcttgttatattcaaaggaaaaatcaacaccgtatattaatttatttagtcaaatatttcggctatgagctatatggccgaaattaatcaaggaatttcttcatcaaccatgatgagcgagaacgagatcatgccgatcacattggatgatttcgaaggagaagaccgcaagtccatggaggagtacatcaaggagatcacacaggaggcgttgatgagggcgtgcactaggactcgtcaaggcgtgatgaccaagcccgggccacgtcctaagttcgcttccgattttgtaagcaatgaagaggtaacacaatctatccaacaagtagcatctacaatagattcatctatgactgtttttaaagataggttagatgcaacttttgagggtaaatttgatgagtttttaagatttaaagtcggccctctcttggccgattttatggtaaaagataaagcctctaccactgctagccaagctcctatagatcaaacaagtagtggaaccaatggagtggcgcatatagccggtctgaccgggcctgatggccggtcaaaccgcgacttcaccgtcggtccgaccagccaaacggccggtccgaccgggtattatcccggcagtcagaccgggactcaggccggtctgaccgcgcctctggatgtcgctcagaccgggccctagaccggtcagaccgacgcaatcataccgattcaggggatagatccaatgaccaattctagttatttgtatcatcttagaacatttaatcctcctgtatctactgctgcgactaatccccaagttcccccacatgttcctaatgcttataatgatgttgctagggggtatcatcccgatactaggcaaggccaatataatcatattgcgccgcaaacacaacctattaggccaccaaatccaccaccaaatcaacataggcctgataatatggaggaaataactagtgggattattagggataaattcgggattgaaactaggaattgtgctaaggtttaccaaaagccgtatcctgactattatgataatgtgccatttcctcgtaattatagagttcccgaatttaccaagtttagtggtgaagatagtaggaccacatgggagcatgtaggtcaatttttagcgcaatgtggtgaggctaatagtgatacttttaaattgcgcttgttttctttatctttgtccggtaccgcatttacatggtttacttctttaccggcaaattatatttatacttgggctcaattagaacaaaaaattcatgatcatttttgcactggtaaaactgagcttaggttgtctgatttaacatcggttaggcaaaaataaaatgaatctgtcattgattatattgaaaggtttagagatattaaaagccgatgttttagtttgaaaataactgacaagatttggccaacattgcatatgatggattgcttgattctattaaagagaggttgaatggccaaatatttcttaatgttgatcatgtgttatgtgttgcatgaagcactggctcaggaaagccgggtggatgataatagcttaaatgctagtttagatgatagtgcaatatcatgtgtagccgaaccaagcgacggttcgaattgtgttaataatttttgcaatgatgccatagcgattatagccgaaccaaatgttggttcggattgtcttactagcttggatgataatgcaacaaccattatagccgaaccaagtgttggttcagattgtgttactaaattagacaataatggaatagccgaaccaagtgatggttcggattgtgttgctagtttagacaatgacatcattgaaaatatagccgaaccaagtgacggtttggattatatcacaagcgaaagtgaaatagcattgtcacctaagaccgaatcacaaatcagtcatgtggatgttggaaaagataatgataatgtcttgcgggatagtagtgagatagaatctaaaatagttatgcatgtatcttgaacatgtagattcggtcccatatccgtaaggatttgaggtgcccaacttcatgaaattcacaggtgagaatgctatgactacaatggagcatatcggccaatttattgatcaatgtggtaaggtcggtagtaatgatttgcttaagttaaaattgtttcctctttctttgtcaaactttgcatctacatggtatagtttacttgctcctaattcaatttctacatggtcataaatggagcatgagtttcatgattattttaaagatgcaagcttgatggagcaaagaccgattgatacttcatcggtcacttgtgaaactatttcggttacatctatgcctaagaccggaattgttagtgatcctctccctgttagttttattgatgttggcaaaaagaaagggaaaagtgttattattggggatcctcggcccaagaataggataaaaaatgcgaaggccgaagatcataaagttgcaaagggtgagtcatctagttcccaaaagaccaaaaagccgaagctcacttttgagatgcttatggctaagtacaataaaggattagccggtcaatgatttgataatcaaactagtgattcaaaaagaccaagatcatcttgtagaaaaagatttggtcaaacaccaaagcaatcggagccatcaactataccaactccatacaaacctccggtagtgatgccatggtatccatatccaatgtcaccatttggttatccttttatgtattatatgctgtggatgcatcaaccacctatgccgtattatcaagagtggaaggaatcacctaggtcagtaccaactcattcatttaactctagtcaagaccgtttcccacaaaagaatcggtccggtggatcaaaggtgaaaaaggtaaagaaggtgtgggtgagaaaagaagccaaagctccggaggtcgtcactattaaggaggaatctcaagatgttcaagtacctactggcacagttattaagaccggaccggaccggtggtcagaccggaaaaaaccggaaccagagcccccgccggtccggtccaggtaaaagatgttcaagtacctactggcacagttattaagaccggaccggaccggtggtcggaccggaaaaaaccggaaccagagcccccgccggtccggtccaggtaaaagaccggtatgcaattgagccggctatgaaccggctagaccgcccggtttcggagaaaaaccgctattaaaccgggaataaaaaccgctttgaaccgggctcttgacggctggcgacgaagcgcgtgcatggccgcatgggcacgcgctggtgggggagaaaaatgagtgaaaatacgcgctagggtgaattagaacccaggaccacatgggaggaagctaactcaccgaaccaccacgctaccaagcgccttgtgtttggacagaatgattaatatatttaacacgtattgaaccggattagaccaacggcctaaccggttgaaccagtgaaccattgaaccgagagcctcaccggttcaattaccggtccggtcttaataactatgcctactcgagatgcggcgaaaactatacaagcggagaagattgaagccgataccgttactgtccacatcggcggtctgaccgaggcgtctggccggtctgatcgccagactacggccggtctgaccaaccctcctggccggtctaaccgacggcttgcagccggtctgaccgggcccagaggccgatcagaccgaggggcattaaaggtgagcgggaaaattgagagcaacacaggagcttctacttcgcccaaaactattaagaatcattgtttagctcctggaaaacaaccacagccgaagtggataccttctggcttatctcgctctcaaaagaggaggctacagcgtcttcgagccataggtcaaaaagaaaaagacgccgaagatgtagagaataaaacatgtaataatttagagcctcgaacgacacctaagcgagtgtggagacctaaagaagtaaaagttaaaagatcggtgatttcatggagtagtgatggattcaatttgatgagagaagaatcatcggtcattaaaaaaagggtttgttggaaccatgccaccctaattttgcaaaatttgagatatgccacccgtatctcaatgacatgtaggacccacatgagtcaatgacatgtgggtcaggatggcatattacaaattttgcaaaatttgtgtggcatggttcaaattttcccttaaaaaataagtctccttcacatgatgctgtggatgttggtgcggtgttcgtcttgcctttgaaatcgtgcagtcgagaaagccgattttgcttggggggcaagacattattatgcttatgaaggaaccaagagaggatgaacggcgatagatacaacatcacatctttgagctgtcgtttgttggatgctaaggcaatgtatgggtttattgtgttcatcatcatattatatgcctatgccatgttagaacattgcttactatctagcacatgtgtgtttttgcttatcaaattgatattatacatacatgttgcaaataccagttctaattagtggaattggtaagttggcatataatttgtttgaatgtatgatttggctcatgagtctttgatatttatttgaagccaaattatggatgtttttatggatcgccatataatatatagatttcatatttattgcaccatgaaaattttgcttagtaattccgctaatgtcaatggtgaatatgatgatttgctctagagtggttttctttaggaacattgggattattaatattttgcatacatgctcaagccgattacttacatttgtagtttattcgaatctatgcatgtgacacatatgattttggtgattcattattgatcatacttcaattggctaagtgttttgatgccatgatgattattgtttcaaaagccatttgaattagtattcatctagacatgttagttggatgttatagtttttcatatgtctagagagaaggaattttggtccaataatttgatacaccaagcatctggctattatgtgaaaaaaaattatatactaaaggccgatgcttgatttcaaaagtttggacgaaattagcaaagtcatagaccaggggcggtctgaccggcattgcacggccggtctgaccggtggtaccggcggtctgaccagctctgcatgaccggtctgaccgggtagatagggcggtctgaccggtattgtgtggccggtctgaccgatcccggacaggggctggggggcacgttacaattgattaaaaggccgaattaattgtgaattcggacatttgtgcccatgagttagaaatagcttggagaattcctttgaatagaatatttgaaagatcctagtcttaaggttgatcaaaaattcagcggcaagagttcaaatacactttgcttgatggagagttatatcgccgaaatatagatggagtgctattaaagtgattggataatgatcaatctagagttgctatgggagaagttcacgtagggatttgtggaattcatcaatcggcccataggataaattggttgcttaggagagtggggtttcattggccgaaaataattgatgattgtttcaaatgctatagagggagtgaagcttgttaacggatcggcaatgttcaattagcgcctaccgctgtgttgaatcctatcattaaactatggccgttccgaggttgggctttagatttcattggtcaagtttatccttcgtcatcaaaagggcattggttcgtgctagttgcaatgggttacttcactaagtgggccgaagctgtgccgctcgagaatattacttacacggaggtaattgactttatttttaaagcatattgttcatagattcggtattccttaaactttgatcgaagatcttcttttatgtccaaggaggtgagaagttttgccgaattttatgattttaagttgttgagttcttctctttactacgctcaggctaatggataagccgagtcgggtaataaaatattgttgaaattagtcgaaaggaaaattgaagaacactcaaagaagtgatatgaggtgctttcagaggcattatgggttcatgggatatttaaacatgatgctactaaagtcactccttttgagttggtttatagacaaaaagctgttttgtcggttgaggtaaatcttggctttcttcagtatttcaagcaagacgacttgttgattgaagattacaatacctttgatagaaggcaattttgaagacgtcatcaacaagcgtttgaagactttgaggagatgaagatacttcaagacggtgttttcagagagcaatcaatgggaaatacttgaagaaatacttcccgagcatttggcaagatgcttaggaagtcctatggccggtaattagattatcgccctgagataacatgttctatgcttttaggttcacgtatgttcaccaaaaagacgggggtatgtgtttacacccaaatttggcacctatggacgaaatagaggaaaattgccaaagtttggaaagtaccggttttccttcacagggccggtcagaccgcaggtgtatgggcgatctgactgcaggtatgtgggtggtcagaccggcagggtccgagtccgagtctgttttcgtcgggtctcgggtttccttgctcgggaaggcatgtttcgtgtttccattggtttctatcccgagttggacatagaggagggcctgtagagggcaagaccaacccctatttaacggacaatgccggttcattgtaaaacccctgaatagaatttacttgaattgttttttttactatgtttttctattttaccccagtttagtccatctttgtcggtttgcgccgtaaaccatccaccgccgctgcgagagtgcgacacctctttgtaggtttgtcctgaaaaccttccgttttgcccacgagacgggtagttatcctcatatcgatctaaatcggcctagaggctgattttgatctctaaatcggctccgctagccggtttagctgtttttcctcaaaacccatcttgatttggccgtttggctagattgaggtggttggcgactccataccaccgcaaggcatttaggtgttgcgatcgtgcttgtcgacttgtcaaaaaagttgccaacacttaccaatgtggtgaaaacaactggaagaaaaaaaaacaatgcagagcatccagctaagatcgatgtataaagcaaaatatatcattagtcccttatgttctactactccatttcagaacattagccagctttattggtaagttcaatttcagaacataaagtcgacagatagcatcgagagtatcatcacatttttacctatgagctcatcctatatacaagatgctattataaaagtcggtgcactgtgttagcttactagattccaatataacatagaacaataaaatcaacggaggaaagaaaggcaagcagtgagacacaatacttgtgcagacgaaaacagccagccacaataaaacagtccatggcatattcatattataaattatagtattatactagcaggaatcagctggaagctatgaaaataggagctgctacataaaacaggactagcttggtccccggacaaatttaggaattagctttagctcttactgaaaaggtaacagcatgaatgaatgaatgaatgagttctagggggctagactgctagggttacacacacagttcaaattacagctaaacagaggcaggaattttggcacgaagcagttcatagccagaaacacttcgatcaatttcatccgtaaaggaacaccagaaacacgaattcatcgtagtgttcgatcgtatctgcgagacgcgactagaccacacactaatctaagcttcccacgcggaggaatcgccaactacacgagctctcacacgagtaaaacaaataaaatcaaaccccccagatctagcaactccgctccggagaccagggttttgacctcacttacgtcgcgggggttgggggagattgagatttaagagtgagggagatgaagtgaagggacttgtctagtgtactgactggggtggcgggagcggagagccctgtcatggtcggtgctccattgcatggtggacgccgccgccaccggtaactttttcgccggagggcgccgcggggggggggggggggggggctcgaacttgcgctccttcttgtcgccgtcgccgccagacttgcgctcaccgggggtgccaccctgcttgcccatgcctccgggagtgccctgccccatgctcctcgctggatctggccggcgggaggccagatctggtggccctgaggccggcctgccgccgcctacgggatgtaggtgagtggcttcccgcccgtggtgcgggacgaggcgacgagcaccccgtacccataggccgccgacctccgggggacgctgaggtaggggaatagggaggagagaccgccgcggcggatgagccgttggaggaggagtcgcggcggcagtggtagtcgccgtcggaaaagaagggaaaaaaagaggaaagaaaaaaatgacgcgcatggcgtcggcagcgcggcgttggcctcggcggcggcggaagacgcgcgcggcggcggaggaggaggcagatgcgcgggaggcagacgcgcgtggcggctgagtcgacctcggcggcccggcggcggcggggaggcaaacgcgagcggtggcggagtcgaacgcgcgggagtcgacctcggctgtgtcggagtcggcctcggcggcgagccggcgacggattcggcctcaacggcgacggcagagtcctcggcggcggcggcggcgaaggggagtagacacgggcggcggcggagtcggccgcggcgtcgtcggagacttcggcggcggcggcggaggcctcgggcggcggcggggaggcagatcgcacggcggcggaggagtcctcggcggcggcggtggaggggaggtagacgcgggcggcggagtcggccgcggcgtcgtcggagacatcggcggcggcggcggaggcctcgggcggcggcggggaggcagatcgcacggcggcggaggagtcctcggcggcggcggtggaggggaggtagacgcgggcggcggcggagtcggcggcggcggcggtatcggcctcgggcatcggcggagtcggcctcgatggtgaggaggagcgacgacggagtcggctgtggcgtcgtcggagtcctcggcggtggcggcgtcggcctcgggcgaggaggagcggcagcgacggcgaagtgaggaggagggagaaggatgggagagaaaagaagcgaaccgttttttttaatggtataggtgggtaattttttttccccaaaagcaggtgaaagcaggggtagaggtgcttttgagttgtactacaccaaaagctggcttttggcaaaagtagctgtggcttttgagccctttggttggcttttagcttttgcaaaagcaaaagcaggttgaaaagctcaaccaaacacacccttaacagtatttaccaaattgtatggataaaacgaacatttcaccttaaattttatttttggcatgaccgccaagattggcgcctaaaaatttggttccagccacaccaaaattttggcgcctctccagcattaacttttttttcaaaaaaaaatacaaataatatcttgtactttttaattttaatttatgagaactttaaatttaattttagactgatttttatgtttcaaatgcaaaaatcataaacaacaaaattgtagaactcatcgagatctacaactattgtattggtcctttttacaaataagttcatttgaacaattcaaattttaaattttcaaaatttaacaacttcaaacaaaaattgggtttaataaataattttaaatggaaaagtcaccaaaaccaaagttgtagaacttatcgagatgcaaaatttttattttggtcatttctccatctgactctatttgaataatttgaaatttgaaaaattcaaagtttgagaacttcaaatataattttttattagtgaacgacttcaaataaaaaagtcatcaaaaacaaagttataacatcaatatctataacttttattttggttttttcttcatccgataaagtgatagtaacattgttcacaaaatttatatatctctcttatagtttataaactatataagagatgtgtaaattttgtgaacaatgttaccatcactttatcggatgaagaaatgaccaaaataaaagttatagatattgatgatttatacaactttgttgttgatgattttttcagttgaaatcatttagtatttcaaaaatgttgtttgaagttgtcataatttgaaattcaaattcaaattattgaaacaaagccatatagcaaaatgaccaaaacaaaagttgtagatattgatgacttatacaactttgttgttgatgactttttcagttgaaattatttagtatttgaaaatgttgtttgaagttatcataatttgaaattcaaattcaaattattgaaccaaagtcatatagcaaaatgaccaaaacaaaagttgtagatcttaataagttatacaacttttttgttgacaattttttcaattgaaatcatttactaccgaaaaattatttgaattgagaggagggaggaaaatagacttccttgcaagggaggagcaaaaggactgggccggtggcctgaagagggaggaagagagagaggggctgcaggctgagggagggtgagagtaatacttgggccgaaaatggcccaagtacatagagaggaattttaatttgttttccatttattataataggttaaaatgaactttgtggtatgaaaattagttattgagctccgaaaattcacaaaaaaatttcagagaataatttagaccacgtagaatattacaaatatatttccagccatgatttttaaagcaaaatttttcgtcactaagcctccccatctcatactaattaatcgtcataaaatggaatgtgctaatgacgaatagctccgatgttacgagaaattcgtcatagaaggtcatatttcttgtagtaatgtaggttcaaaccaacttatagccattttaaagttttttcattcaatcataaaatgaaacgccataattctgatttttttattcataaaataagactagcgatgacttcaatcctaaaatactaaaatgagagacaagaagagtccacctaggacaaacgatttgtgatctagcagcaatgtagtataacaagattttttttgttttttaaaaatataatagttctatattttatgacgatccactattgtcatcgtgctatcttcacagagcccatgcaaagtatactatgatgatgattatgacaaatacacagtttggtcataaacagttatcatcctatgaacagtcgtcataaacagcctctctgtttatgacatatatgtgttctgtcattaggtaatcgtcacagaagcccagatttgttgtagtgtaggataataggtgaacaacatggatctagaacatgcacgatatatgtataagatatgctcccccaaatatatgcatataatggaatatataatggagacaaatatatgcataattagagaaaaaccaatggggtttgttccctacacatggagaacgcatgtagcaataataaagacacataaatacaaaccttcattatgttgatgttctcaatgtaaagaagactaaataagataaagttcaagtaaacattggtctcactcatatatactccctccttccaaaagtctcagtcgtattacgttttgctccaagaccaaggaactctccgacgcatttaaccatcgctacatctgcatggatttagaggaagcgacgcttcggttgatgcacgatacgcgtgtgtgcaacaccgcaaccgtccgcgcccaccgctcgcgaataggcaacggatggatttgcatgcatgcaaaagaatactgttcggttgctgagaggaattaaatccatgcatgtttaacgaagagaccagctacacatttaaagcctgcatgcatgcatgcagagtggaatgcgcccatctcatctggaaaaacaagaaaaccaaatacgactgagacttttggaaggagggagtattgactaggtgattccccgtgctttgctgtgggatttacgaaggaattctcaaaaaaaatggcaatcaagttagaagtaaaaagaaaaaaaataataaaacatcaggtttatcagtcaaatcatacccatgctttggtcaagcattgactaaaaacacacgatattatggattacaaagattgtatggataatcaatatcaaaggtatggcatataacaaagtaggacattcacatataaatagcatgcaaactttatttaaatcaaaataagttcgcaataggtccaatatgctcaaagattagtgatgacttgccttgctcactgtcttgctgtccttgttttgcagtcaactcaaccactccctcggaatctatatgtacgtgcgaaagattcgatttgaattcaattagaattcaaattaaatcaccaaaattcaacagtacaaaaataaatagcaaaagtgattccatcagctatatcttgattttagatgaatttaggttcaagtttcatttaaatccgagctaaaatgagtgagctatgcttgtttaaagattcaaatttgaattaattcaaacagttgtgaaatggcactgtgcagccgagaggggcatgattacagtggctgacatgtagggtcaccccatttctttttcctttgtttttattttcccatagaaaatgcagagagtcattgacaagtgggaccggccctatttgacctgggtccaaaccagccctttaatcccggtgggtcccgcatgccattgacagtaacttcataatcaatttttctttgatttttctaatcatccaatcccacgtgtaatagattaatttgcattggattaataggtgattactgtgcactaatctctatgtggggcccacagcttctctctctctcttcctttctttctctccctcggtcgtcttcctcctcccgacgcgcagggcagcggcgcgggcgcacggctaatgcgaccagcccgagccgggacggctcggccgtggtgagggaagcggcggcgcaccaccggagacccaccgccggcagcaacgaggcgcggcggctacaaggggcatgacgcgacggacgggtggcacggagctcacggcgagctcggccatggcgcgggagaggacgaattaaacctaaccgagcctaaattcaccatctagggtctctagtgaactaattcatgcaataatatggcctaggttagtttggaactagtgccgtccacggtgagctcaacggtggcgcaatggcggcccgtcggcaggctagcagcggcacacacacctcaaatcgagggggccaaatgtttctaggtcagtagagggtgctaagagcgcaagtatttaccgtgcggtggagcaacggcataggtcggtgatgcgcggcacggtgcgggtgaagcaggggcgaatcgacgtcggcagcgcacgcaggtgttcgacgcactctccccgacgtccagcggctcccggcgttgatgcaaggcagcagaagaagtagaggcggcccgagccacagctcccgcggtcagctacgccggcttcggctccaaccagtgatgatgaagcatgctcacaaggtgttcgatgaaatgtattcgaggaaaaggcagatagggatggagtttttatgggggggattggcttggggataagccaggatggcgtggaggataggatcggcagctggtgcactcaatggctgtctatacggcctagattagggaggttgacgcggctatgtttcctcctccttttccattaaagttctgtagcagatcattgcatctatgacccctatactgtgtgttctagccctagctagagaggaaggctccgttttacccgctggttacaatggaggagggacccggcatccgcattcggataaggtggcggacgtggcgacggcgatgcgcgcacatggcgatggcagagcggcggcttggtgagggcgggttttcgggtgtagggcggttggatagggtttaggggtggtgtgggggtgacgtcgcggccgttacccctcggctccgagacgatgggcgacgcgacgttgctgatgcgcgctcccgtggcggcgcggctttggcgcgggttttcggtggctcggtcggcggcgggcccacgcggtgtggcgcacgggcacgcccaatgcggcgcacgagcagagaaggcgcgtgcgcgtgcacggggaggcggatgctgcgctgggtgtttggccgggttagaaccgagtcgaacacctggcgcacaatgaacagagccaggctgtaaatttagggtttttgattgattttataaattgaggaaaaaggtctatttcaatttatattttcaccaatgcattttaacgacaatatgaagtattcaaatgtgaattttgttcaaaattaatattgtccaaatttttaaattgtactataccttttatgatttcctatacttttgggattttggtatttattcgttttcaccatgtgttggtttaacataattatcctatataacttgtaggcttggacaattattaattataatatactaatatcaccatattaatacaatggcacattggtcgagtttatttgtattaacaatgtatttacacacggataggtttaatctatttatttcacaaaagaaattgagacttggcacaatattgatctaaatatttaattatatactcccatcattcaatctctatatataaagatcaatttattttatgtgatcaattattttatatgagtggatgccatgacacagtcacaatattaatatttgacctataaattaaattagtaattaaccttctctttatatggctttgttgtgttgtgcgtaaatatctatagggttcataataaatatcttatttttataattgttacgtagttgtatagctttagcttaatcttcaatcgtgacaatttatagtttggcaagcaatagcaaccataacatccaacatgatgcaaaagttttaaaaagttcaaaattttagtgatttttattgtcaggaattttcaggatgttacaatgcattgccagcaatgttaggttcgacaacactaccattgttctggtcataatttgtaattcacaacatagattttgggaggcaaaatgtttgcatgatgggcttttctgcagtttcgtggatcattaatattgatccctacagtgttcaattctggtattgtttggcaatccaggacgaaatatgtagtgatgtcagatgttccttttttccagttaataatttcagatgttcttttcacagcacctaaagctttgcggtgatagtagagtcgccaaccacctcaatctagtcaaagctaaatcaagatgggttttgataactaaaccggcttgcggagccaattctagatagaacgatagacaactacccatctcgtgggaaaaacggaaggttttcaggacaaacttaaaaagaggtgtcgcactttcgcagcggctgcggacgatttacagcgcaaatcgacaaagatggacaaactaagcaaaaaactaaaagcaatatgaaaaacgattcgattgattgtttgtagattgattagttacattgatgcaaaagtttggcaagcaatagcaaccataacatccaacatgatgcaaaagttttaaaaaattcaaaattttagtgacttttattgtcaggatttttcaggatgttacaatgcattgccggcaatgtcaggttcgacaacactaccattgttctggtcataatttgtaattcacaacatagattttgggaggcaaaatgtttgcatgatgggcttttctgcagtttcgtggatcattaatattgatccctacagtgttcaattctggtattgtttggcaatccaggacgaaatatgtagtgatgtcagatgttccttttttccagttaataatttcagtatgttccttctttttcagatttcagatgaagaatcatcgacaactaaaatgaattttctggagaaatggacaacaagattttcgctatagtgtactccctccgtactcgtaaaggtactcgtaaagaaaatcgttttggacagcgacacggtctccaaaatacaaccttgacttcttgtttctctaaaaatatttattgaaaagtgatatatgtatacttttatgaaagagtgaactgcatgttggactatattttcttacccttgtttcacaatgatctaggtgttatcaaacatttttattttcaaccagctatagttacttgagcatgcaatttggactagacgctcacatgtcaaccagaccaggtgtgtctctccctcttccccttctctcttcctcctccagaaaagtcatccccatccccactatcgctccctccacttacctttccagtctgcctatagtagtctcgctgcccatctgttgtttccgtcgagcttgagcatctagattaggagcttgatgactagatcaagcactaaaccagatcctgctgccgctaccgttgcaagagcaatcagcagaacacatgggagaaaaaagagtagcttcagggcagggcagttgaggcgccacagcggtgcaagtggagctcgagcacgtggcatgttaggcggaggtcgagctcaagcacgcagctggcaaaggtggccacagatggagctcgagctcgagatcaggggcaatgtagacaaagctcctctcttcaaggccattaattccccgcagctctcaatacctcaggctggtggtgttgtgctcacctgccggcttgacccaatgtcactgccaaagttacaaacgattggcagccagcagcatcttgatgtaggagcaagcagtggctgagtggaaacaggggatgtggaaatggatagggtggtctaatgtgcaacccaaggtaaaagactctggtctaaactaaaaatgttggatgtgccatggtccaaagtgaaactttggtcataataactagcccaatatgcaattcactctttatgaaattatttttcaagacaaatttattcatataatttttacaattacaaactcaacaacttaagagttattcatgatttatattccaaaggtttgacttaaacagttgtcctaaacgagtacggagggagtactaaatttttggatcacttttattttttttttggccctactcatacacttgaaattttatggttagccctactcatacacttgaaagtaacaacatgtatgtatatacaggcatacaacacatgtaagcatggcctatagcggaggagaggaaaattaatcagcaaaaacatggctgcttaatatttgtagagacgtgtggtgcacgtgcatacttactggtaagtactacctccaattataatcacataagtcgtttgactttttcctaatcaattttttaaaagtttgatcaagttaatagaaaaatataacaatactttcaatacaatacaacatattatcaaaatatatattcaatgttgtatttaatgagacttatttagtgttgtaaatattgctaaatttatctataaacttagacaaaaaacttagccaaagctaaagaaatttgagtaagaaaaaaactaaaaacggcttatgatatgaaatagaggaaatataatatattaaaacaattattgaagccaaatctagccgtaatatttctaaaagttgaatctaaatattcaaagagatattagtggtcaaagtttaacatcttgactgcatgcatcataaaaacatcacttatttgtgacggttggtaagaaacacattccaggagtttaatctagtaaagttgaccaggtcaccttcatcgagatagatgcaagctcacccaatatttgttgactggaacatccatggttgattgctttgaaagaacaatagcgttcaacataatggttagagcctttttggcctaccttcaacttcaaatgcatccaagtgtccaaggatacagcaaccacatatcttcttaagccacatgactcaccaatagggccattgaagagttgaatttctttccatacatcactaacaaaacacaaggaactgagatataaattgaaaccactttgcacatctgatatgataacttgtatggtggcctctacggcccagtaaacacgtgctaaagtgatatcaactgcaccacaatcaccattaatgcgttttgtgaatggaaacgttgctgtaattagcccgatataatctattgctccatcaattaactgtaggtcatctttttcttgctctcctttttttatcctcatgtcaaactccaatagaacagagcaacacattgatatgcctcgcttggggccagtcatttcaatcagatctccctaaaacatcattaaaattatttaatagcatctcatagtaaactgaatgcaaagcttgatttcttttctagcaaagcataggcagatctcaaataacagtaacataaattataggcaaatttggccatgtgacaagatagtttgtactttgtagcatgtgctgtaggacactaaaatcattggcgcagctatggctatgccgcataattttgcaactatctgtggccactattatacatcttaccaaaacaggatagagaatctaaacaagaggtaaatttacccttgatttgagtgtttttctctacgttacctagaacagaccatgtgcgcctcatctttcctaactaaactactgtatggcctaaccagtgttcataacagtccgagacaattcaacagttcagttgacaatgaaagaagtcatacttttgatccgcaaatggatggatccagaactggtcaggcttaagtcatccatttggtctagcaaacaaattaaggtcaaaagtttctttcggtttatctctggtttaagtcacacatgcatattacgataattgccagcgtgtgttatccaaatagccacaaaactagagcgccccttggttgagccacaatttttttcttgaaagcacacgagagcattgcaccacattttattgtctcacaacaaaagatgcaaaatataggcacttttgcctaattcgaaactaatatataatttctccaataaacataagttgtccacaaagtaaattttaaagggttatgaaacccaacaaaatttatcatgcaaacaaaaaaccatcaatatgcggatcgcatataaaatcatggcatgagtgaatattttttttccagagtacaaataaaaatgaaagcataatttgcagatcctctaaggctcatgtattcacgaaacaatccaggtaagattttgaaggtggagaagatttgcgaacttaaatatttattggaaacaagaagtcgaaagggtatttatgtagtttaatgtctaagaaaattataattgtcattcaccatagcagtagacttgtctaatatcataatgacttcaaatcgaaagttcccatgtcctacttttggatatatttaatcacctccaagcatattttagaagccatatcaacagaacatgaacaaaatgtgtacctgccgcataatgatgggattatccctgctatagttgacaacataattaagcaatttatccaaatcatcccgcactgctatgtatccatataattgtatgcagtcattgtcaataggaattttagccaactttagtgagaaaatttgcatcatggcacatgctgaatgcatactgcaagtttcccaactaggtcggcaatctgttggctccgagaacatcattggctccaaccgagcttcaccaaaagatatcaactcacaaattataacaatagacaatgcttattacaaagtgataattatgctttccctattatgtgctaagtaccgaattttgtgtggaaaatatttaaagggacattgaagttgaccaaattgtcttttgttagagcatgctaaacttccatattgccaataagtagatcgtttcccatgtctgcagcataggtcaagcataggttttttctgggactattctaataaaataacatgagttcttaagtaagtacgcagaattaagagaataataagtccggcaccaccaaatacactctctaggtctaatagccacattggttaggacaagaatatgtaggcttttcttattacactttatggctacttatacatatgtggtaatgctgggaacatttcatggccataaatatttaggcatgtgtgttatttgtgaaattttagaaaaacaatgcatgtttgcatatgagtacgtaggtagagctttctaacataatcatgtatatgtgttttatgattgagaacaactaattagctattacattttaattttatatttgtaaggtgttttgtcggatcagtataatttttggagagatatgaatgatgctttagtgctttatgctgcagtacagctaaggttttgaaaactggtattcacaaaaatattggtctcctaacctccaaaaatttaaacttttgattggtaaatttaagaattgaaattttaatttacattaatatcctgccgaccagtaactggtacctaaatgacccgtcttaggcagttacataatagatggtatgtttgaaccatagatatatacataatgagcagcaggatcggctagaattacaacaatatttggatttcacctaagtggattgattgcacatacgaatgaaaacaatagtaggaaagaagaaaatataaagaaatcatattgtagttagagtaacaaatttacttggcattttggttaccagaatccatattatatttattagtactaaaacaaatcatatcaaattagaaaaagaaggagaaggttttgatcacttactctcatcgcggttagtgatacagaaatgtccttcaaaggccttatttctatatatagaaccatcacggtgtcttgaattctcaatgattgtcatcgagaacatgtcaacagcggaatggctaacaacgagcccattaattccccctctcttctctgctcgatacatctcttcagtgacagctcagtggtcgccttgggcagtgttgtacaaagatgcattggcatgaggggggaagcatctgctccgaaatggcttgccccatttgttctcccctttccctccaatgctggttgttgttgatccatacgaaaacctagtaccaaggagcacaaatgactagtgtatgggtcaaataagatactaccatatatcatcatctgctatgtggggaattcccttggaacgtcgcaggaatgcgagagaccagtaagtgcgcatggtgcgccacagcggtgttctcgccatcatgtgttgctcgcattagataagaattatccttaatgtttgaggtttgtttcagttagttcctattcattagcagattgtaatcacctatagaaggccagttcgtgatggaataaatcaagaaaaaattaatctacaaacttccttcctttcttacaccacggctccggggagggcgaggcctccccgtcgagcaccgctacaaccttcgcagcagtaatctctttctactctacaaatgaagcctgctaaataaataattgtaaacctaaataagctgatgtatcagattgagaacttaatttcttcgaatatatatcaatttcaatttttcttccggttagatttaatgtggaattaagaaaactttgtccgaatttgattttaaacactctagattcatagttcgcccaatccagattcaaaagaaaaaaaatcagcagaacgagctacagaagtagggaaacggaagaactcaccgggaagcccgttgtagatgccgccatgagtggagcatctcgctgatagggatatatagagggggaagagaagccacagcacaaggcgaaggaagatcggagaggcccggcgtcggattagggtgagagcgtccacagagacagggactccgaggagctacggctctggatccgccgcgctggtcgacctggattggatggggcttctggttaggctgcgggaatcgctccagaatcaagagctagcgcgttcctgtaggccttttgggaagaaaattttgtgagacatagggtttgttcatttacgagtaaattgcattgatagtactgtttagagcatcatcaacagattatctataattttctcctaaaaatttatttttggtttcctaaactgaaaataagaagtgaaaaaactcctctcttcaagagatagcctaaattcaatcttcaaaacttaaaagtgggcccttacgttaaactaccaagagaaaattccgttttttttctttcacgcgcagaaagatcgctatctcccacgcgtgggaacgaaggagagaggcgggattgcgtgattgggagcgactttcgcgcccgcatataaacggagcgaggaaccgggggaagggaactccaaaactcgggtagaagcgtaggagatctgttggagctgacttttggactaaaatctctcaaaattagttttgggaatcatataggtagactgttggtgatgctcggtgtaacttactgtataaacttgtgaaatgatagttttgatacatgaatttatctagttcgtgcgaacaaggaccaaaatagcttgacaatgttaattttatgaactgatattgattaggatgtgacgtgcatacgtgtagcgagtatactaagatatgtaatatttataaatttggtctctactttaattatcctttatcatggaagtgatgaattttatatatttctaacccttatatcattgctcggtttttttatctttttctacgaacactatatccattctatttttattcctagtttgcgtgcgtgcgttcatacaggtgagtgtacgtgcgttgtaagtgtttgtgtcgtactagtaattttaaaaaaatatatattttatctaaataaaaatgattcatacaattaatattatcagcaaaaccagatcaatagatttgtcaagctataaataaatgaatagtaaattgcatcgctggtacacgaggtgcaatctagttgacgaatttgtaaaatgctcgttttggtgcatgaacttatctggtgcgtgtggaggaaggaaaaaggacaccacatggctaatcttattaatgtaggggcttattaggatactatataaacatatatctaagaaggtttgctattagacatacacgggtccagatatccttagatacccggcctgatgggcacgggcatgggtgtaatttttttcccgtgagcatgcccgtccgagactcgagaacatagcgggagtagccgggtattgttttttgccagcagataatccatgcccgacccgatacatatgtatttgctaattttggtccatctcttattcctcatactataacatcccgggttttagctgtagtcctggtcacgctaatgacttggtcacactagttgagagcggtgtcgatggagccacgatgctggctaggacctataaatatgttgattgttgttctattatggatcaaataattttttgatcgtttccttgtcatttatttatcaagtcgtccatatccatatggatcattgatttatttatagttagagtaaacctggtgaggagtgggataatttagttttgtagcgtagattagttgtcacgaggtacacatgtgcacagtagaaatcacaattctttatttacaatttaccacgacaggtctgcatacatatatgcatataattgtacaatagaaatcttatacagcatgcatcacatatattgtgcatatacatggtgcttatagattatcataaactgaatcatctcagtcaaagattcaataattatttatttttcagaaaaactcttaagctctagggcaattgcatatcagtccctaaatttgtagtaatttacaattttaccatacttgagggattcaagtgcaaaagatcaaacacatcagactaccaattctccaataattagggaaattaacaaataggtctggttattccaccgaacaagctgtttacacctaaatttgatacctaggattaaaatagaaaatattaccaaaatttgaaagtctaccggtttcctccgaagtgggccggtctaaccgctgtgtgttgggcggtcagaccgccggttgagggccggtcagaccggcggtgtgtggccggtctgaccggcaggtccgagtccgactctgtttcgtcgggtctcgaagtttccttgctcgggaaggcatgtttcgggtttcctttggtttctaccccgagttggacgtggaggagggcctgtagagggcaagaccaacccctatataagggacatggccggttcattgtaaaaatcaatctactatcaatcaatcgaatcgtttttcatattgcttttagtttttctcttagtttgtccatctttacaaaacccatctaggtttagctctttgctagatcgaggtggttggcgactctaggatcaccgcaaggcttaaagtgctgcgatcgtgcttgtcaacttgtcaaaaaagttgccaacacaagccatgttgaggtgtcacaggtacagaatgggaatagccatgcaagcaggtgaatcaccagtacaagatccaccagggataaaataatttgtgtgaatcatttccaacccaagtctcgttttggtcgtgcaaaacaacacaagcagcagctgcggcagtagtagttacaaccatagaaccaagctataggaaaatcagctagagtgttagctccacccagagagaaatagctcaactgaagtccagctcaaaccaatacatgaaccaacagtagtagtaaccatggccaagcaatcagagagcggtgaaccaaatctaaaggaaaagtagaggtgttcagttcttggatgaactccaactataggaggagatgaaacttaggtcaagaagcaagatggagcgaaaaatcaagcaagaggatcagtctcaagaggaggaagagaatcaccagtagcagatcaagaaagatgtcaggaagtagtcaagcattaccagtagggtaagagccaaggaggagaattacctgagttccaagtagagtagggggttcagttcaagaaggggaacaatcaaccaagctcaaggtggagaagctcagttctagcaaaatcaccttagatctaaaagagcagcagtagaagagaagacttggatttctgaaggaggagctgaaccacacatttttcaatcactgtagaatcatcagaggtaaccaaaaactaaaataggggaggagagtagatcctgcatttatagtaacagcatttgttagagctagagtttcatgcagatatataccatccatcctgacctaaaaccttagcaattctaaatgaataaaagtaacaaaagttgatgataaagttaaagataagttcatgtctttaaatcctgacatatataaattatcatagaagaaatctgaatagtaacaataagcgtctgtagctataattttttaataaaatcaactagtgttcatgacataaattatttaggaatagagcatatatagaagaaccaaatcatgcatgtaacttataagctttcagattctagtcatctaaacagggcataacattgacatgtgcatatttaattagaattagttataacctaaacaaatcagactctagttccaataatactttagagaaataagtagtttatattagtatccagtagaacatgtagcagcatgttcagtacaagaattattctgaatatatggtataataacagagtaggtatatttacttataacagggtagttagagtaaatgatatttagactagggcatgcatctattagctttcatcagtgtagttttgtacaaattttatcccacagtgaactgaaactgtttcaaaaatcaaccaatgtatttagttcttcatataagtaataccgaatctgcagaattaatatggatagcaagtgtaaacgtacatatttagtttaggtgcagatacatatgcaggaatctacgagtctttatcacaagtcctagaagaacatatatcagttttagaacgatggtaggtgatcaacataaccttgctaagaccaataccatagaacacaattaattacaagttacttaagtaatcagtacattttgatatcaaaatcaagattcataatttttttttgtcatttgatcactttagttatattactatgatgcatttggtatacaggaattcatattaattatctgaattactactcagcacaaggacataaggatctgattctctagtgcagtagcatgtaaaaaaaattcaatatcttgataaccattgcataagtatataaaaggatcaatcctgttattatgatattaatatctgtactaaaaaaaataaatacacatccttgattcatttgagcatgcatccatgtattcatccatggcatatagtcatcatccaactatagtaaatcaattgatttagaaccctagagccagcagtataatcctgagtataacactatctagttggtcattaggactagttcaagaataaaaattcacagcatgttaccacacagaagaacaccattcaaatcacattacagaagtaggtagagaaggggatcagagaggaggagcttggggagacacagctggtgcgagccatgcttcactcaagggcgctggggttggggaattcccaacctgggattttcggttggcgtcgtcgtcgttgggagcagcagccgacgacggcatcgatgggagaggagctaggactgcaaacattggggcttcgctgttttgacactccgagtggatgataaatgggtccatctgtgtctataaaaatgtgggtccagtgtcattatagcaaaagttaatgtttgcagtgtcataattgtaaatcccccccgatgaataaggttgggcatggatgaccaaggagagaagctgtatagagagatttggacggggaatcaggggaagagaggaaagaaggtgtttacccccaaatttggcaccaagggataaaatagggaaaattaccagtttggaagtctgccggtttttctctggttgggccggtttgaccgccatgtataggccggtcagaccggcagtgtgtggccggtctgaccggcagagtctgagtctgggactgtttcatcgggtctcgaggtttccttactcgggaaggcatgtttcgggtttcctttggattctatccctagttggacgtggaggagggcctgtagagggcaagaccaacccctatataagggacatggccggttcattctacaaacaatcaatcgaatcgtttttcatattgcttttagttttttgcttagtttgtccatctttgtcgatttgcgctgtaaatcgtccgccgccgctgcgaaagtgcgacacctctttttaagtttgtcctgaaaaccttccgtttttcccacgagatgggtagttatctatcgttctatttagaattggctctgcaagccggtttagttatcaaaacccatcttgatttagctttgactagattgaggtggttggcgactctactatcaccgcaaagctttaggtgctgtgatcatgtttgtcaacttgtcacaaaaagttgccaacacgattttttgtgactccactggggaaatctgctcaacgtcatctcagctttgacgtcgccataacaaagcctccatcaactaaggcggaggtggaaccatccaatgtcataccaatcacattgaaggagcttgatgagggagcactcaaggccatggaggaacatctcaaggcgtatacccaggaaatgttgatgaagacgtgcactaggacccgtcaaggtgtggttctcaagccgggatggttgcctaaacctaatttcgatgtggtaagtactgaagaggtatcaacttctatccaacaacaaatagcgagtacaatagattcatccattgctactttaaatactaaattagatgcatctattgaatctcgttttgatgattatataaggaacaaactcggttctgtcatagccgattttgtattcaaagataaagcctctaccagtactagcaagcctcctgtagatcaaatatatagtaaaaccgatggagcgaatatgcaaacaacctgcgaagggtgggctacgcacacagccgattcaaccgggccaacggctggtcagaccgggttttatcctggcggtcagaccagtctgaccgcgcctctggacgccggtcagactgggtcctagaccggtcagaccggcgcaattattcctatacagggggtagatccaatgacaaacaatgggtttttataccatattccagcacctaatccccccgtatctactgttagtccccaaattcccccacatatccctaatgcttacaacgatcctactaggggatgtcctcccgatactagatatagctaatataattatattgcgccgcaaacacaacctattagaccaccaaacccaccaccaaaccagcataggcttgagaatatagaggaattaattagtggtatcattagggataaattcgggattgaagctgggaatcctgctaaggtttaccaaaagcctcctcctgattactatgacaatatcctatatcctcatgggtatagagttcccaaatttaccaaatttagtggtgaggatagtaggaccacgtgggagcatgtaggtcaattcttagcgcaatgtggagaggctagtagttccgatactttttaattgcgcttgttttctttttctttgtccggtactgcttttacatggtttagttctttaccggtaaattctattcatacttggcctcaattagagcaaagattttatgattatttctataagggtgaaactgaacttaggctaagtgatttgacatcggttaggcaaaaatacaatgaatctgtcattgattatggtaagggatttagggatgttagaaaccgatgttatagcttgaatataactgatagagatttggctgatcttgcttttaatggtttaattgctcctattaaggaaagattagttggccaacaatttcttgatgttagtcaactcatggaaaaagctccggctcaggaaagccgaattaaagatagtaagaaatttgttagatcatatgttaatttgattgattaccctgaagctagtgattctaataatgagggtgatcatgatatgtatgttgccgagtggtcatgaactaataaaaataagccttttgtttgttctaatttaatgccgactccttgtaaagatcgacaaagtgagattaagtatagctttgatgtggccaaatgtgataagatttttgattatcttttacaagaaaaacaaattgattctcgttctcattctacaatgattgctatgtgtttcgacgataggttcaatcggccatagatgaagaacgattgaaattttccgatggttccaagatgaagcttgatcatgatgcttttccggcgaatacaattaatttcaatgataagaaggtgttgatttggccgaagcaagccgaatctactaaggggaaaggaatggtcagtgaagagcctaggccaaagatgattgtgccaaagaatccagaagttggtgtttggaaggagaataggagtgaggcttcaagttccaaagctcctaagaagactaagatgaccttcattatgcttttgaacaagtatgagaagcaaggtggtgagaaaactcgcaataaaggaaagagaccaagatcatctcctagggagcgatttggtcattcaccaagacgttcggaatcacctacatatcatcgttctcaagacatgtcatgggggccttatccaatgccgccgccgggttatccttttccttactacgtgccatggggggcaataccgccaatgttcaatcatatgcctccaatgtaatacaaccaaggatggggaggaccaaggaggccagctcgtgagcgtttatcttcaccaaataatggttagttttatgctaaaaatcaggtcaatgaaggaaagagggaaggaaagcgcatcaaggtggagacaaggacttcagaagtgattactatcaaagtggggtctcatgatgtgctaataccttctggacatgaggttggagagtcttcaagcaacaaattcgaagccagaaccaactcatcgcagtcagccggtctgaccaacctcttaggccggtctgactgggccttcaggccggtctgaccgcctgtcgcaggccggtctgaccgggccttctggccggtctgaccgggcttcagcgccggtttgatgggagaatttcaaagggtagttcgggggtttcatcgtcttcgagtaaaatcaaaagtgggcattatttaccttctggaacagagccgaaactaaggtggatgcctaaggatttgacagctgctcaaaagaggaggttgcaacgtcttcaggcccaagaattaagagagagagagagaggccgaagagcaaagagatagaaggttcaatgagttgcgaccaccgcctacaaagatgtggaggcgtaagtccatagatattgaagaattggttgttgtgcaaaaggaggaggaagaacaatcggttgatgaatcatatccaaaggaagacatggatgtcaacatgatgtgtatgttgcctatggatttttgtgctatggatgaagccgaagttgctcaattttcactaggtcctaaagatgcggtttttgagaagcccgatgagtcaaactgtcatatgaagcctatttatctcaaaggtcatattgatgggaagccggtctctaggatgttggtggatggaggtgccgccgtgaatttgatgccgtactcgttgttcaagaagttggggcgtggagatgatgagctaaagaagaccaacggaggcgaaaaggtatcttttcggtggagcttatcgtgggaaacaagacgtccaaccgctttcttcatcgtctatgtgcaaggtaactacaatgttattttgggtcgttgttggatccatgccaattattgtgcgccttctaccttggatcaatgtttaattcaatgggacgacgatgatgttgagattgttcaagcggatacatcggccgaggttgcaatggccgatgcaacatttgagtggcgtcacggtaatattcaatgcttatcggggatggatctttctagctatgatttcattagtgtttctgatggcaaatttgtacctatttctgtaaagccggctaacatagcacgacaaggccatatcactttatgtaatgagtaaagaagctaatttagagtggttgcaaaaaagggtgcaagaatatcgatctacaaagaacgatattggtgaaactattgaagattttgacgaagtagaaaaggttggtcaagggtttacatcggccgatccattggaggaaatagacataggtgatggaactaagccaaggccgacttttgtaaacaaaaacatgacagccgattataaggttaaaataatcgagctacttaaggagtatgttgattgcttcgaatgagagtatcatgagatgccaggtcttagccgtggtcttgtcgaacatcagcttccaattaaaccgggttttaggccttataaacaagcaccttatcgtttcaatcctttgttatatgaccgggtcaaggaggagatttatcggttattgaaagcggggtttattaggccatgtcgttatgcggagtgggtatctagtatagtcccggtggagaagaaagggagtggtaagattagagtttgcatagactttagagatttaaataaagctactccaaaagatgaatatcctatgcctatagctgacataatgattaatgatacctcgggtcatcaggtgattagctttttggatggtaatgccggctacaatcaaatctttatggcgtaggaggatatgtacaagacggcttttaggtgcccgggatttgttggtttatttcagtgggtggttatgacttttggattaaagaacgcctgtgcaacatatcaaagggtaatgaatttgattttccatgattttctaggtatcatcttagaagtctatattgatgatattgttgtcaaatcggatggtatggagggacatatagccgatttgaagttagcttttgaaaggatgcgccggtatggtttgaacgtgaacctactcatgtgtgcttttggtatgtcggcagggaggatcttaaggtttatggtgcatgagagaggagttgagattgatcctaagaagatagaaaagattcgtgatttcaaagcgccgacatgcaagaaagaggtgcaaaagttactaggtaaggtgaattatttgaggagatttatatctaacctagctggtaaaatcgatgcttttgtccctatacttcgcttgaaaaaagaagccaattttacttgggggcaaaacaacaagaggcgtttgaggaattgaaaaggtatttgtctactccacccgtggtgcgggcgcctaaagccggaataccgtttcggttatatattgcctccgaagacaaagtcattggtgctgttttgacacaagaggaagatggtaaggaatatatcattacatatccgtcttttgggactcggattcggtgacatcgctatggcatggcacagtgtgacattggagcaatctggagcgttgaaatctgatcgaacggtccgctgcgccggcccacctgcagcctccattttcacccccaagcgctccgtttcctgccgcccaatgcccaatcccgcggctcgcccaaatcccacacgcgcgctccagtcctgccgtcccgcacgcgcccggtcctgcggaggtcccaatcccgcaccggagcagggctgccggcagagttccaatcccgcgaaggtcccaatcccgcttggagcagggttgccggcgccggggaagtgcagcacgccaaccagccgaggccggggccagagcgcctgccccgccgtcgccaccggataggtgggaggcaggcgtgcccctcgccgtgattggggaggtaggccggccgccgtgaggccgggggccgaggcccctgccctgccgccaagatttcggggaggagggctgccagagtgagccaagcatctgcagaggaggattgcaagtgagtgttgtcacatttgacacaacttttggcacaaacaaagaatataggccattcggtgtttttcttgggctcaatcagtttagagaaaccactatttttggtgctgcacttctatttgatgaaacagaagcatcatttacatggttgtttgagacttttctacctgcacataatggaaagcaacctaaaacaatttacacggatcaagatgcagcaataggaaaagccataaagatagtattcacagaatcatatcatggtctctgcacctttcacataatgcagaatgctgtgaagcatttatctccagtgaagggtaaagaggaagatgaaggtgaagaggaagacgaaggtgaagaggaatcgcatgttctctctgattttagtgcttgtatgtttggccatgaagatgaggcatcatttgaagaggcatttcagattatgagatccaaagttcataagcaaacatggttagatagcatttacaaggtgaaagagaaatgggctgaatgttatatgagagatgtcttaatgctatctgtgatgtctgaatgctccaagtttctatatggctgtttatcaacttctatatggctgtttatctctttctgtgttgtctcaatccatccaccaattatggggacatgctgtcaaatttttcagaaaataacatcacacaagttactgatttattcatccattgattcattcaaattacagcataggtcatacaaccaaaccaatctctcaattttcccaggtgttgctgctcacaaaaaaattacagaatcattctcccagcagcaatgacaacttccttatcaaccacaatggttaacacagtgcaacctcaacaaattattgtttcaggacaatgcacagcctaaggtaatcaggttcaggtacaccatgaagcagaaggacaaacagctaaactactgctgctgcaatcttggagatagagaacaaacacctaaacaacaattttggaaaacaaatagctaaacagcatgaaatcccatcgcctccatcggcaccccgacggccggctgcctccatcgccaaggatgacggtggcagggcagggccccggccctggcctcgcacggctgccgcctggtcccctccccacttgcggcggagcggcgccttgccggctcccatctagttcgcggcggcggccaaacgcgggcgagggaggcgaagcgacgacacggtcacccggtcccctccccactcgcggcggcacgacagcctggcgtctctccggcctggcgcggtggcgggctgacgtgggcacgggagacgaagtgacaaggcggctgccttgctctccgctggtcgccgtctgggacctctacgccggcagccctgctcccagctcgcgcggcggtggccgcctccctattcgcggcgacggcccggcgtccggtgcgggcgcgtgcggggcggcgggagtggagcgtgtggattgaggcgagccgcgggattggggcgtcgggcggcaggaacggagatcttgggttgaaaacggaggctgcaggtgggctggcgcagcggaccgttcgatcagatttcaacgctccagatttctccaatgtcacaccgtgccatgccatagcgatgttactgaatccgagtcccgtcttttggatgctgaaatgtggtatgtctttatagagagactttgtttatgtctatactatgcttgtaccaaattgcggcactatttgttatctagtatatgcatagttgcttgtcaagccgatgttattagacatatgttgcaaaggccaattctaagtgggtgaattggcaagtgggcatatgttttgattgaatatgatttggcttatgaaccgttgaaatctatgaaaggccaaattgtagtacattttatagtagaccatcatgtcgatattgcttatgatgaagagatttgcttagttgaagttataccttggaagatttattttgatggttcttcttgcaaatagggtcaagttataggtgtagttttattttcacctaatggcatgtgttatgaggcatcggttcgtttgaaatattattatacaaataatcaagctgagtatgatgctttattattcggcttacaagtgatggagatgattggagccaaacacatagaagcatttggtgattcggaattggtggtgcaacaagttgccggggcttacaaatgcttgtacggatcattaaataggtatcttgatcaatgcttggatattattgccaatttatataattttgctattagacatgttgctaggcgtgataattctagagcaaatgatttagtgatgaactctgagctccactcgagacactcaaggctgttgttggcccgatctttcggtgagttgtagataactacgatttgagagaaacgttgacgacctgactacaaccgtacacaacgttgttgtgttgtgccttagcgatcgatacacctctccgtgggttgttgatcttgccggtgcagatcaaccttattcctgcaaggaaatcgaataaacaagcaagaacaagataaaagcaatctgaattgcagataggaattgaatacaaatgataagttgggattccgtaacaggcaaaccagcgatctaaccgatcacgggattacacggcaaagtatcaaagctaaactttaatctaaacaaaacccaagaaatcttgaaggggtacctagctatttatggaggtgggaggatgaccaaggggaccctagggtcgtgctccaactgattggggcgcaccccacatgggccccacttaggccgggtcccaaacgaagttacaagcaatttggcccattataggtgacgtagcaccttatttctgcaatagcagcccactgagaaggaatttggcaatgaggttggatccgttggaaagatgactacgtgagctttccatcaagtactcatggacccaaaacggagctcgtatgcacatttggcggccatttgaattcaatacagtagcaggtggctgaattggattccaataattggaggacttgatcttgttatcatcttgttcatccatgatgtgagcaatggttgtatcaatggtagccatggtcacatcatcctccccttctccttcaaatcatcgagctcacaaaaatcatcaaactgaacatagcccgaattatttaaagaagatgtcaattctcgttcctctatttcattagcaatgtgaacgacatgcttaaaatcggcacacaaagaaacactagaaacaacatgtaagtgaagcattatcacacgactcttctttatcacaaggaacaacaagtaaatcaacttgtgacaaaggcatctcagcaattggttccactaatggctgctctactatagcatgaaaaatagacatgtgtagcttagcttgagaatactcacatttatttatctcagtaccatttaatttaccttgcaaactttcttcagacaccacaggtgcttcatcctctttcttctcaagtacaccattctccctcttttgttgaatgtgatgaattacctgcaaaatgttagtaacaggagagacaaaagattgctcctccaatgtttgcacatcatcattgcatcaggatataggagattcagaaataggagataaatcacattgttcatactttctcgcatttgatatgatctgactctcaatgctacgagcaaacatgaataggtgtccaatatgattatatttcacattagcaagcataacctgaacttcagaactaagccctttgaaaaatctacgcattgtgttttcattgcattcttttagaccactgtagataatgcaaactttgaattcatgaatgtactctcaccttgtgtttcagatgttctaatttctcatgaagaagacatttgtaataagaacttacaaaatgttttcttatcaaggttttgcattcatcccaagtttcaggtttgttactcacataactccaccaaaagagagcaggagaggtaaacttattactagcagccttaatcatttgagcatcagaaaaatcatatttatcaaattcattgtctactgctagctcccaatcaatataagcaacataatcgtatttaccattgtagaatggtaacttagattcaactcatgcaaaattatagtcaggtacctcatatgcatcttgtcgagaagttggcatctctcgtcgatggtgaagaagccgatgttgagcatgaccatctcgtatccccttgcgcaatcctggcatggttaatagcaaacaagaaacatacacaagaatatgcacgctcctatcaactactaggtagtggaagctccgatatcacacacactcaagctttttaccaagttcttaccaaagcaagcggaatggtgacgtacaccaactcggccaagcatcccaatggagtttggatgtatcgataccttggcaaacacttgctatacggctgcaatcaaatatgtggagctctgggtaggcttaaaatgtagcaaaggaatagcaaatgctcaaatcagataatacaaaattgaataatcattcaaagtcagtaccgtactggtcctaggctagaacgtactagagacgcgatcctagacacagacgataccacaagatagctccagaaacaactcaagcacactctgatatactaaagcaaactcaaatataagagctcatttttctcttttccatctttcttctttcttttttttcttttatttttcttttcttttatggtgcggcttttcatttctttttttatgcaccttcctgccttttttttctttctttttttgattttttttaccaaaaacagactcaaggacctcaatgtgatgttacagggactcaaacgtaaatataaaaatttacaaggactcaaatgcaaaagtccgaacccaaaattaaaattatacaaaaatggaatgctgaatttatactggttccatttttttcaaacggatctccaatccgacaatcgaaaacttgtcaccaagctctctagcaactcacggtgtagattgaaatcgagaggagagtggggagtcactcggcttgtagaggtggtgtgaagccgcacgcgagggggtgggaatcggctataaatttggaaatcacgcatggaaggaaacaaagtccagaaaccgatctgctatcctttctttctccttaaccgcacgcaacagcgatatgctatccttcctttctccttaaccgcgcgcaacagatcctcttccttgtgtgaacagaacaagcacaggcgaatgcagacggcaaaccccagatgcaactcagcaactctaagaccgactgataaaaacttctgaaaactagaaaaatagaaccctggcagcatggcggttccattttcgtaggtcccaacgataacaagtacacgacgacgacgacgacagtggtacaaaacgtgaccagaacctgaaactctaaacgaactaaacgctaagaccagcaacatgactcgacaatgcaacgcaaaactcaacaaagcaaaaactgaatgaacaatgcaatggcacaaatatggctaggtataggatgcaatttttttgtatggctattttctggtagtagtgttaacgaccaaatttgagaacactgagcaaaaaaaagctctgataccacctgatgaaccctgagctccactcgagagactcaaggctgttgttggcccgatctttcggtgagttgtagataactacgatttgagagaaacgttgacgacccaactacaaccgtactagacgttgttgtgttgcgccttagcgatcgatacacctatctgtgggttgttgatcttgccagtgcagatcaaccttattcctacaagcaaatcaaagaaacaagcaagaataagataaaagcaatctgaattgcatataggaattgaatacaaatgataagttgggattccgtaacgggcaaactggcgatctaaccgatcacgggattacacggcaaagtagcgaagctaaactttaatctaaacaaaacctaagaaacccagaatgggtacctagctatttatggaggtaggaggacaaccaaggggaccctagggtcatgctccacctggttggggcacaccccacatgggccccacttggcccattataggtgacgcaacaccttgtttctgcaattgcagcccactaagaaggaatttggcaatgagggtagatccgttggaaagacgactccgtgagctttctatcaagtactcatggacccaaaacggagctcgtatgcacatttggcggccatttgaattcagcacagtagcaggtggccgaattggattccaataattggaggacttgatcttgttatcatcttgtttatccatgatgtgagcaatggttttatcaatgatagccatggtcacatcatttagcatggcaagcatatggttataatgtgaagaagggagtattttttatattagaagaaccggtgcttgatttcaaacctttgggtgaaattggcaaaaatgcagaccgggggcggtctaacctgcgttgcacggctggtctgaccggtgactaggggtggtctgaccggccgtatgccgccggtctgaccggccaacccgggcggtctgaccggccgtatgccgccggtctgaccgattctagacagaaggttggggggcacgtcccgattgattcaaaggccgaactaattgtaatttcggacatttgtgcccaggatacagaagaggattggagaattcctttgattaaatatttgaaagaccctacacttaaggttgatcggaagatttggcggcaaatgtttaaatatacattgcttgatgaggatttatatcgccgaaatatagatggggtgcagttgaagtgcttagataatgatcaatctaaagtggctatgggagaggtgcatgaaggaatttatggaactcatcaatcggcccataagatgaattggttgcttagaagagcggggttctattggccgaggatgattgaagattgtttcaaatattataggggatgtgaggcttgtcaacggttcggcaatgttcaattggtgcctgccgccgtgtgaatcctactatcaaaccatggccgttccgaggttgggctatggatttcattggtcaaatttatccttcgtcatcaaaggggcataggttcgttgtagttgcaacggattacttcaccaagtgggcccaagccgtgccgctcaagaatatgattcatacggaggtaattgtctttattttgaagcttattatccatagattcggtatcccgcaaacattgactacgaatcaaggagcttcttttatgtctaaggaagtgaagagttttgccgaattttatggtataacattgttgagttcttctccttactacgctcaggctaatggacaagccgagtcgagtaacaagacgttgtcgaagatagtcaaaaagaagattgaggaacacccaaagaagtggcatgaagtgctttctgaagcattgtgggcgcataggatatctaaacatggtgccactaaagtcactccttttgaattggtttatagtcaagaagctgttttgccggttaaggtaaatcttggctctcttcggtatatcaagcaagatgatttatcaagtgaagattacaagaatttgatgggagacaatcttgatgaagtcatcgacaagcgtttgaaggctttggaagagatagagaaagagaagaagaggatggccaaggcatacaacaaaagggtgaaagcaaagttgtttcaagttggagaattggtttggaagacaattttgcctttgggtactcgatccagggagtttggtaagtggtctcctagttgggagggtccttttcgagtatgcgacattgttcgagggaacacatatttttagagacacttcaagcagagcgttttcagcgagcaatcaacagaaaatacttgaagaaatacttcccgagtgtttggcaagacacttaggaggttctatggccagtaattggattatcaccctaagaccaaaacatgttctatggttttagattcacgccattcaccaaaacatgttctatggttttagattcacacccaaattcggcacccagggataaaatatggaaaattgccaaagtttggatgtctgacggttttcctctagttggaccggtctgactgcggtgtataggccggtctgaccgccgaaagtgggccggtcagaccggcggtgtgtggccagtctgacctgtagagtccgagtccgggactgtttcatcgggtctcaaggtttgtgggcccccggctttacacaccagaaaccccatgtgtcttacaataccatttcctagatcagtagatggtacacatatggcacagttgtatatcacaagctgacatcgttatatagtttgaactatacattaatagtacaagggtagcccaaatgggatccaaatagaccgagcatggtcatgtactttgcaaaataccaaaagaagtagatgagatagcggaagcgaagcagcggcggtccaacgtactccacaagcatcgactggtgaacctaggtcccgactccaccggcttcgatatctcttcatcaacattgttcccgtatggtcgactccaactcctttctaaaagatttagttaagcaagggtgagtaccaaccgtactcagcaagccaccactacagaatgcatttagtgcacacagaggttcaaggatggcttggtttatttgcataaagcaagatttcataaatcatttcacaaacctatgactgagcagttttaactgaaaacaacgataagttgaagttatcattaatccgcaagggttcatccaccttccccaagcctcgtttggtccggtttaccctcgcatctagttttccatattcccaacatcatcatcatgaccttcctgcccatcgggcaagatcacaccacttaatctaagcaagattaaaatctatgagactagtcaagtgtagtacaagtcccggcgctcaataaccgcgagcacggctattcgaatatatttgatttactcacactgcagtggatgtacgcttttaatcccacactccgcgacttgcccaacacatgagcctagtcccaacacatgagactttccacgatccggtatttcagtcaccctcgcgtttcggcacccgctccaaggactatgtacctccattgcacccttggcacaacacaccacctcaagccggcggtgaggagagtcctggcgcccctgggatcacaatgggttatattacatataggttaggtccattttagatttctgatgtcataaaccaatccacatcccttcaccttatctcacatcacacttcagaaccaccatgacaggggtgccgtgctatagctgccttcatagctaagtcttcaccagttattatgtttgtgggctctacaccttccatagcctctagaaatgcttgaaacaaccatacaaaggtttctgtcttttcattccttagaaatccacaacccagctaaatatccaaaaaaaaaatacacataaggaagtcatcatagtttggaagtaagttactacaatttgcatagtctgtacagtttgtttttgctggaagtaaatcagtacaattttgaactatagaacagacactaaaagatgtaacttgtaaacttagttacttttttttcttttttttagaaaaaaatgtaacttcacatgctactggaagtaacttttatcaggacttgatgtaactcaatgaatccaacaactaacttaaggtgtactataatgtacaaagttattacagattttttagatttactttttttgcaaaacaaggagtacctgaattgattgcccatgtctgtttatcccaatgaatggtgcacaaggcatgttatacatgttcgtcatgtatgtgcagtcaaacgagatgcaatctttgtagtctttgtaggcatttcttgctgctccatcaacccaaaatatgttctgcaccctgtcttccttattaagttgaatcttgtagaagaaatttgggtcatcctttttgatttcctcgaagtgagcaattgtttgaggcatatctctacacctatacttgctccccatctttgacttgaaattgcttatgtcttttctagtgtagggtacattcctagcccctccatacaattctgacatcaattgcataattctaccagttgagagattaactccgtgcaacattgtgatgaaatctttttcctttttcggtattgctctatgtgaccttagaaatttcttaagtgaaaactttctaaccagaggatgtgtgtgttcttcaacaaactgaattacttcccacctagttcctttcctcttcactgtcatccttactttgcaggcagcctgtcttgttttacttcttttccttttctttggagggcacgcttgtcacgcccgaaaattcactagtaatttccgaacttatttgtgcataaaatcctcgtccaggaatcagccgaggtacacaaactgacaatttaatatacagattcatcaaattaactaaaacgataaatacttacttaagaggcacttagtcctcaccatgaagaaaactgcagcggaaaataaaatctagcgaagctccggctccactcccacaggcagctcaactggggtataagccaaacgtcttctccttctggattctttttctttaactgaggttgattgattagtgcaagaatgagcatatgacatactcaacaagccacacagcaaatatgcaagtgcacgaggataccaaaggatggcataatataggctcatttgcaaaagcagcatttagcaaaacatttaagagaagtaaaacagtggagtaattaatcagaaattttaatcaacactgaacagcacacccatgctgcacaggcccaaccatcctgaacaaccatacccggctgtacagatctaatctccaaaccaggagctaagcaaattattaccaggtataacatccataattattgtgagaggtgtgagactaatcacgaaaaacattgctcaactcgcccataaccgcgggcacggctattcgaatagttttactctggccagaggtgtaccactgtacccacaagacacgattccacacatgttgccatgccccgaagtaccaccacggcactgcaaagggggaaatcgtgacaataccctttgcacaacacaactcaaaacagtgcaccgttcctggatcataatcaccccctcaaaaaccagaggcatggactccccagcgacccccgtgggcttatctccgccacttctcagtctggtgctccgcaatgaatcatgctatacaaaagataaagccgttgcccacgctggcttgtggttggcacggttaaagtttcacaacagtagctcgcgaaccggtccttaattttcatgagcacgactctcaaaaccatgtgctcacaacccaccattatcaagttttagttggcaagtaattaattaaccaatcacgattaaccatcgtgaactatcattaagccatcattaaataataatgcgtcataagttatcccaatagtgtgctaatgtttctaagcatggctaagcaatcacatctaatatctagctgaaccaatatgtaaagctcaactagtcaagttataaaaacccaaggtatcaaggaataaagtaatcaatgcaaacagcccataacaaaggaatagattcactccacccagtgacattcgaaaataaatgcacagttgaaataaatagagaatttaaatataggatcaacatgctcaaaggattgtgtttaggatctgtgtgacttgccttgcaataatcggtcttcaattaatcttcttgaacacttccgacgcactcgcgaaccttcgcaacgacggaaacgacaagctaacacgcaaaacaaggaaaagactaataaaaaccaaataaacaatacataaaaagtaaacaaacatgtagatcataattttagatgaattatgagtcttgaacggcctcattctgacttcaaatgaatttattatgaattttacaagattaaatctatttaaagcccatttaaaaagaattaaataaatttaattcaatttatggacaattttaaaatgtagatctttattttatataacttttgcaacttgaaccacattaaactgagttacaatgaattagttatgtatttttaaagattaaaccggattaaagcatttatatggattttaattgaattatgacgcaataatgaattatttttgaaaagaaaaagaggattattgcgtcagcggctagggtttgcggtggaccgggtgcacggcggcggttcacgagaacggacggccgagatcgatccatccaaaacggacggccgagatcgatcggtccacgaccgggccaccgggaacggcaacgatgacgtcagcaccggcggcggctcggcaacgcatgctcgccggcgaacgacggcgcggcgacgcgaacggagggcaccaggacgatgcgggcattgcggcaaactcaccggtgaccaatgaagcggcggaggagcaacggacggcgccggcgacgaggaagaaacggcggcggtcttcgggtcgacggtgacggcggtgctccggcggtcttcggcggcggcgaagcggcggacgaggacggcgacgacttggcgaccacgatggcgacctccccgagcgacgacgacgaccggaacggcggcggcgcacggctggagcgacggcgacgacggcggcacaagatctcacggcgctagggcgcttccgacggcgagagacgaaggcgagggtggcgacgggtagaggagacacaggggatccttttataggggcaaggaggcggcggcgaaggcccacggctgccggcgacgagaaggaaaggtcggggtttggaggaaagagaccgatccgaatcgacctcgaatccacgaatttccaaacgattttagccggtgattccaaaagagaaaaggtggaggagatcgagaagatcatttcccctctatcaatttcaccggagaaggaaaggatcgagcggattggaaagcggcagcagcgcgactcggctagggttccgggcagcggcggcggcgcgaggaagacgaacctgacaggtgggacccacctgtcagcgacagagagagagaggagagcggcagctcggcggactgggccgacttgggccgagggagagagagaagagaggttttgggccgactttcggcccaaagccaaaagaagacttttaaaaacctttttcaatttacattattcatgaaatgcaattccatttattaaaaatacttccttggctcaaataaatcccagaaaaatctaggaattatagaattaagcaaagtatttaacaaaattttatctagcccaattttatattgagatttaacaaattaaaattagatcttctcttttaggcttttaaaatcatttctaataattccttttaaacaaaaatttataatttaaggatttttaaacaagaaaagcacttaacaattataattaatgataaaataattattgaactgttctttgtatcatttaggaattgaggtctgaaaaatccgagaaaattttagagagttgacttaatcatggagaatttaataaaaattaaatccatccatgctttatatttaggaaattttatttcccacatttaacttcacttgtaaattaaagaacatttaatataaattctattaataatttattaaataatttataaatcctgaaacaaaaatcaggatgtgataacgcttcacccgttttttcttctggaccacatttgttgcaaacaaacattactttgtcacgttctccatctttggctgacttccttgaagtgttgattttgattgaaaatccaacgcactttgcatacctgttatagtgagcccttgcttcctcctctgagttgaaagtcaaggtgaggtatggcacttgtgtgctgcacaaaaaatcctgtgatggcgctgactgtgcttctgaatcatctgtgccagagtgttcacttgaaattgtgttggcagtagcagttgttgcgccagttgcaacactagtatgcattgtgtctgcatgatctgacatttcttcaaatagttgcatctcatcattggcttcaaatacttgcatctgatcattggttgcaaatacctgcatctcatcattggcttcaaatacttgcatctgatcattggttgcaaatacttgcatctcatcattggctacattgtgtgctcgtaaacttccagcatcatcagcagtatacatagtttcaaagtcaaaagtgttgtccaaatttatagtaggaatctccatgctagtgtcagttggatttacagggaattatgtttcacttctgtcttcatcatcaattagtaaatgatgtagtggatgttcattttcaccagaaactaattccgggatactgttgaggtcaaaatccatttttgctgcatgtgtttcagactattagtaagtttatacagagcattcattgaggtaattcagtaattggggggagaagtaacttgcacatcacatgaaagtaaagcttttatttttttcagaggagtaattttgtcagacaattacatctgtggtatagaaaattacttgcatgttttagagggagtaacatttatatgttttgaagtaagccagtacagtttggaagtaagttacatgcaacaggatagcaactcttataactggactcgatgtaattaaataacctatacaaacatttctgtcttttttagatgctttctaggaagcaattttgtcaaattgagaccagtggctatactaattgaaagtgcatctaggcccctaatgattttgatgattgattacaatgcgattagagaggactaacatttttattcaagcaaatgtgaaggttgttaagtcctcaacatgttgtaatacaatgcatatcccgtgaatgcgacatcgcgatgcaatgcggcaatgatcaaatggtatattgtatctttttcctcgcattgtgtcgtaggaaagccgtactattaagggggatgatgcatagacatataaggagtgatgcgtgtgctcaaaatcaatttttcttcgaagcatttctcttttggagtgttctggaaatttttggaaggtccgaaaatagttttcggaagttccgaaaatagttttcggaagttccgaaaatacacagaattgtgtttgagtgttctagaaattttcagaagtttcgaaaatagttttcggaagttccgaaaatacacagaaccgtgtttgagcgttctggaaattttcggaagttccaaaaatcattttcggaagttccgaaaatacacagaaccgtttgagagctttctggaaattttcagaagttccgaaaatgatttttggaagtttcgaaaatacacagaagcgttctggaaattttcggaagtactttcggaagtattttcggaagttccgaaaatgggcgttgacttcgatttttctcagatctggaattttcggaagttccgaaaattgtttcggaagttccgaaaatcccttttattgcactccaacgggcagatcttgtgagggctgctggttccattccaattatttgtgcccttggcttgctctctctctctctctctcattcatttgagccttgcttcctcgattcatctctccacccgtgtttgatttggatttggtgtgtgtgtgagagtgtggattcgagcttgtgtgggtgcttcttgtggtctttgtgaagatttgtgagcacttgcatcatctccgggagttctttgcatcatcttttactcttggaggttgaggactcctagacggctaggtgtcactcccgagccatcgatctacttgtggttggccgggagaagtttgtgaaggccggatctcgcctccgcaagagaagagatacctcttagtgaaaggagaagtgcttagtgcaacctcttgaggaaagggttagctaagacccggctcttagtgagctcctcaacggagagtagaatcccctcaaggatttgaactccggggaacaactttgggagctacatcttggtgatatttcttcatccctctcctctagctttgcttgcttgtgctgttattggtctagttgctgattgtgccttgtatttcctgttatagtcttatagatctagagttttcattttttgtgtgcgctgctctgtgcattttcggaagttccgaaaatcatttcggaatttccaaaaattcctagcctagctccgaaaattactgcttccgcatttcttaagttttaaattagcctattcacccccctctaggcctaattgaccctttcaattggtatcagagcctaatctcctaattaggcttaactgcttggagagatcttgtcaggccaagcgggggatgggaacgatggtgataagggagctaagatcccttatgactatccctctacatctacatcttttgtgagtacctatagcggcaaagctccgtacttcaatggtacggactatgccgcttggaaacataagatgaagatgcatttgaagtctattaacccatctatttggagaatagtcgaaaaaggctatgttttgcagaatcccgaagatcccaccaaggaggacgacgagaacgagcacaagaacgttcaagccgctaatgcaatacttagcgccttgagtggaagtgagttcaaccgtgtggatggcattgagagtgccaaagtgatttgggacacgcttcggaacttgcatgaaggcacggatagtgttcgtgagtccaaggtggagatcctcaaggggtaatttgagagatttgtgatgttggatggtgagagcccaagcgacatgtacgaccggttgagcaagatcgtcaatgagatcaagggacttggctccaaggacatgaccgatgaggttgtggtcaagaagatggttcgagcaatcactccaaggaactctaacttggtgaccatcattcgtgagcgtccggactacaagactctcacacctcacgatttgctcggacgcatctttgcccatgacatgctcgtacaagagtccaaggatgtcatccaatacatcaaccaaagctcaaccgcaagcatcaagaaggaagacttggctttgaaggcaaaggaagaagaagaagagaaccgcaagagcaagagcaaggcggagatcgatgatgaagagatggctctcttcgtcaagaaattcggcaagttcatgaggcgaagcggcttcttcaagggaggattttccaagcactactccaacaagtcaagtggaagacactctgcaagagtgtgctacgtgtgcaaagagcccgggcacttcatcgcggattgcccccacctcaaggatggttcccacatcaaggaagataagaagaagagtgagaagaaggatgagaagaaggagaagcacaagcatagcaagagggaacattatggccaatctcaccttgggatgatctttggctccgactccgagtcaagctcaagtgatgaagaaggagtcgccacgttcgccgtcaagccttcatcaccaccgagactctttgactactcaagtgatgaggatgctccggtttgcctcatggcaaaggagcctaaggtaccttctcctcttaagtcatttaatgttgatcttgttagtgatgaggaggatgaggttgaggatgagattatggatgacgaattgttcaagtccataactaaggaatccctaccacacttgagtgagttgcttgggagaattgaggaccaatatgcaattcttgagaggcaagagactttgctcattcgtgagaaagagcggtctcatgaactcaagagtgagcttgttaaggagagagagaaaaatgaggcattggtacggctttacaagcaaaccaaagagtctcatgctaatcttgatgtggcgaacgctcaacttcaagagagagtggatggcttggacaaagcatacctcactcttgaagaaaagttcgaaaccttaaagaatagtgtctctctccctagcgagccatcttgttccaaaattgtcccaagcaatgaaccatgtgtgagatgcaaagatattgatattaacgcttgtgctactaactctattgccttgagtggtttgcaaaagcaaaatgagaagcttacgggactccttcacaatggcctacttaagtgctatatgggtagtaaggccctaaatgtcgcgaccgggaaaattgcattttcccgaacgctagtgtattaatccccgtcccaggaaaagccggggtacaccatacaaacatgatataaaagacacatctttattatatcgataatatttacattattacaaaggcacttaaggcctgacaatcaaaaataaacagcagcggactagcgggcctacggctccatcttcataggcgctcaactggggtataagccaggactccacctaagacttcttctccaaagcttctcttactgaagggggggaaaagattgagcaagagtgagtacaaccacagtactcagcaagccacaccggagatgcataattaatgcaagggagtacaaggggataataatataggggttaagttttgcagtaaacagcatttaaaagtcacttacttgcccaaagctattttgtaaacacgatcctagagctatacaatattattaatcaaggccatgaacccacacgaacctgccttaacccaaggcctacgatgattcagaccgaactggcaacccgaccctgggtcccagctcgtcccaagccaacccaggccaaccattccacattttagttgttaagcaaattttaagaattaaaacactgacttgggtacattgctcggcttgcccataaccgagggcgcggctattcgaatagattatactctgatcagaggtgtacatctttacccacaagacacatcttcctcacgtgtaaccacgtgccacataccaccacggtatacggacggaagacgtgacatagttcccaacccatcctagccataaacaagagtaccgacccaatcccacctacggccggaacccccgggacaggcaggcaggattgagccccctagcagcaggacaccagccctgtgccatgacatctcgactaccgggccgcagctcgtgtagccttcatttgtcctagagatgtccatcgacccccgacttcgtccatctccatccgtgtacttttgtttataaccagtctgagctacaaactaagccttacccactagacatgtggaagtacggtagtgctttgcaacagaggcccgagcttaatccttatagtacccgaggtacgactagcaaaacccaaccacgcacctcgagcccagcctaaaaccattttgggggttttgaatagagggggaggtgtgtgtccaattccaacataagccaaccattccatagtgtccaaatgatatgagaattcccaaagtctaaagttataaaaaccacctaatgttgtcctattaaacagcgaagcatctacctaaattcatactagtggaaccatgaatagagtacccactagttggggttttgtttattctagggtgaacaaggtaataataacaatagcaataataatgtcataacaaaggtaaataggcatggctaaacaaaacagtgataacgcgggaatttaaataaagcggtaatgcattaatttaaatcaaaataattttataaactgagattcaatatgctcaaggatgatgtgacttgccttgctcgctttcccaaacgtcggcttcaacttccacgaagagcggatcttccgaagctgcagcgtctacacgaccaacggaaaagaaacggcttttactctactaaactccatataacaagcagaaacaaagcacaaaaatgggttcttggcttcttaaggaaaaattagagacttgaacggtccaattccgagttcaaatggccaagttatggccatttgaagcttatatgctctttaaatggatatttgcgaatttcttcatttaaattttaatttaaaatcggatttattgcgtcagccgaggggaggggcgcgcggaccgggtccacaggagtggggcccacgcggcagcctcacggtccacggtggaccgggtgcacgcggcttacgccggccggcgccgtgggtcccgcgtgtcagccgtacccgagggcgcgggcggctgacggccgggccccacctggcagccgcggggcgcgcccgaaggcggcctcgccggcacggccgacggggaggcggcgcgctcgcaccccgatggtcgccggcggcgaccaccagcgcggcggagcggcgcccgagagaggggagggaagggggaagcgaaacggcggtccacggctcaccccgggtcgacggcgacaacggaaacggcgaccgaagcggagagaggcggcggcgcggctcgggtcgacgggaacggcggcgttccggcggtcggctggcgaaacggaggggtggacgaggtcggcgaggacgcggcggagccgaaggaggcgacgccgaggcgggagaaagtccgaggcgacgacggcggcggaccggagctcggcggcgacggcggagagagaggacgacggcgcgagctcgattccgacggggagagagagcggcgagtggcggaaacggaggagggaggcacggggaacgtttaaatagtgttgggagggggagagagcggccggatgagggggaatcggccgcggaagatccggccgccattgatgcgccggcgaaggttgcgggagcgtttccaaacgaatccgagggagagagagagggaaaagtggggggaaagagggagggaatcacggggagtgatttccccctctttattgcgcgcggggacggcgggaggcggcgggattcgcggcggctgcggcgctagggcacgggcgaggctgcgggagcggcgggaggatagggatgacaggtgggccccacccgtcagcgagggtggcgggcgggcccgcccgtcagcggcgcgcgcgcggggagaggccgagtgggccgcggggaggagagagagggaaagagatgggccgagccggcccaagagggggagggggggaaaagactttttagggtttttctttttataaaatcattttaactttgtttatttcttaataattattatttgtgctctgaaaattccactaaaatttgagggctccttttagaccaaggagaatttaacaaaaattctccgggtcacatttgaatttttcttgtacgtattttaatgtttgccaatttcttttcgaattttaattaattctattattccttttagagaatgatttttatttcgggatgaatttatcaggacgtgacactaaaggagtacctaggctatcaaagggacaacttcaaccatgagggtcttgggtatgttcctccaccaaaagggaaggtggacaagagtgtgatgatcaagaggccgcaaggtcttagcaattttgttaaggccaaaagtatccttcctaatgattatgcttgacattgttcttttgatgcatcttatattcttaggaagaatgctagtggtcgtgttgttgctaagtatgtaggcccaaggggcaagaatatttctatcaagagagtactttgggtgcctaaggcacttgttactaacatgagaggacccaaacaagtatgggtacctaaaactagaaattgatctcttgtaggaatatgtctccggtggaagaagttgggtgattgatagtggatgcaccaatcacatgaccggagaagaatcaatgttttcatctcttgatccaaatggcacttcacaagataacatagtgttcggggacgatggaaagggaaaggttatgggattgggtaagattgcaatctctaatgatctttccattgccaacgttctcttggtaaaatctctaaactacaatcttttgtccgtttctcaattatgttctatgggttacaattgtctttttaccgatgttgatgtgaccgtctataaaaggaatgattcctcggtagtctttaagggtgttctcaagggaaagctttaccttgtggatttttcctcaagtaaagccaaacatgagacatgcttagtggctaagtccaacacggggtggctttggcatcggaggctagcccatgttggtatgaggaatcttcacaagcttctaaagcacgattacatccttggactaacaaatgttcaatttgagaaagatagggtgtgtagcgcgtgtcaagccggcaaacaaattggagcacatcatcccgtcaagaatgtgatgaccactacaaaaccattggagcttctccagatggacctcttcgggccaattgcttatctaagcattggaggtaacaaatatggtcttgttattgttgatgacttttcacgcttcacgtaggtgttctttttgcatgacaagagtgagacacaagccatcttcaagaagtttgcaagaagagcacaaaacgagttcgacctcaagatcaagaacattcgaagcgacaacggcaaggaattcaagaacacgtgcatcgagagtttccttgatgaagaaggcatcaagcatgagttctcagctccatattcacctcaacaaaatggagtagccgagaggaagaataggactgtcattgagatggcgaggaccatgttagatgagtacaagacatcggaccgtttttgggccgaagccgtcaacaccgcatgccacgccatcaaccgcctttatcttcaccgccttcttaagaagactccctatgagcttcttaccggtaacaaaccaaatgtctcttactttcgtgttttcggtagtaagtgttacattcttaataagaaggctagatcctctaagttcgctcctaaagtggatgagggattcttgcttgggtatgggtcaaatgaatgcgcataccgcgtcttcaacaaaacctccggtattgttgagatcgcgcgtgatgtgacatttgacgaaactaatggctctcaagtagagcaagttgactcacatgtgttaggtgaagaggaggacccgagtgaagcaatcaaaaggttggctcttggggacatacgccctagggagccacaacaaggagcctcttcctcaacataagtggagccacctacatcaactcaagccgacgatccctctacctcaagcttggatcaaggtgaagaaggcgagcaagtaccaccctcaccgatcaatttagctcgcccagaatccaccaaagtatccaaagagatcatcccaccgacaacttaggagacatcaacaagggagtatccactcattctcgtattgcaaatttttgcgagcattactcgtttgtgtcttctcttgaacctctaagggtggaagaagctcttaatgatccggattgggtgatggcgatgcaagaggagttgaacaatttcacccggaatgaagtgtggactttggtggagcgacctcggcaaaatatgattggcacaaagtggatcttccgcaacaagcaagacgaggccggggtcgtaataaggaacaaggccgaggttagtggcgcaagggttcacccaaatcgaaggattagattttggtgaaacttttgcgccggtagctagacttgagtcaattcgcatattgcttgcttttgctactaacctcaattttaagctatatcaaatggatgtcaaaagcgcctttctcaacgggcctatcaacgagttggtatacgtggagcaaccaccgggcttcgaggatccaaaatttcccaaccacgtgtacaagctccataaggcactatatgggcttaagcaagcccctagagcttggtatgagtgtcttcgcaattttcttgtgaaaaacggctttgagatcgggaaagcgattcaactctttttactaaaaggcataataatgatatttttgtgtgccaaatatatgtcgatgacattatatttggttctactaacaagtcttttagtgaagagtttagtaggatgatgaccaagcgttttgagatgtccatgatgggtgaatttaagttctcctccggtcttcaaatcaaccaactcaaggaaggaactttcatttgccaaccaaagtatttgaaggacatgctcaagaagtttgaaatggagaatgcgaagccaatccacactcccatgccatcaaatggccacctcgacctcaacgagcaaggtaaagacgtcgaccaaaaggtataccgttccatcattggctcactcctttatctttgtgcatctaggcccgatattatgcttagtgtgtgcatgtgtgcaagatttcaagccgctccgaaggagtgtcaccttgtggccgtgaagagaattcttagtatttagtgcacactcctaaccttggtctttggtatcctaagggaacgaggtttgatctcattggctatgccgatgcggattatgccgggtgcaaagtgaataggaaaagcacatcgggtacttgccaattcttgggtaggtcccttgtttcttgtcttccaagaagcaaaactccgtcgccctatccaccgccgaagcggaatatgtttcggcggggaattgttgtgctcaacttctttggatgaagcaaaccttgagagactatggcctcaatgtatccaaaatcccactcctatgtgacaatgagagcgccattaagatagccaacaaccccgttcaacactcccgaaccaaacatatcgatattcgccaccatttcttgagagatcattccacaagaggcgacatagacatccaacatgtgagaaccgacaaacaattggtagatatctttaccaagcctctagatgaagctaggttttgtgagttgaggagtgaactaaatattttggattctcggaatgtggcttgatctattgcatgcatgtttgcttggtagaatatgtttgcataccactttgtgacaaaatgatcattcaattcatggatggacactagtcacttttgtggagaacttgaatctatgtgtatggggatctcatttttcaatgaattttggtcctagcacaatttgcaatagattcgcacattccctccttcgagggtgaatcatcttgtctcatggtaattcactctcttttgatctttggatcatccatttgtcttgtggctattgttttgtgtggttgattgcgtgctagccataagctcaaatggggcctaaatgttcgaccattcttttcactccttcttctatccaaagatttgcaaattgctttcatcaaaattcccagtgcgaattctcttgaaaaatgcatttcaaaatgtttgcaaaattgtttttcatcaaaattccggcgcgaatcctttcagaaaggggtttttgttagctttccaggttttttcggagttattccgaaaattatcggataattccgaaaattttcagaaccattgcgtcgcttctgtatattttcggaacttccgaaaatttccagaacagtcaaaatgtttctataaattttcggatctatccgaaaattttcgggacttccgaaaattcttggaggatacttaaacccccgaccgtggacctcttttctttctctcctctttcttctccacggtttcctctttttctccctcccctctccggcgacccaatcctctccggtgattcctcggcgattccccggcactcccctccactccaaccttgtgggagcaaggttgggagtcttcttggcggctacattgttgatcttccccgagttcttcacgttcttcgtgttcttgaggtatccaacttaaaatcgaatccctcgattcctcgagtttaatcttgcgatttccttcggtggagttgttaccctagtgccatagaccctgtagattcaatttcacaagtttttgttggtggatttgtgcaggatctaagttgtagtgctcgggctgaaattttcggaagttccgaaaattttcggaattattttcggaagttccgaaaattcctggctgagccctccaaccttggtttcgcatgattcttgcctccaatcacttgtaaatcttctctttggcttccttatactcattgttactcttgtcttgattgaaggatgcctcattgcaagcaaacttctcgcaagtccaagcgctctagggatcggtctcccactccttccccatcctctcatgaggactcggaccgtgattggtccgggcgagaagaagaggagaccggccctcaggtggccaatgttccccggggctcctctctcccacctcggcgctccactcatggggatgaagggtcctcgcggcagcctcgtgcttcctctggcgagggctcttctcgccaagctcacaccactgcgcctcctccggcgaggcttattggccccctcatgcttcatgctccctcacgccatcctcgccgagctgttcgtgactggcgccaaaagtctgacattgtggctgtggagcggaatcaggatcctcgctccatgccgcgcaccgcctctgatgacaggttctggacctctttccagcaagactacaatgcccatgcaatggatcgattgggaggctttggcgaccttggatgatcctgacctcaatgccgtcattggtgcttgtgagatgggggttcgcaatttcatgacccttcagcaagcttggtgcaaggagatcattgctcaattctatgccacagcctattttaatggtgatcgtgacattcattggatgactcagggctcgtggtattctatctcttatgaccagcttgccaatctgtggggttttaatgagaactggatgcggtacatgacccacttgcataacattgtgattcctcacaatcatgatttgcgccctctgtatcttcctggtggcaagttggggactactgaagggctgaagccttatcatatctatcaaaaccgcatccttaggcggaccttgactccaaaggatggtgatgctagcaacatcaaccatttctcccgctccatgctcctcaggttcaatcccccctgtcgtccctttcatgtctttctatttgtttggtaggaaatccgcatggcttctcttcagtataagagagggcttccctatgctcctcatataatgcggatgattgaacatgtcactcaccttcagtttgtgtgcgaggagccacataccgctctttccttgcgcttgcctaagcgcgggcctgtgcctcaggacatcccctccacatcctctcagtcgccttttgctcctgagtgtccttcctctgtggctcgtcgtgagccgtctcccttatttcgcattttgcggactctttttggcctttgctctacggaggctaaaaagaaccgccgattgcggaatttggcgaagaaaacggctcgtgatgtcaagtacctcaaggggctgcagga

SEQ ID NO: 6348 - DNA, 9590 bp, Oryza sativa
cggccctcaaccggcggtctgaccgcccaacacacggcggtcagaccggcccactcggaggaaaccggcagacttccaaattttggcaatctttcctattttaattctaggtgccaaatttgggtgtaaacacatgtccccctgcctttttgatgaacaacgtgaatctaaaagcataggacatgtttttggtcttaggacgaacccaattaccggccatagtacctcctaagcgtcttgccaaacactcgggaagtattttttcaagtatttcccgttgattgttcgctgaaaacgctccccttgaagtatctccaaaaagtacacgttccctcgaacaatgccgcacactcgataaggaccctcccaactaggagaccacttaccgaactccttggatcgagtacccaaaggcaaaattatcttccaaaccaagtctccaacttgaaacaattttgctttcaccctcttgttgtacgccttggccaccctcttcttctctttctctatctcttccaatgccttcaagcgcttgtcgatgactttatcaaggttgtctcccatcaacatcttgtaatcttcacttgacaaatcatctcgcttgacataacgaagagagccaagatttacctccaccggtaaaacggcttcttgaccataaaccaactcaaaaggagtaactttagtggcaccatgtttagatattctatgcgcccacaatgcttcaaaaagcacctcatgccacctctttgggtattcctcaatcttcttcttcaccaacttcaacaatgtattattactcgacttggcttgtccattagcctgagtgtagtaaggagaagaactcaacaatttaataccataagattcggtaaaactcttcacttccttagacataaaagaagcaccttgatccgtaattaatgtttgcggaataccgaatctatgaataatatgcttcaaaataaagtcaattacctccgtatgagtcatattcttcaaaggcacggcttcggcccacttggtgaagtaatccgtagcaactagcatgaacctatcccctttgacgacgaaggataaatttgaccaatgaaatccaaagcccatcctcggaacggccatggtttgattatagggttcaacatagcggcgggtgccaattgaacattaccgaaccgttgacaagcctcgcatcctctataatatttgaagcaatcatcaatcatcttcggccaatagaaccccgctctcctaagcaaccaattcatcttgtgggccgattgatgagttccacaaattccttcatgtacctctcccatagacactttagattgatcttcatctaagcacttcaacaagacaccatctatgtttcggcgatacaaatctccatcaagcaacgtatatttgaatgcttgccgccgaactttccgatcaactttaagtgtgggatctttcaaatattgaatcagaggaattctccaatcctattctgtatcctggacacaaatgtccgaattcacaattaattcggcctctaaattgattgaaacgtgccccccagcgttctgcccataaccggtcagaccgaccatgcagggccggtcagaccgctcggggtcgccggtgagaccggcggcatgcggccggtcagaccgcccctggtcaccggtcagaccagccgtgcaacgctggtcagaccgcccctggtcaccaattttgccaatttcgcacaaagatttaaaatcaagcaccggctcttctaatatcagaaataatctcctcttcacattatagccagatgcttgttgtgccaagtcatttgctctagaattatcacgcctaacaatatgcctaatagcaaaattatcaaaattggcaataatatccaaacatgaatcgaggtacctatttagtgatccgtccaagcatttgtatactccggcgacttgttacaccaccaattccgaatcaccaaaagcctccacgtacttagctccaaccatctccataacttgtaagccgaacaataaagcattgtatttggcttgattatttgtacaataatactccaaacgaaccgatgcttcataacacattccattaggtgaaaacaaaactacccctatgccttgaccttctttgcaagaagaaccatcaaaataaatcttccaaggtataacttcaactaagcaaacctctccctcataagcaacatctatatgatggtctactataaaatcacatacagtttggcctttcatagatttcaatggttcataagccaaatcatattctatcaaagcatatgcctacttgccaattctcccacttagaattggcatttgcaacatgtgtttaataacatcggtttgacaagtaactatgcatgtactagataacaaataatgcctcaatttggtacaagcatagtataagcataaacaaagtctctctataaagacatacctcgtttcggcatccaaaagacggcggctcaaatatgtaatgatatattccttgccatcttcctcttgcgtcaaaacggcaccaatgactttgtcctcggaggcaatatataaccgaaaaggctttccggctttaggcgctcgcacaacgggtggagtagacaaatatctcttcaactcttcaaacgcctcttgttgttttgccccccatgtaaaatcggcttcctttttcaagcgaagtataggaacaaaagcatcgattttacccgctaggttagaaataaacctcctcaaataattcaccttacctagcaacttttgaacctctttcttgcatgtcggcgctttgaaatcacgaattttttctatcttcttaggatcaatctcaactcctctctcatgcaccatgaatcctaagaacttccccgctgacacaccaaaagcacatttaagcgggttcatcttcaaaccatactggcgcatcctctcaaaacctaatctcaaatcggctatgtgtcctttcataccatccgatttgacaacaatatcattaatatagatctctaagataatacctagcaaatcatggaagatcaaattcattgtcctttgatatgttgcaccggcattcttcaacccaaaagtcatgacaacccactcaaataaaccaacaaaccccgggcacctaaaagccgtcttgtacatatcctcttccgccataaagatttgattgtagccggcattaccatctagaaagctaatcaccttatgacccgaggcatcattaatcatgatgtcggctataggcataggatactcatctttgggagtggctttatttaaatctctaaaatctatgcaaactctaatcttaccactccccttcttctccaccgggactatgctagaaacccactccgcataacgacatggcctaataaaccccgccttcaacaaccgatcaatctcctctttgactcggtcatatagcacaggattaaaacaacgaggtggttgcttataaggcctaaaacccggtttaattggaagccgatgctcgacgagctcacggctaagacccggcatctcatggtattcccatgcaaagcaatcaacatactctttaagtaactcgattatcttaaccttataatcggctctcatgtttttgtttacaaaagtcggccttggtttagttccatcacttatgtccacttcctccaatggatcggccgatgtaaacccttgtccaagcttctccacttcatcaaaatcttcaacggtttcaccaatatcgttctttgtagaccgatattcttgcacactttttttaaccactctaaattagcctctttactcattatacaaatttatatggcttagccgtgctacactagccgactttacagagataggtacaaatttgccatcagagatactaataaaatcataactagaaagatccctccccgataagcattggatattcccatgatgccactcaaaagtagcatcggccattgcaacctcggccgatgtatccgcttgaacaatttcaacatcatcgccgtcccattgaattaaacattgatgcaaggtagaaggcacacaacaattggcatgaatccaacaacgacccaaaataacattgtagttaccttgcacatcgacgatgaagaaagcggttggtagcgtcttgtttcccacggtgagttccgccgaaaagatacccttcacctccgttggttcaccattaaagccattgagaatcatgttggtcttcttcaactcatcatcctcacacctcaacttcttgaataacgaatacggcatcaagttcacggcggcacctccatctactagcatcctagagaccggcttcccatcaacatggcctttgagatagagaggcttcatgtgacggtttgactcatcgggcttctcaaaaaccgcgtctttaggacctaatgagaattgagcaacctcggcttcatccatagcacaaaactccataggcaacatacataccatgttgatatctatgtcttcttttggagatggttcacttttatcaaccgattgttcttccttttcctctacatcaatcagttttgccttctctatggatttaggccttcaaaccagtgggggtcgcaactcattgaaccttttatctctttgctcttcggcctctttctctcttaactcttgggtccaaagacgttgcaaccttctcttttgagtagccgtcaaatccctaggcatccacctaggattcagctctattccaggaggtaaataatgccctctattaactttgtttgaagatgatgaagtctccacatcgccctttgcaatcctcctgtcaaaccggcgctggagcccggtcagaccggtcgtagaccaccggtcagaccggccagatgcgccggtcagaccgacactgggcgcacggttagaccagcctgaggtgccggtcggaccgctatcgagtcggcggtcagaccggcctaatggcccggtcagaccggccgcacgaccgcggtcagaccggccagaaggcctagtcagaccggccgactgcgaggaactggtaccggcttcggattttctgttcggggacattccaattccatctccagtaggtattggcacatcatgagaccccactttaatagtaatcacttccgaagtcctctcctccaccttgacgcgctttccttccctcttttcttcattagcccgattcttaccataaatcagctattgcttggtgaagacaaacgctcatgaattggcctccgtggtcctccccaccgttggttgaatcacattggaggcatatgattgaatattggcggtgttgccccccatggcataaagcaaggataaggataacccggcggcggcattggataagaaccccatgacatgtcttgtggataatgatacgaaggtgaatgcgaccatcttggtgaatgaccaaatcgctccctaggaggtgatcttggtctcttccctttgttgcgaattttctcaccaccttgcttctcatatttctccaaaagcatatcaaaagtcaccttggtcttcctaggggccttagaagttgaagctccactcctattctccttccaaacgccaacctccggcttctttggcactatcatcttggaccttggttcaccaatgatcacttcctttcccttagcagatttggcttgctccggctgaatcaacaccttcttatcattgaaattaattgtattcaccgaaaaaggatcatgatcaagcttcatcttggagccatcggtgaacttcaatcgtccttcatctatggccgattgaacctgtcgtcgaaacacattgcaatcattagtagagtgagaatgagaatcatgccacttacaatatgctcgacatttcaactcttcttgagaaggtatgacatggcctttaggtaatctaatttgtttctcttgcaaaagataatcaaaaatcttctcacacttggccacgtcaaaactatacttaaccttactttgccgatctttgcgaggagtcggcattaggttagagcaaacaaaaggcttatttttgttagtccatgaccattcggcaacataaatatcatgatcaccctcttcctcactatcactagcctcagggtaatcgaccacattaacattaggctttttgtcaaatggtctagcaagttttctattatccttaacccggctttcttgagccagagccttttgcatgagttgactaacatcaagaaattgttggccatctagtctttctctaagaggagcaactaaaccattaaaagcaagaccagccaaatctctatcatttatattcaaagtataacatcggtttctaacatctctaaatcttttaatataatctatgacagattcattatacttttgcttaaccgatgtcaaatcacataacctaagctcagtttctccagtatagagataatcatgaaatttttcttctaattgagcccaagtatgaatagaatttgccggtaaagaaataaaccatgtaaaagcattaccggataaagataaagaaaacaagcgcaatttaaaagtatcactattagcctcaccacattgcgccaaaaattgacctacatgctcccatgtggtcttaccatcctcactactaaacttggcaaattcgggaactctataatttcgaggaaacggcacattatcataataatcaggatatggctttttgtaagttctagcacgattcctagtttcaatcccgaatctattcctcataatttcactaattatatcctccatattattaggcccttgttgatttagcggtggattcggtggcctaataggttgtgtttatggtgcaatatgattatattggccttgtctagtatcgggaggataccccctagaaacatcgttataagaattaggaacatgtgggggaacttggggactacttgtagcagtagatacaggaggatcaaatgttttaaagtgatacaaataactagcattaatcatcggatctattccctgtatcggaacaattgcaccggtctgaccggcccatggcccagtctgaccggcgtccagatgcgcggtcggactggcctgagacccggtctgaccgccggggtaatacccggtccgaccggccgtttggccggtcggaccgacggctgtgtcgcggtctgaccggccgtcaggcccggtcggaccggtcgtgaacgccgtcccgtcggttttaccacccgtttgatctataggaggttggttagcagtggtagaggctttatcttttaatgtctaatcgtccataagagaaccgaatttattccttaaaaactcatcaaatttacccttaaaaattacatctaactgatctttaaaaacaactataaatgaatctattgtagatgtaatttgttgttggatagattgtgatacttcatcattgcttaccacgtcgggagcgagcttgggacgtggtccgggcttgatggtcacgccttgacgagtcctagtacttgctctcatcaacgcctcccgtgtgagctcgttgatgtactcctccatagctttacgatcttctccttcgaagtcttccaatgcgaccggtatcacattagatggctccacctccgtcttagatagcggcttcgtcatggcgaagtcaaagttgagttgacgatgaacggatctcctccccagcagagtcgccaaaaatcgtgttggcaactttttgtgacaaattgacaagcacgatcatagcaccttaagccttgcggtgattctagagtcgtcaaccacctcgatctagcaaagagctaaacctagatgggttttgataaataaccggctagcggagccgatttctagataactacccgtctcgtgggcaaaacggaaggttttcaggacaaacctataaagtgatgtcgcactctcgcagcggcggcggatggtttacggcgcaaaccgacaaagatggacaaactaagagaaaactaaaagcaatatgaaaaacgattcgattgattgattgtagattggttttttacaatgaaccggccatgtcccttatataggggttggtcttgccctctacaggccctcctccacgtccagctcggggtagaaaccaaaggaaacctgaaacatgccttctcgagcaaggaaacctcgagacccgacgaaacacagtcggactcggacctgccggtcagaccggccacacaccgccggtatgaccggccctcaaccggcggtttgaccgctcaacacacgacggtcagaccggcccactcggaggaaaccggcagacttccaaattttggcaatctttcctattttaatcctaggtgccaaatttgggtgtaaacacatgtctgtggggtatctcatatttattaacctatagcaaaaaaggagttggcattaaatttttatgtaattttaatgatactaataaatcatgtaataaatggaagtagcatacaggtattgcaaggaattttctatcttgcgcttgtggcaggtaattatggtcggacgcatagtgtgaatgacctcctctcatttcttgccttctcctcctttgaaggcctcctcacaagatattcgacttccctcaacttcttttaagtcccctggagatgatggagagaagggattggggacttacatgtgggtcccactattttattatattttaacggattgtaataccatgtagacaccacgttagaaaaaggcagttaacgtgccacgtggatgccacaccagggaaaaccacgctcttaaagaagacgaggggtcattttgcactggaggggccagtagtatacccgattttacggttaattagtgatacgaatcaaatccaacttgtaatcaaattggacctttttccattgagaagcgattcgacttggctacttaagccggtcataatcggtttaacagatatgagcaatccttgggtttaatttgtttcagctagcccaacgtatttgattaatttggacggcggcaatagaaagcccaaaccgaaaccgccaaatatcctaagcgtaactagcccgtattccttcgtcgatctccccgttacgtccttgatcgcgatcgagttcgtctgccaccttcgccgatctccatatctcgccggcgcgcgccgaccggagtccggagaccatgcatgctgctgcttccgccgcatcctcgccggtgagaacaacagtttgttcctagaaaaaattcagaaaaaataattggggttcaaccactgatcaacctcatgcccaatgcccgacaaagaacataccctgttgatgtttgtactgaaatcactccggacactgcaaaaccatggagatcagacagctcagttagctgacgatcgagtgatagattatgaccatcgaattagagacctctgtctatcaaccaggattattactcgtcgtgtaattgcaggatggatgaatgtatggatgccatattgctgacgcttaattacttcctgtgacgtcttagaatccgatcggtgaagaagaggagtcgagagattcgagagatatgcagcgtatgg

SEQ ID NO: 6349 - DNA, 12060 bp, Oryza sativa
cacctggaacaaaaaccgaattatgaatcaatttactgaactacaaaagcacgcgattaaccctaattctcacttgaaaccgtaccctaaagagaagaattaggttttctgatcagctcctatatatctccctcctatattaagtaaacgagcagcccaacagcagcccggcccattacaaactaaaaccctaaacccaacttttctgttccacgttggtccaacattctctcaacttgatccaaacattaatccactccataataataattattctctaacaggaaaaaaaaacggggtgatggcaagcaggtcgtacggctgcgaagaaggcggtggcgctggcccgcgatacggcattttttttatatataattttctttttatccatgagcagattgttcagtttagtgttaaaatgtaaactagaattcgtatttgaaatgtaatgtatgctgtatgcatcggggactaatattaatttcgggttacctcaattcgggaaggttaatttcaaaggaaaaccaccattccgttccgagaaaacgtacggaaaaacggaaacagagagctatatatattcgcacggcgcacacaacttgattgcttaattcacattcatacgcagacgcgttggccggggagaacggcctcgccgagcgcgatgaggcaggtcatcgtcggtccatgtcgtcgcggcagccaacagcacggcggctctcgcccaatgttcggaaatttcgccccccaccgaaatgctaacatctcatccgaaaattttggttttttgcaattcttttatgaatttggtcaaattttattcaaaatccgtcaaaaattcaaaaaatttccatctatcgctcagctacggcagaaatgttgatttcgaaatttaaaaccctgctctcgccggtgtcaaggtggagaaggggtaggcaagagagggatagagccgtgatgctcctgtcctgtgcgccaaggagggtggcgccgacgatgcgaggaggcaggacgacaagaagaccgagacggagtcgtcggcaaagaatgccgcggcgacggtgtgggcaacttttttaacaagttgacaagtacgatcgtagcaccttaagccttgcggtgatcgtagcacctcgatctagcaaagagctaaacctaaatgggttttgataactaaaccggctagcggagccgatttctagataactacctgtctcgtgggcaaaacggaaggttttcaggacaaacctacaaagaggtgtcgcactcttgcagcggcggcggacggtttacagtgcaaaccgacaaagatggacaaactaagagaaaactaaaagcaaaatgaaaaatgattcgattgattgattatagattggttttttacaatgaaccggccatgtcccttatataggggttagtcatgccctctacaggccctccttcacgtccaactcggggtagaaaccaaagaaaacccgaaacatgccttcccgagcaaggaaacctcgagacccgacgaaacacagtcggactcggacctgtcggtcagaccggcctcataccaccggcctgaccagccctcaaccgacggtctgaccgcccaacacacggcggttagaccggcccactcggaggaaaccggtagacttccaaattttagcaatctttcctactttaatcctaggtgccaaatttgggtgtaaacacatgcccccctgccttttttatgaacaacgtgaatctaaaagcatagaacatgttttggtcttaggacgataatccaattaccggccatatatagtacctcctaagcatcttgccaaacgctcgggaagtatttcttcaagtatttcccgttgattgctcgctgaaaacgctccccttgaagtgtctccaaaaagtatgggttccctcgaacaatgccgcacactcgataaggaccctcccaactaggagaccacttaccgaactccttggatcgagtacccaaaggcaaaattgtcttccaaaccaagtcttcaacttgaaacaactttgctttcaccctcttgttgtatgccttggctaccctcttcttctctttctctatctcttccaatgccttcaagcgcttgtcgatgacttcatcaaggttgtctcccatcaacgtcttgtaatctacaccaacttcaacaatgttttattactcgactcggcttgtccattagcctgagcgtagtaaggagaagaactcaacaatttaataccataagattcggcaaaatttttcacttccttagacataaaagaagcaccttgatccgtagttaatgcttgtcaaataccaaatctatggataatatgcttcaaaataaagtcaattacctccgtatgagtcatattcctcaaaggcacggcttcggcccacttggtgaagtaatccgtagcaactagcacgaacatatgcccttttaatgacgaaggataaatttgaccaatgaaatccaaagcccatcctcggaacggccatggtttgattatggggttcaacacggcggtgggcgccaattgaacattgccgaaccgttgacaagcctcgcatcctctataatatttaaagcaatcatcaatcatcctcggccaatagaaccccgctctcctaagcaaccaattcatcttatgggccgattgatgagttccacaaattccttcatgtacctctcccatagctactttagattgatcttcatctaagcacttcaacaagacaccatctatattccggcgatataaattcccatcaagcaatgtgtatttgaacgcttgccgccgaattttccgatcaaccttaagtgtgggatctttcaaataccgaatcaaaggaattctccaatcttcttctgcttcctgggcacaaatgtccgaatttacagttaactcggcctccaaattgatcgcaacgtgccccctagcatccagcccagaaccggtcagaccggccacacaaggccggtcagaccgctcggggtcaccggtcagaccggcggcatgcagccggtcagaccgcccctggtcaccggtcagaccggccgtgcaatgccggtcagaccacccctggtctccagttttgccaatttcgcacaaagatttaatatcaagcaccggctcttctattattagaaataatcccttcttcacattatagccagatgcttgttgtgccaagtcatttactctagaattatcacgactagcaatatgcctaatagcaaaattatcaaaattggcaataatatccaaaacatgaatcgaggtacctatttagtgatctgtccaagcatttgtagactccgacgacttgttgcaccaccaattccgaatcaccaaaagcctccatgtatttagctccaaccatctccataacttgtaagccgaacaataaagcattgtattcggcttgattatttgtacaataatactcgaaacgaaccgatgcttcataacacatgtcattaggtgaaaacaaaactacccctatgccttgaccttctttgcaagaagaaccatcaaaataaatcttccaaggtataacttcaactaagcaaacctctccctcataagcaatatctatatgatggtccactataaaatcacatacaatttggcctttcatagatttcaatggttcataagccaaatcatattctatcaaagcatatgcccacttgccaattctcccacttagaattggcctttgcaatatgtgtttaacaacatcggcttgacaagcaactatgcatgtactagataacaagtaatgcctcaatttggtactagcatagtataagcataaacaaagtctctctataaagacatacctcgtttcggcatccaaaagacggcggctcaaatatgtaatgatatattccttgccatcttcctcttgcgtcaaaacggcaccaatgactttgttctcggaggcaatatataactgaaaaggctttccggctttaggcgctcgcacaacgggtggagtagacaaatacctcttcaactcttcaaacgcctcttgttgttttgcccctcaagtaaaatcggcttcttttttcaagcgaagtataggaacaaaagcatcgattttacccgctaggttagaaataaaccttctcaaataattcaccttacctagcaacttttgtacttccttcttgcatgtcggcgctttgaaatcacgaatcttttctatcttcttaggatcaatctcaactcctctctcatgcaccatgaatcctaagaactttcccgccgacacaccaaaagcgcatttaagtgggttcatcttcaaaccataccggcgcatcctctcaaaagctaatctcaaatcggctatgtgtccttccataccatccgatttgacaacaatatcattaatatagatctctaagataatacctagcaaatcatggaagatcaaattcattgccctttgatatgttgcaccggcattcttcaacccaaaggtcatgacaacccactcaaataaaccaacaaaccccgggcacctaaaagccgtcttgtacatatcctcttccaccagaaagatttgattgtagccggcattactatctagaaagctaatcaccttatgacccgaggcatcattaatcatcatgtcggctataggcataggatacccatctttggtagtggctttatttaaatctctaaaatctatgcaaactctaatcttaccactccccttcttctccaccgggactatgccagaaacccactccgcataacgacatggcctaataaaccccgccttcaataaccaatcaatctcctctttgactcagtcatatagcaaaggattaaaacgacgaggtggttgcttataaggcctaaaacccagtttaattggaagccgatgctcaacgagctcacggctaagacccggcatctcatggtactcccatgcaaagcaatcaacatactctttaagtagctcgattatcttaaccttataatcggctctcatgtttttgtttacaggtttagttccatcaccaatgtccacttcctccaatggatcggccgatgtaaacccttgtccaagcttctccacttcatcaaaatcttcaatggtttcaccaatatcgttctttgtagaccgatattcttgcacccttttttgtaaccactctaaattagcctctttactcattatacaaatttatatggcttagccgtgctacactagccggctttacagagataggtacaaatttgccatcggatatactaataaaatcatagctagaaagatccctccccgataagcattggatattcccatgacgccactcaaaagtagcatcggccattgcaacctcggccgatgtatccgcttgaacaatttcaacatcatcgcccgtcccattgaattaaacattgatgcaaggtagaaggcacacaacaattggcatgaatctaacaacgacccaaaataacattgtagttaccttgcacatcgacgatgaagaaagcggttggtagcgtcttgtttcccacggtgagctccgccaaaaagatacccttcgcctccgttggttcaccattgaagccattgagaatcatgttggtcttcttcaactcatcatcctcatgccccaacttcttgaacaacgaatatggcatcaagctcacggcggcacctccatccactagcatcctagagaccggcttcccatcaacatggcctttgagatagagaggcttcatgtgacggttcgactcatcaggtatctcaaaaaccgcgtctttaggacctaatgagaattgagcaacctcggcttcatccatagcacaaaactccataggcaacatacataccatgttgatatacatgtcttcttttggagatgattcacttttatgaaccgattgttcttccttttcctctacaccaatcggttttgccttctttatggatttaggcctccataccggtgggggtcgcaactcattgaaccttttatccctttgctcttcgcctttttctctcttagctcttgggcccgaagacgttgcaactttctcttttgagtagccatcaaatccttaggcatccacctaggattcggctctgttccgggaggtagataatgccctctattaaccctgtttgaagacgatgaagccctctcatcgcctttcgcaaccctcctgtcaaaccggcgctggagcccggtcataccggtcgtagaccaccggtcagaccggccagatgcgccggtcagaccgacacttggcgcacggtcagaccagcctgaggtgttggtcggaccactatcgggtcggcggtcagaccggccggtcagaccggcctaatagcccggtcagaccaaatactgacaaatataccaagagtattgaaattataaacttattgctttgtagatgaatatcaagttattagagtacagtatgcgatatgatcgccaaattcagatgaaaatgtgtcattttgttgccacagaaatgcaatccaaataaacccaatgctgggacaatataaaagaaaaattcaagttatcattcttgatgatcggctggcttgactgaaattggtgtaactagagcacacagaggggtggcctttgcaagtgtcaagccaaacttctctgacatatctatcccattcctttctaccttaactggtaggttccatttgaattggtttaacaatgatcccaaaattagatgtaccatcctatttgctagtggcattccagggcatatccgacgacctgcaccaaatggaataagctcaaaatggactcctttgaagtcgatcttacttcccaaaaatctttctggtataaatttttctggttcgggccatatatccttatctctgcccatcgcccatacatttacgaaaatccgtgtccctttgggtattgtataacctgctatcttcattgtcatctcagcttggcgtggtaataataagggagctggaggatggagccgaaatgtttctttcaccacagcttgaaggtaaggcaactgaccaatctctgattccttgatatttcttcctaagccaataacttgtgaaagctcatcacaaactctagacatggactttggattttgcatcaactctgccattgcccattcgacagtgctagagcttgtgtcacttcccgcacaaaacaaatcctaaaacatgaattataattgtcaaattagttacattactagcagttatatcgttatagataagaaaaaatattacaccttacaatttaattgctttttttatggaaaatacttcatccgatccaatttagtcatcactgaactttcaccaatgtccacctcctattccatgctgcatgcacaggccacaggggcaaagctagctaggcatagcgcagttaaagattaagccctaggtttaactcgatccctaatcccatgtaaattccatacagaacaacacgacttaggtatataaagacttgatctgttgggataagtagctatcaattgctgtgtttagttcttttcaacttctatttttccgtcacatcaaatgcttgaacacatgcatggagtattaaatatggataaaagaaaaccaattgtacagtttacatgtaaattacgagatgaatcttttgagcctaattacaccatgatttgataatgtggtgctacagtaaacatttgctaatgacagagtaatattaggcttaatagattcatctcacagtttataggcggaatctgtaatttgttttattattagtctacatttaatacttcaaatgtatatccgtatacgtcaaaattttcttggcaaagtaactaaacacggccaatgtcaaactgcctgttgggacttgggaaacacttctagctaccgacaaagtctgccacaagtgcttgccaggggtctagcagtagagacaaatatttgccgacaaactttctttttgttagcaggagatgtatatatgtaggttgttcaatatttttcatgacagataagataatttctgatggataaatataccccaaccgaccatgtgatagcacctttcacgacagacttagtgacatctattttttccatgaatctattgtctctattttggtgttgtgttgtagtgataacagaaatactacaacatagtataccaactaagatgaaatagtttacactcctcacatcatcatgatacctaagtattagaatgattggtacatacctatgggtatcaatgtatggtactcctataccatatttgataacatatataccacatctagtatctaaggttctgtgttatcaagacatcaaaaagttttactggaccaacggtataacgttctctagctagttcccctcatttcaccggtgatgtggtggtggagtcgtaggtggatgacttcacccaccaagtgctcacaaatattagacatatgtagttgagctttaaataagaatttagtaagattaaggatgtcattgagttatatctctaaggatatgtgtgaggagatgcatttgctcggtgtgagtatggtgttatatgtatagtgatgtatgtgcatacatgtctaacaccatgtgattgaaaaaaaaataaagataccacgtgaatttttaaagtagtgaagacccgattagcagctcatcaacgccctgtgtatgggtttatcctctctctttcccctaagagcagatacaatagcaggctataagccatctataaacatattttaaaaagataaaggaagagagagaagagcagcgggctacagatatgtagccagctgcagcacggactccaagatataatgtgtgtatgacaggcagggtcaggtattaatagtatagtaagcaactattgtataaattggctattacattggctatatatgatttagagatagtagttggctatactattaaacttgctctaatgcggtagggcgtgatggttggttgtggtgcttaattaataagctagtatatagtatattagactagacaacaaccaattgggtgcaagtcaattgatgtggtactatagattagccttgctccctgttcgatatgataatttgggactacagattgtttggtcaagagcatgtacaatagcaggctataaggcagttataaatatattttaagaagataaatgatgagagaggagcagcgggctatagatttgtagccagctgtagcacggactccgagacacagtgtatgtatgacaggtcaaaccatgtattaataatgtagtatgtaactattatataaatgagctattagattaactatagataaattagagctattagttggctatactattaaacttgttctaagtagatcccgtgtgtattttatctcagatctgatgagtttgggtatttttctgatcttcgttagtacagtactattctctattgataatggccagatcgagagagtactagcggagagtaataattaattcattcgacaagtcataggtttggcaatgattattaattatagttctagccccttctagctagttgcactttatttaaaatactttattccagcgttatacttagcttgtatactgtacatataaatgggacaaactatgggcgcctatttccatggtcaatctaccacaccggctactatatccttaccaaaataaatcaatttaagattagatgaaacaatcttctatccaaattcattgtgctttttagggcctcatttaattctaaattgatttattttaatactaagagatacttagctattattaacgccatgcaatgtcctatgtgtcgcaccatatggcacctatttttttagtgatggcctcgatcatatttttaattcaatgtgtgccagcactaacctatatagtatcactattacaaccttaaaacaatccataccatcgttacaatacatatattatatttaggacttaggatatgcattttacaccttaaggagatgtgtcctctcatcaaatacactgggtctctgttcaaaaacaatgtatgcattgactccctccgtttcaggttataagactttctagcattaatttcccacatttatatagatgttaataaatctaggcacatatatatgtctaaatttattaacatatatatgaatacgggcaatggtagaaagtcttataatataaaacggaggaagtattaactaaaaaacttaaggaatgcattgactcacattattacaccttacaatacatatattatatttgaaaacaatgtatgcattaacgcaggattaattaagtattaactaaaaaacttaaaaaaaatttacagaaaattttccatatgaatttttaaagtaattttcgcatagaaaattttttttacagaaaacgtaccatttaacagtttgaaaagcatgtgcataaaaaattgggaaagtgaccaaacgaactcagcataacgtactcgtgaaaaccaaatccgaaaacatttcacgacacactttctcgtgtaaaaaaattgggaaagtgaccaaacgaactcagcctaacgtactcgtgaaaaccaaatccgaaaaaattcacgatacactttcttcatatataccagtataaatattcaagtctaaaaactcaccatagaaagcgagtggaagaaaaaggacaaaatcaaactgtgaacagtgcaagtattgcttacttttccaactatgtgattttgctcttcattttttaactaatacttatgtttgtcctcaatccactaagaggactaacaaattgcgttataattcatgtcaaattaaacaagaacacaaaagttatgtcagttatgcttggcaacatttttttaatcgcataagtgaaaattcatgttaaaacgttttaaaaccataaagggatagaattcatgtcaaagtggttgatgtcaaaatagggaaaaaaatcacaaagtactaaaaaaacagcggcaaacctgcaaggccgggcatacgtacattttaaaactattaagtcctctaaactggggcgtaaggggacaaataagggctaaatcacgaagttaaaaagatagtagtaatgttagtatataattaagggaaaatgaataaattgaaaagattggtgtaacattacaatatttgaagttaaaaaaataaaggtaaagaagaattgtctctaaactttataattgattcttaccctttcaaggtaaagaagtatatatatttacggtgatctctactagcatatttatccaaaatatattctcgcgtggatgtccagatattaaaaaacatcatcaaggaatacatgaaaacagatttgctaaaaaaattgtcgcaattaattatgctattgttacattacattgtaactacagtatacgtaactgcactgtaacacatattacggagtataatttaagaaatcaccgccattccgttcaattaattaaagggattaggggggaaatatagtattaattggattaccgtgaataatgagcggagagtgtcacggtcgagctccgccgcatcatcccgccgcgccgcgatgccgaggagcacgtcaaggaagtcgcccttcctggcctcgccggcgtcgtgctcgcgtagcctggcgtccacctcggcgtcgaacacccggtgaagccgcgcgaagaggcgcgccagccggcggcgccacccctgcaggtcggcggcggcgaggacggggaagaagtcggacacgttgggccgcccgccggcctccatgatcctcgccaccgcctcctggaaccccttggacccgccatggtcgtccaggctcgtcaggtcgcgggagaagatagtccggacagcaggttcaggctcgtcgcgaacgccacgcgccccacgtccaccaccgccggcttgcccccctcgccggccgccagcctcgcgacgtgcgccaccagctcccgcaccttctctcgccggaggcgccgcggcgcggccgcgtccagccggtgcggcgcgaacagctccgtcgc

SEQ ID NO: 6350 - DNA, 8455 bp, Oryza sativa
tcacttttccatgatgttgatttcttgtttatatatcttctcaactcgggaatcatgttttgaatttcccaattgctatgtcaaatctggaaagcagttctaatttgattgcatatgcttgccaataatcgagatgtagtctccccacgccaccacacatttttctatttgtaactctacaatgcttgtgtcaaatcatgcatgtttttaatttactttgttgttttttctgtttaggcctagacttttgtatggatacaatgtattatgtcgaaccacaacctttgtacagcgctgaggtaggcctgctgtgcggtgcttcgcgttgtgaatcgaggtgtagcttacgcgatggtggcggtcgtgagatgacattttattttcctcggtggatctgaatttttgggagtggattggaagttgattatatgttttaactgctggaaataggtaagctctacggactcttaagctactataagttgtttagataaccataacaaatacatgtttcagtacaatatatataaacaaaatatggtagtcaattatctatttctgatacattgaagcatgtctctgacaatttggggcatactgctctcacattcattctcttggtacgtcaacagctctactaaaaaatgcttccttagctcgtattcatcttgtacatgcatttatttatgcaagtgatcaaggttaccactgtatgtgtaaaaaaataatagcatttaaatgataaattctagtgtcatgatactttgcctttgtaattggtaactgcaattcttcatcattccatttgcacatgaagagggacacaagataaccagatagttcgctaagaagattgaattgttaattaattttgtgttaggaaataaaataactggtgctgcgcataccgctccctatctctttgtctttttcatacattgggatccaagagtggggatggtgatgcagacagtgtggcaccaacattaaacatgtgggatggagccggtaatcataaaaagaattatgtactccctctgggttgataatacttgtcgtttggacaagggcacggtctcaaaaaaacaaatttgaccattattttttattataatatgtataaaagtgttaacaaatatatgattttattaaagtactttttaagactaatctatacatgtagtcattatatttaaaagacaaatattttaaaaatgattcataatcaaagattctaaagtttgacttcacccttgtctaaaacgacaagtattatcagccaggagggagtagatgatttcgtacttccatctcaatattataaacatagtccatcttaaattccatcttttttttcatgattgagttagtctttagcactgaatcattaacattgttttgagcactgaaaataacttattttgctgcagcctagttgttaaagacatgtgcaccactgatgatttccgtacttccatctcaatattataaacataaagtccatcttcttaaattccatcttttttttcacgattgagtcagtctttgttgggagtttatgcagggtgcttagaatatttggtactatcctttagaatcattacacaaatgcaacagactattttctgtctttgctgatgattgctaatgcagctcgaacttatgggagtaaaaaagccctgagaatactttgcgtatgcatcttgtttgatcgggcatttttctttgatgcaacttgagtttatgtttgttgatgactgtcgttgatggagctgctcctgccaaggtggcctttttggcgatggagtagaactgtctgaatttttttatcacaccacaagaacggattttgtttgtggtaccattttttgtatatataaaacatattttggttgtatatatatagaataggatgtatctaccgttcttgtggtgttgttcatgtgtttggatgtaatatggggtgtccttgtggtgtttggataaggatctgttggagtgggcctaaatgtgccatgggcctgaacagatctggggagtaaaattgagctacgtgctaggggatctgttggggtgggcctgaatgtaccatgggcctgaacagatctacggacgtgagagggaatcggaaattgtggaccgatctgggagggagcgatctggaaggaattggacagaaataatcgcgtgtgcactcgggaggaaatcggactaaaaaatcgcaatacagggtgtgaattggattgaaaaatcatgcattactgggacgacgtacgaaaaatccctgacaaaaacatcttaaacttttataataggtaaagactagaaaaatacccatgcgttgctacgggaggaaaagaccgtggaagcgggcgtcgttctatggcagagtccgtaatgtcaacgaaggagtaatcgtggcggagctggtggaggtagtgtccagacaccttggtggttgatggcacatcgccgacgaagcttagtgcggccgactacagcaagacggcgtcaggagctcttgccggcatggcaaggaaaagcttgctggcggcagcaagatgacgacgcacggcttgggagggacagagcggcatggaatgaaacaattcacgtccttggtggcatgttttgaaagtgttgcgaattgagtggcacatcctgaaggtggtgcaaatcgaatggcatcttctaaaaattctcctaaaccatttgtaatatgtgataatacaaatgccggcatgtttgcaatggaaaaagatacaattgcgtatgtaaatcgggacatgtttatatgtgtttttaagtgagaccgtcataaattttaatatcgattcgtcagttccaacaaacatattgtcatgggcggatcacccaaaaaattcttagcctaacacataaatatacgtatgtgagcagaaacttttgaaaaaaaagaagaaaaaaagctcgtttttaatatattatgatgcatatttgatccatttatacttttagctttgttatatataagttggatcacccatataaaagttcgagatacgtcattggtatagttaaatctattattaattagtcattttcatttttaagggagtattgtttccagtttataaattaattacatttgaggtcaaatagtagtatttttttgcctcaacaaattgattgagaaatgagaaaaataaaaggaagagaggtctggtaggaaaaaaaataaagaaagaaagcagagcacgagaacagataagtcataagtccccattttcactttctccttcactttccccaaatccatccgctctcatcccgtgtcctttactgctgtctagctgtctcccccgattcaactccccaccaccggtcacctctagcatcgctgtgcttcttccctgtctgctaccccacacaacaatccttgagctccttccctacttgctgcgccccatcttcctctcgtggcggcatccggttatgcatctgggctacagctcagctcaagtagttgacgggggcggagtggcctcggcagcggcgtggagtggattcgacggtgatgatctgcttccgagccaagtctgatgccgtgcacggccgcctcctggttctcttccgcacgcagccaaggccacgacagcgagcctcaaccttgcgtggcccacgagaagcaggcgcaaggccggttcagggtgacggctagggtgcgtgcatggtggtgctaattctgtgctcgcatcacatgatggcggtgatttgccaaattggtaagccatcaatctgatttgcttagggatttacccagaaatttgagttctaaatttgggtattttttcgttttagggttttgaaatcatgcaacgtgcggccgaagatagaaaccggtgagacaatgattctggtggctggagttttgctttatttgggtttgggatctaattcgaggaaaatttggaatttagggtttgtgcaaattgggtattttttctagaaccaatttttgtatttttgtatgttgtatatatgcaagttgtcctagtgtaacacgaaccggtttaaatttagcccaatttatgtaaaatcctgatcggaaccgatttggtgcggacttaggattaccttgactttttttctccatgtcaaattgaattggatctctgattcttttgtgcattggccagcgtatgtgatgaactcatacggatacggacacaatcagggacgacgcacgaaatttgtggcaaaaacatgttaaacttttataataggaaaagaagtagagaagagatagagagaaatagagatgggcacgctataaataaaactataaataagttggtcgaatttccatatccgtgcccgacggaattgcatcctgacgaccaaaaattataatctgatccgatttgtagtgcgtacgtactctgaattctcaaataggcatagtccgtggttaccacgtgaaaattattcccatcttttctcctcgtcaaggaataatacgattttcaacatttgcaggaacaaatcacaaaacatatcctccgcttacattgcccatcgtttcgtttctgcccccgacgaatttgatttctttcctcgatcctcctcctcgattaatctggttcaattcttttcccctcatttggctcgattccaacctggtttgatcagttcttggaacttgaaagacagaaactgaagaggatggggtccaagaagaggatgtcaaggtacgccaagaagcacgaggaggccacgctcaagttcgacgtcgtcgggtacagcctcaacgagggcatggccgccggcgagttcatccggtcgccggccttcgccgtcggggctacgactgggcaatccgcttctaccccaacggcgccacggtgaccatctcaaggctcacctccgtctccctggagctcttgaccaagaattgcaaggtgcaagccgcctatgacctgcgattcgtcagccacgccaccggtcagcgagagtgtttcttcgctatcagagccaagaatgttcagtagcaccagatgccctaagcctcagcgctcaaatccgatgcaaagatatcgtctggagaaggaagaatcaggctacatcaaggacgattgcctgaaaatcgagtgtgtcctgaccgtagtccataaaccgatcgtgtccaacgccaagggacgatccgaaatcgaggtgccgccatccgatttatcggatcatctcggcaaattgctggaggaagaggaaaccgcagacgtggatttcattgttgggggatcgaagattgcggcgcacaagagcgtgctcgcccgtcttcaaggcggagctctatggagggatgaaggagagggaggcccgtagcgtgaccgtggatgacacgcagcctgacgttttcagggctctcccacatttcatgtacaccgactcgttgcccgacatggacggcgttgaagatgccgactatgttgaaatgatcaggcttctactcgtggccgcggatagatatgccatggataggatgaagttgctgtgcgaaagcgtcctcgatgatttacttgatgcggagacagttggaactacgctagctttagctgatcagcatagctgcaacaaccttaaggatgtttgcgttaaatttatggctacttcaaaagggatggatgctgtaatggcaactgaaggctatgataatctcaagagaaattgtccttatgtcttgatagatgtgttggagaaggttagtaataagcttcgtagaaattaagatcaatttgtgaatcccatataggccaagttgattctgtgaatagcctgtctgtttttcaagactagatctgtttagacaacttatacaacaatggtatcacagttatggcattttatggcattagtagtttaatcgatctacaaatcattgcaagcatgcatcttctgttgctttaatttttctttttctgattggttaatccggaacatatgtgctcatgttttactgctacaatggcaattttggataatcctaaaatcagaggattttctagactgtattgcatgctttctgttagtaggttaccctgtaaattcagagtaaaatctagcaaaacatcttttacacccgcaagcactacgtatagatgttctttaccctgttgaactttatggtggtaaaatgtaggcatgattaaccttatgcattgaattttgaagctaaacaggggcaaggcaatacatactacattggccttgcttgttgtaacgaatatattttcttcatcgaacatgtttagcctctttgaacatgaagattaaatgtctttattttggtagaactgaaaattcaaaaaaggtttagtgttcaaacatcattgccctttaacatgaataaatgaaagccaacctgataatttctctgaacttcctaaaagctcattttgaattgcctcctagagatacatactgtcgtctgtcaatattgcatgtggagcttttctattcatgaatttgagaaatagtacgtaggagtacctgttaaaaaaatgacttgcaccctataaaaaaagaaagacttgcagctaatgtttttcatgaaaaaaaggaaagaaagacttggtatgagactgaatagttaaaaagagttctctacctggtttatagacaatattgcagattttcctccgttggctcaaccaaagaagcaaataatcacatgaatatcatagtagtcaaccgatcgatgtagttgtgtccaatacaacagcatcactaaaaatatctcataagaccgcagtaagtactgatgacgcaaacgaccagcaatatattcccaagactgcgtgtactgagatgatgcaattattcgaacaagcaaattcacatctgtctttgttgaagtcatacttgaaacttgtatacttgtgggcaagcagaaattcagatcaactgatgagggctcgctcaaatttgtgcgatagagagagagaggggaaacggaggatgaacctgatggcgtgtaccagcgctggcggccgcgggggactgcctgcgacgaggtaaaaaagcccgcccatatgcaatcgggaaataactacaaagcagacgcccgatttttcccaaaataactcaggcatcatttcacccctcgtaaaacaatgttttagcgcttagtgaaagaatatttcagttcttgaaaatagtgaaacacaatttgatcaccagatgaaataattttcttcaacgtatgaaacaaatgattaaagtcattgaaatatcaacaagatccaagtgaaattgagaaaaaaaatgaaacaccataaaaaaaactccacttaggcattgtttagttcccaaaacaagaacttttcacccatcacatcgaacgttcggacacatgcatgaagtattaaatgtggaaaaaaaacaattacacaatttgcgtataaattgcgagacgaatcttttaagtctaattgcaccatgatttgataatgttgtgttacagcaaatatttgctaatgacggattaattaggcttaataaattcgtctcacagtttgctggcagaatctgtaatttgttttgttattagacaacgtttcatacttcaaatgtgtgtccatatatccgatgtgacaccccaaaacaaaaatttttggtaactaaaccgggccttaatcacttcgatctaactaataaaacatctaaatacatagattggaattatcgaaaaatcacccaaaaaataccagctagatacacttcttccttctctccagtggttagctagatcgtcgtcccgagccgcgtcgcgagggcggcggctgcggctgctacggtggctgtcgggtcaaggctacgtatctggttgttgtcaccgtcgccgcaaccactagtgaacctgttcggtgacatcgccgtacggatgaggagtgagtcgagaagcgcctcgtgtggagagaaacaatgtagagagagaaggggaatggataagattgagagagaaggagagaaaagggcagtgggacgcaaaagcccgatattctctttccactcgaacgcctgatcgagccagagcattttcatatgtaatcgtgttcattcaccctatacgggcctccgcaccgatccaaagtaacagagaaatagggcaaaaaaatcgtgttcataacccgttctcgttaccgattcgacaccgaacaaggaggaggaatttaactatttgccacttttaggtttggcaattatccaaatacccttattaggtttgtactttttttttgcccctcttaagaggtggtcccttaactatttgccacttttgctcacgtagcatgccagcgtagcaaactcgggtgaaaacgttgtggacccacttgttaatctctcactgcccttcatctcccctgcgttcatcgccggctcgccaccgtcacccctcttgtacaccgcgcggccgacc

SEQ ID NO: 6351 - DNA, 7484 bp, Oryza sativa
atttggggatttgaatccgccgggtgtgtattgatctgacgatcaggttgtctcatatatgccccctagagggcctcctgcccaccttatataggatggggggcaggattacaagatagaaaccttaaccaatacggtatcggtttcctaaatcaggactttaggccgttccgtaatatacaaggaaacataacacccaagtcatgatctgttacatattacatagatataagttatcccctataactagtcggataaccatgccgtgtgggtatggggtacccataatctccacagtagcccctgagaccttcacagtcggaaagataaccttctctcgaactagattactccaaagccgagtgcttcaatcatcttcgtcatggtctcccgagtacttttaccaaatctgaagactgtggagggctgaaaaatatagtcaggtgcatcgactagatgcacctaataggtgtaacccccgactatgtggttaatcgaacaaaccaaacatatagtcaaggaataaataatccaaccaaccgagtggttttgataattatagtcaaccaagcgatttaatattaatatgtagcatatgcggtgtgaatccctgaataatatgatccaagtgatataccgactgctttgtaaaatatgatgagtgtaacctaaagttggctacattattgaaaattcacatagcaaaatagctataaagaagcttgtatgttgtgaataaagaaatttccaaagtattgggcatacgccatgcgcacactgctttaacagacgtgcttaagtccctagaagacacatggttccaccacacctggaaatatatggcatatgtggtataaaatccgagtaaataaactcataaaggatttaccaaccgcctgaaaaatgaccacaatatataatcagcctaagccataatattggtcaataaaaatgcacacttacgtggcaaaaagcaacgatattgtatccaatcaattgcttaaaaacccaaacagcaccatgactatattaaaaagtcagcggggcagctatataaagctttactgtttgacaccttttaagatgcattgtaccaactcctaaaaagttgagtaactgcggtataaaaggattttaaggtattgggcacttgatcacgcgcactttggcctaagcaaaaagtgcctaagtccctaaaagaacgtgacaggccacacctgaaaatatgggctgcagacatattaggcctaggcaaaaaaatatgccttcgataccctttaaaggatgacgcatataacatgctcccgagtaacaaatcttccgggtaatatagaccaagcgtagctcatatgaatagcttctgatctgagtggttatcccttatgggatactccaaaatagatgtaacaatcgaatcccgactggcgcaagtattcagttgataacccttacggggaataataaatagtccagtctttgagcatataaaatagacccatgatcatgaattcatgttgcatgtatccggagcaagtccaaattgaagatataatacttgtatttgagctagtaagcccctgagcacgtagtcacaattgttcattgatggtagctgacgcagttggcatagagacaagacaaccaatatagagagaatattgcccaccagaggtggcaaaaatattggtggtagtgaagatagtgataccaatcaaaagtactgaagtcgcatagccatggaggcgaagaaaccagtcggcaacagtcaggtcagctagcagtgaagatgtaggcgcccaacaacaacgaaagaacagtcggtggtgacaaaagcaaaccgacgatgaagacgtagacgcgcatcaacggtgatggcgaaatccaccaatcatgaagatgaagaaaataatcggcggcgacaaacgcatccgacggtaatgatgattagcggcaacagagatagctgactatgatgatgaagtttcccatcaacggcagcagagtaggctatgttgatgaggcttgacaagatgttgatgaagatgacgatgtcggtgatccagtcaatagcgatgtagcagccgatgataacgatgagatcctctatcggcagttgcgtagtaggccaaccgtgaagacaaataattggaggagagttgatgttgttgcccaactcgtctaaaccgaaatatttgaagttgttgaagtagaatgtctgttccgaagcaaagatgaagataatgactcctggagttgactcattggatgattaattgatttcttcagcttgacataaaatttgtcaaattttgagccttatatttgtgtagcccccgactctttggttagttgggaaacaactgaacatagagtcgagaattatagcttcttgtcgtcgagtagtcattgcttgattgaagatatgtgttgaaggtgtccaagtagaaatcctgaatattggagagtcacttgttgtagtaaaatatcatggcattgcatgccgagatgtcgaggttcacaaagacgtcgtggttggtgaagtagtaaaacttgcgaagtagcagcaatagaatttgccagtgccgaagataataaagatgaagtcgctccaccatgatgacaaagttgcatcgccgtgatgaagtgaacacaagtcggcggcaacagaagcaaactggtagcgaagacgcgcagttgtgaagataaaagcactagtcggcggcggcataaccagtcggcaacggaagacgatgatgtccatcagtagtggtagctgtataaaccagacgtagaggtgagggcactagtcagcagcagacgagacgaccggcggtgaagaagataaggccaatcaacactggcagaatcatgcagccatggaagtgaagaaaccagtcggcagccatggcaaacgtaggcagcttgtgttgaagatactgatgcctattagtagtgacagcaatgtagccagccgtgaagaaggtagcatcagttggtgttataacaggccagccgtgcaggcagtgacaccagtcagcggcggatgcggcggccggtcggtgaagacgtagacgcccaacaacggcggcataataggccagccgtgcaggcggaaacaccagtcggcagcgggaaggcaagccggtcggtgaagacgtagacgcccaacaacggcggcataaaggccagccgtgcaggcggaaacaccagtcggcggcggcgaaggcaagccggtcggtgaagacgtagacgcccaacaacggcagcataataggccagccgtgcaggcggaaacaccagtcggcggcggtcgaggcggccggtcggtgaagacgtagacgcccaacaacggcagcataataggccagccgtgcaggcggaagcaccagtcggcggcggacgaggcggccggtcggtgaagacatagacgcccaacaacggcggcataaaggccagccgtgcaggcggaaacaccaatcggcggcggtcgaggcgagccggtggtgatgttctgactgatccattcctgtagcgtaagagataagcttaaagccatgaatcccttttatgcatatctggatctggatcctgcagaacaaacatataggatgagtagtatctgatataaatataatactcgagaaaaattcaagcagtttaaaatatgtatttcttctcttgttaattttgatttccccgagcagatgactcattacgtttaaacactctgcccgactagtcatagccaccaagcactgggagtcggcctaagcacttcccaaacatgcatatgagtgacatgagttcgtcattaatggaacaaagtttcacggatcggagtttactactcgggtacttttgcaattattaagagcagaaaataaatttatctcatctctatgcttttgatttattccgaataatacttggcaccttgcgttactcggtccatccaacgagcccccgggtgctaggaatcggcccaaaggcaaccatccattggcaaaccaaacggaaagcataggaagatagaactccataactcgataggtacttttgtactcagattatgtcgcaagcaatcaagataaatattatgaaaattgtttaaaaaatacgatataacatctatagcccccgactcactagtcaacggcgaaccagttgatgtagtgaggcaaaggaaaagacaaaatatcatataaagaatgaaataaatgatgacttagctttgtcgtattccctcgatgacagcagaagtagccgatgtgggaataaagcagtccatcaatggtgacaaaaacaccagtcagcgctagtggaaccaagccagtggtgtagatgatgaagcccattaacagcggcggagtccgccaaccgtataggcaaaaacaccagtcagtggcggcagaggcaggccggcggtgaagtcgtagacgcccaacagcggcggcataataggccagccgtgtaggcggagacaccagtcggcggcgacggaggcaggccggcggtgaagtcgtagacgcccaacagcggcggcataataggccagccgtgtagacggaggcaccactcggcggcgacggaggcaggccggcggtgaagtcgttgttgttatcagcaatggcggtggcgaagacaagccgacagagtggactcgcggccgatcgaccggaaagctgagacgcctcgactccatgaccagcattaatcgcctcaatagtgccgcgtaattatatgcgaacaacaacaaaaaatagcaagagattaatctgagattaaaaatcaatatgataaataatgataaaaatcagattgagtttccccctgactgatttggatcaagtcagagaagaggagcttgaagaagtggtcgacggaaaggaagtgaaaactcccgaagcgaaaacgaagtcggcgactcatgaagttaattccatcgtgctcgttgataggaaactcgacgcaacccctacctggcgcgccaactgtcgaaacatgaattcggcaataataaaacggggtagcgcacgagacctaaaagtggatggatgtggagacaaaggatttagacaggttcaggccctctcaatgagaggtaataccctactcctgtttggggatttgaatccgccgggtgtgtattgatctgacgatcaggttgtctcatatatgccccctagagggcctcctgcccaccttatataggatggggggcaggattacaagatagaaaccttaaccaatacggtatcggtttcctaaatcaggactttaggccgttccgtaatatacaaggaaacataacacccaagtcatgatctgttacatattacatagatataagttatcccctataactagtcggataaccatgccgtgtgggtatggggtacccataatctccacacccccttatcacaagaacaccaaacgttcataaacaagttaaaatctagtacacacttcgttctgcatcatgcatgtattgatcagatcaactgtcctgttggttcagtttatcgcagcagctgcagcacctgctggtggtggaggcggaggcggtggcggaggtggagcctctccgccattgctgccatctctgtgtgcatgctgctgcacatacaatggaatatcacttgtgcccgttccagctttcctcttttcaactgggcaacatatcctatgcacacacctaaccttctgcactcatgcactcggctgttataaaccctccgatcctgatctgacggacacgatgtaggtggggtgttctttttagaaaaacgcccgcatcctctatacagatttccagatgaccccttaccttgtttcctcttctccgtgctccttcctagatcgatccccatccccaaatcttctccctctccattgacgaaccatgcagtgagcagcaggccggccgcatcaccggcgcatgtagtatgttcatcgaatcatgcagctaactagacattaaactgggcggaactcaagcagggtcagagtccggctggcctataggcaacggtggggtagcgctcaggtcaggcccaagctgccttgatgccgtccttcaccaccggcacggccgtactgctgctcactgcctggttcgtcgctagctatagatcgaatccatgttatggtggtcgccgcgatggcaagcctcccgctggccgcattggatgcactcggagcatttctccattcttttcgttcaaaaacttctccattcaagtatttgtgctttgtgttaactgattgcaaaattatccgtgattgcaaaaggcacttaaagttgaataatgagttgtgtccatttcttaatttatctcgttattttcattaattggacatgacctacctagcttattgtaggcatggccgctgtcgtgccatgtttttttcctcaatcaggcactgctgctgcttgcatgccaggctctacgtgccggagaagagagacccgctagccgcgataggaaacggtaggcacgtcagtgggagacgattcttcctgccgcacggagaggttgaaggtttggggatgggtgttaacgccaaaatggtgtaagcccgaaatcatcatcggcttagtcactatcagcttcggcatctcggaatcagccgatgagaattatcaagtcgccaacagtcggattcttggaggattcggttaaggaaacttatctagaagagaccgagttcaaggaggatgtaacatgacaagttatctattaattaggaatagtttgttagtttccttttatctttagaaaagtatgtttagtgtccgataaggactttgtgttttccttttatctttaggaaagtttctttcttgtcctacaaggaagagtatctacccatgggtataaatatgtacacccggggtcattgtaaagtatctctcgatcaatataactactctcggcgcatcaccactctcttttccgaagtttttacttatcaaccggcggaatttggcacctgacgcggggctgcgtcagttcagttcgatctccggcgaaggggtaagtcatacgttccgctggccttggtgaatctatcggctacgttggtgttgttcaaggctgcatcgcttcgatctcttggatcgctctggtttggatgatatatttgcctacctgatttatgaactctatctctaattgcattgtgtttagagacgcatcagtttagttaggactgtcttagttaggtccgatcttctgtcttagccgatatatctctagaatcacaatgttgttctaaatagatttgttatatccatcatattagatagatctatcggctcatcgagtattaaattatcatatacaatttcgtgctgtgtcggttaggttcgaccttctagattgttgttgataatatagatcttgttaagccgataggtttatgctagtgttttatcggggtgttagccgataagttatctggacattgcatcggcttat

SEQ ID NO: 6352 - DNA, 6621 bp, Oryza sativa
ggccacgaggcggcgccggcgtcgatggggcggtcgcagccacgcggtagagagaagaggggcggcggtggcgagccggcgatgaacgcgaggggagatgaagggcagtgagagactaacgagtgggtcccacaacatttttcacccgagtttgccacactggcatgctacgtgggcaaaaatggcaaatagttaagggaccacctcttaagagggggaaaaaattaagtgcaaacctaagaagaatatttggataattgccaaacctaaaagtggtaaatagttaaattccccaacaaagcgatgtgtttttcctagtgtcaaccgaatatgactgggctatctgttcgtttctaatgaaaagagtggatgaaattttggatacttgtagcacgcttttcaaactgttaaacggtgcgtttcatgcgaaaattttctatatgaaagttgttataaaatataacattaatctatttcttaagtttgtaataattaaaactcaattagtcacacgatattaccgtctcgttttacgtgaaacacttaatctttatctacatcttcatcttcaggagattcgggagattaatagtacgggacttggctgagtttggattgaattggaatccaaaaatcattcgatttgtttaatccaaaaatccaagaaaaagttggatttccaattggagggggcaaaatataaaaattcactgcctagggtttaatgtaggagatcgaagaggcgtctcctcctcctcgccgtcgtcgctcaccatcttcccccgcaaccaccgccgcgccgccgccgatcgcctctgctctcaacgcacccaaggttagtatccatcagcttcaccccgcgcttcctcctcctccgccgcctccgcctccgccgccgcaagaagagctagcttgcctctttccccccagatttgatccgatccccccaacctgctctgatcgatcgattcttggaaatttcgcagccggggatggtgtccaagaagaagaatacaacggcgtcgaggcacaccacggagtcagaggaaggcacgcactcgttcgagatcgtcgggtatagcctccagaagggcatcggcgtggacgagttcatcgaatcggccaccttcgccgtcggcggctacgactggtgcatccgcttctacccccacggcaagggcgatggtgccaaggactacatctcggtgtatctcgagctcctgaccaagaactgcgccgtccgggcggcctacgacctgagattggttaaacatgccaccgggttgccaatgagtgtctactctgaaacaactcacagaatgttcaattctgatgacagtagcaaatttgctccgccttatgcgactttcatgaatagaagtaatctggagatggaagcgtcaggctacattaaggacgatcgcctcaccatcgaatgctttcttaccgtcatcgtcaaggaatcgatggcgtctaataccgtgaaggcccatgaattaatcaatgtgccgccgtcagatttatcggaaaattttggcgaattgttggagaagggggaagggtcggatgtgactttcgttgttggaggagagaaaatcgccgctcacaagatcatccttgcagcacggtcatccgtcttcaaggcggagctctatgggcagatgaaggagaagagggcccggcgggtaaccgtggaagacatgcaacctgatgttttcaggggcctcctgcatttcatctacaccgattcgttgccggacatggatgatctcagtgacgacgactactatgagatgatcaggcttttgcttgtggctgctgataggtatgccatggacaggatgaagttgcagtgcgaaagcatccttggcgagcatcttgatgtgcagaccgtcgcaactacattggctttagctgatcagcataactgcaatggccttaaagatgtttgcattgaatttatcaccaatcaaaacaagatggatgatgtggtggcaactgaaggctatgctgatctcaagagaacttgcccttctgtcttagttgatgtattcgagaaggcaagtaagttccgtagaatttaaatgctaatgaaccccttcttcttaggtggtgtctaggagtaggttctagttcttaaattgtataaatagcatgtctgttttgcaagagcagctctgctaacaccgggggttatatgtgctgtgttaagttatgatctccttttggggaaaagtgttagatgaacaatagttggatatcgatgtaaggatctgtcatagcctcaagctctcaagtgctgagtcgaacaacattagaaaaaagttccattccactgagtgtgggaatatagcagcataactagcaacacactgatgctgtcattttaatattctgttatatattgcctgcagagacatggcattttgcggcatgactagcttaattggtctttagtgccggtatgatcgtttaattgatcaatcattgcaataattttgtatagttgaaatttgtttggatgatcgtgttcatgattaatgtttggttatctggttagctgtaaggcttttaagtttcatctggcgttcgagtccaatggctaaacctggttatattgcaccaagtctatattaacgaataattactccatagctttgcgtgctcatgttttactgctacaatgggaactttggatagttcataattatcagaggattttattgactgcattggtgttctattagttatgcagagtaaaaactaattatcttttacaccagcaagcacaatatagagaaattctttaccatgttgaaccttatgaaggtggtaaaatgtaggcctgaacagcagtaaacttgaaattttagagctaaacaggtgctatgtaatgctgttctgcattgccccgattttttaatgaatgccctcttttccatccaacggtgtcaacgaaggttgaagatgatgtttggcctcatagaactgaaaactcaaaaatgttttgtattgaaacattgccctttagcctgaactcgattacttctgatcttgttactgttaaatgttaggatcaggtgtaatctgtagagcataacctgattacttggtaaggcaggttaatatgtgcatagcatttacttaattaggtatatgacatacatcatttaggaacttctgctatttgtttagtggtgattagtgaactctttttttaagggaagattagtgaactcatgagactcgcaaatagatgcttgattagtttgtattgcaaaactgtaagaactcaactttcagaaatattggaagcatttagccaagtccaaatgtgattttcattgtttctcttaactttgaatattcattctacaattatcctggcctgaaagctatcttgtgcaattcaaggtctaacggtcattgaattctcatttgttttacatttttataaatactagaaaaatgcccagcccatgcgttgcaacggggaagactattgtaatcttattattattatatggcttagttaaggtgaaattcattgcgttaaattcacttgatatatattttgttagaaaatcatgtgctacaattaagagtccgatcaacttaaattagcatgcgagttttttaaaagagattttttatatgatttcttctatatatttcaaaaatgaactaacttaaaaactgactcaaatatggatttgtgtttctaaaagcgaacgaacttaaaaaccgacttatatacagatgacgtaccaaaagtacaagcaaaagcatcctcaatttttataatagtagagatggagattatactccctccgtctcataatatacgggattttggatggatatgacacatccgagtacaacaaatatgtcgatgtgtcacatccacccaaaatcacttataaaacaataatttctactctcttcattttatattatcaaacgttttagccctttccatagtagttttactatatttattgaaaaaatagcaatttctacattatcaaattaatgttgaataaaatataattattgctatatttttttataagcttagaatttgactagaaaaaaaaactcagaacatcttactccctccatttcaaaaaataaagcacaatcacccttaacacaaaaattaagaaactattattaccatattttcgtttgaatcattttaataaatataatacatacatccaatagaattagaaaaattgagagtaaataatttaataaataatatttattagaaaataagtgctaatttaattacatgtattaatgcatatgctctgtattataaatatttttcaaaaaagtagttgaaatggagagagtataggtgggagtaattaataaattcaagcacatattaacggtcataattatccttccaaattaagcacacatgcagaaataacgggtgcaataaaaaattgcaactttctaccgaatgttaatatgcacatccatgcatgacattaaatattattttgtttcaaagttctctgaatatttttttaaaaatacagtataaacgcagacactcataatacgcgcacacacacaactagctctatgagcatattcggaagactaaagccgatatatatatcttgacatgacgaactcaccatgaatatcttgctgtagatgggtacgatatatctctaaatattattttgtttggaggttcctcacaaatgaaggtaattatgaattatgaaacgaaaatgcatcacatcaaatttatatatttcaaaatgaataacctctgttttaattcaaaatgtcaaattctgacatttaagataatggttagtaaggaaaattctgacatttaataaaaatgtagtaaggacaattcacaaatttaaggtaatggttagttgcacacagtgccttattccccataaaagagcaattagcagctaactatgatgtacggtgtttgtttttgaaatgaacatattcatgaacttttttggtgagcaccttctggaatcaaatcgacgaagcaaggggtgtaaaagaatgacttctccatgcccctattgtactcatttaagcgattacaacctaagtactgaaccttggagctcctcagatggtaagctaccacctcatctaaatccatcaagtagatgacctccttgtatggatgaaaccccagcaagtcaacgctaccaaatgtccacatgctcatctcctcttctttgttcttgctaaggtctccgataatgttgatgttatcatcatcagagttccattcagcactgtcttggtcttcctcctcatcgtcatcgtcatcagattcatctaggatccacattttgttgatctttgcatgatgccatcagaacaaaccttctattagcttggttaagggacaaaggttcacatcatacttgaccacccactttgtcagctcatgtgattcgtcgagtgcccacacccgaagttgaaaattctgacgttttgcatagtatatcccggtttctgatcttccaagaacatcttatgtgtatccgccaggtccatcaaatcttggtgttttgattacacggtacttagcacccaaaattgacagcctataaaacaccatgagaataattattttgctgtatagggatatgatttcaatgaaaatagctcagtatgaaaaatgttagggtttaaccgtctattccaatgcgatagaagatgatggatcacataatcatacaagaaaagacataatatatcaagtctaagttgagttatatgacaacaaccggtctaatgaaaagcttaaccattaaatggggttaaacggggtggattaattgtcttcatgtactttaaccattaccgacacagattactcagtaaacctcaaaacaactgcaacaacgaaatatagcactgtaactgtaaacctcaaaataacaacgaaactatcttgctagcacaaatataggatgactagcttaaccattctactgatgagtaatagtttactcggtagaaaacaattgtaaacctctcaacgaattaactgtcttgctagcacaaataaaggatgactagcattatacagattcatcattttaacatcatcactgatcactagttcgtgtacaaccaatgatcgattggtttctggttagtgatgagattttctacacatttggcccttttgcatttaagaaatcaagattaattatacctgaatagttggcaaccctttttagttccggttgtgcaaccggaacgtccaatctgggactaaagatgcgcatctagttccggttgaaacaaccgggactaaaatgcataccaagtcaaaaaaatgtgtgggatgtgggattcgagctcaagatctcttacctcagctctcacgcgcgttaccatcccaactaatacacacatctaacttggatagaggtgctttatttttaaactaacattggaggcatctttagttcgagttgatgttaccaaccgggactaaagatcaatttttattccaccaatctcaccaatctggactaaagatacttttagtcccgattggtgttaacaaagatcctccatctttaatccggattggtggga

SEQ ID NO: 6353 - DNA, 55895 bp, Oryza sativa
caggcgctcggcccagcccagcccagcccagcccagcctgaaaagcagcggccgcttgtccagaccgccgacacaagcgctacctgctgctggcgctccgctcctcgggtccccagaaaaaccctaaagcgttcgtccagcatgcatctcaacggaaagcccaagctcgtcgccgccgtcgatccctcctctctcagccgagctatttaaaccggcgaggcgagggcgccaccgtggaaaacctgaagcttctcttctctctctcgatccattcccccaaattcccgcttccgccgccaccgccgccgccgccgccgcagccagtctcgtctcgcgagcgtacggcgccgcctcgacccggccggtaatggttcctcccctcacttcccccctagctccctcttcgttcgtcttcaccggcaccgtcgcaaagctagcttagccaccggcgcgactacaaacggcgccaggcggaaatgggttcctcgacctcgggctggacgcctccatggatcggccaagatttccacccgagctctctcgccggtcgtcgcttcgtcgtctcccgctccggccgccgctgattcgatcttgtggacgtcgacttccgccgccgcctctgctccgtccatcgagccgagccgatcgacgtggaagaggcggcagtactgttcctactagctacttgcattggtcgagccgagccgagccgatgaactgtcacggttagcccgaggctgagccgaaccggttcttatgtgggttcactcaattttaagccggttcagttctggttctcaatagtccaccatattacacccaactcttcacctcaccctgtccatatgtgcaccacagatatcataaaatgatccttaaccttcggttcactagctagcttttctttattaattaattgctgctccattatatatttttcgatatttcttttactgttcgtttgtagtattttcttgttggtttatttgttgttgctttgtgtgttcatgcatgctagatcacaccaacagaaccatccgggcggcaagacatgacctcctccttccactatatcaaacatgcacctacaaaagcctgctatagttattttattttgtacttatttatgaagagtaatctcgtttgattagttaccatctatttatttaatacatgttatgattaattcttctttgataatcgtcaaaccatggttccttgaaaactaggtacatgtttaaattcttgagagaaatgttgtagtggctaatgtaccaaaaatcatctcacacacttggatatacctgccatatctcatgcaaaggcatgtcaagccaatacacattgattagtgggttactcacctagagtgacactgaagattatatatttttatattttttactattcatttgtagtattttctcgtatgtttatttgttgttgtttttgtgtgtttatgctagatcacagcgatagaatcgtcggaggggcaagagctaggtggaccaagaaggctacgctgacgttagcaaattaaagcccttgttctgcaaggcaagtcatgacctactccttgcactatatcaaacacctacaaagctagcctgctatagttattttattttctaattatttctgaagagtattaatcttgttagattaattaccatctatttgtttaatatgttatgattcttctttgataatgtcataggatggttccttgtaaactaggtataggtttaaattcttgagagtaatgttgtagtggctaatataacaaaaatcatcacacacacttggatatatcatatacctgccatcatgcaaaggcatgtcaagccaatacacattgattagtgggttactcacctagagtgacatagaaaattatatatatatatatatttttatttatttatttatttatttatttatatttatatttatatttatatttcttttaccgttcattcgtagtattttcttgtaggtttattattgttgtttttgtgtatttatgttagatcacagcgatagaaccgcagagctgcaagagctaggtggagcaagaacacgacgataacgttagcaaagcccttgatccataaggcaagtcatgatctactctttacaatctattatgctttaattatttatgaagagtattaatcctattaaattaattaccatctagctatttaatatgttatgacttttctttgataatttttgaaccatagtcattccttgtaatctaggtatataggttagattcttcagagtaatgttgtagtggctgataccaaaaatcatcacatgcgtttggatacccgccataatgcaaaggcatgtcgagcgaatatgcattcattagtgggttactcacctagagtggcgtggaagattcaagatccacgcggatggttgttttgcatatatgctatctatgattgcatgtatgggtctatacttgtggtggcatccgtttggagccggttcaagtttcttgtttgattttaatttttaatgtattatggatgcccaaatttttcctagtaaaattaattgtgtgttactttggaaagaaaagtaggaatagtagcaatccacaatgcaaaagtagccctctgcatcatgtgagttctaatgcttatagctgcagttgtattctgctgctagtgcatgtgttaacataacaagaaatctctccctccctatcaaaacaaatccagaacatgatatatcttcatgtgagcaaggtaaacattcatggaaatcacattgtaagcaccacattgtttttttaggataaagacatgtcagttttaattaatgctatgataatcatcatatgccctcctggttgctcagatcgattgctaacaaggaaacagatgattacttacattaatacgcttggattttaattttcggcacacttacacactatgcatatgttctttatgctaattaatgatatgcttgtggaatacacactactaaaaaaagatttttctatacgagagcccttgtagattgcaagtggaccgtaataagtcgcatcaaaaaatcgaacccttattttcgcaaatgactctttatgaggcccgcatccaaaaatttattttcgtagatgggcctcttaaggggccacatgaaaaaatgagcctattttctcatgcggtcctcttaaaggaccgcatttttgcatgtaggtctcttaagtgaaccgcatggaaaaatacccttcctcttctcagagatattttctcatcacttcaaactttttaactcctctccactctctcccttccttcctcctcctctcctctcctttgctctctccttttctcctctcttcgcctcctcaccgagtgcgacgagggacgactacggcaccaacgatggcgggcaagcgggcgggcggccggcgggtggtggcggcgggagcgggcggccggcgagcggatctgccacccccgtcctcgagagtgatggcggcgcgcggatctgctttacccaacctcaggagtgtcgacagcgggagtgggagaccagcgcgtggatccgccgtctccccgccaacggtgacgagcagatctgcagcccccgccctcgtagcgaccgcggagtgcggatttgccgcccccaacctcgggagcaggcgacatatttggcaccgccgccctcgggagcgatcacagccacggcgacggtgagcggcggctgcggcgagctcgtggatccccctcctctcctccctctctccctcgtcttctgcgatcccggcagccagaggtcatggggtagcgcatctatcggccgtggatccagccgggatggatctaccaacaacaagagcaacttgaacgtaagtcacatacgagttcctattgctagctccagcgatagcttgcctctatatataagtctataatgtcgagtatttatgtttgtacaccatcatcgcatcagttatattttatttttaattcgagaaactctgatcttgtaattaattaccttctggatttcttcaatatatgtatatctgattcttgcggtatatgtatatcatattgtcgtatgcagaagtgatggattcgtcgatgaaccctagcccattgatgtggtttgataacacaactcataacttgcttcgtgctgctgactgttatgggctggaaaggctgaaggccatctgcgagacgaagctttgcctggatattgatgtgaagagcgtgatggttatattgcttctcgctgatcagcaccagtgcgacatgctcaaacaggcatgcttctccttcattgccaatccgaacacactggaaacggtgactggaacaccagagtatcatcagtttaagagtttatacccaattctactaatcgaggttctggagaatgtttgcatacttcgcaaatgatagttacatgtcgacggtagctttatgctttattctaataaatacaatttagttgtgttgtttgggcatattaggttcatgctatattctctactgtatgtgtgaactttaattcatatcagaccaaattggatgtaatagtactgcccttttaatatcatcaattccagtggttttaatttgtttagtaaaataatgtgttggtattacttctgccatggttgtttattccacttatgatatgaggttgtgctagatttaatgtttagtgtgtgtgaaagatagaatgacgatggcttcatgtagggatggcaatatggatccctgttctccaaacgggactttcccaaggggcgggatgggagattattttgcccccatgaaaatgctgtagttgcaagtcctcctgttgcttatttctaggaagaaaataataattaggtttcagtttcatgcatgttcataataggattattattcccataaagtttataatccacattttctaacactgccacaataccactcatcactaacggctcaaaatcatatcatgctttggcttgggcagccgttacacagactattggtcgatgattagggggcttatctgttgttactgttatctgatctctctaatggcttaggattacaaaccgttacaaataagtcttactatctgtgatggtcgctatcccaagccatcattgattagtatatatcagtgatatcaatgatggcttagaattgtgagccgttatagtcttgttagactagatcttacacttgtctcaggacttcgtctataacagttggctattttgagctattagtgatgtccatggaaatgatttatatttttccctttttaatggctagctgcatgatttgctagtcatataccctttgaaagcaacataacacaatataatatatcacaaaaccatatataccacatatcccaaaagtttaaaacttgaaatttatttgcccttaaaatgttaaaaatgcaattcataagttttcctttgtaaccctttatatttagaaaaaaaaaatagaaaacaacaatcttgttccatctctcttagccaaaccacccatggtaaaaatacgagacgatcgacataaagtaatattcccaaggtctggcaaagcgtaaaccatgagaactaaacgtgaacaagtattatggcgaaaactgtgtggggttagcgttcaacatgagtgcgtcatgcctaaatttttagtgtggaataatcttaattagcgttcaacatcaagaatgaagtgtgcccctgtgtgttgtgttttctgattttctatgcattcatacttgatgtgcactaaaatgactaaggattgctttcaaggaacattcaaacaaatattagacattgtgagtagctagtcctctgttaaactggcataattttatcacatctcgtcttcatagttaatctattttcttaaaaactatattatttttatctcaatatctcatcttcattcctttccatttccgtttgaacgtaattactagttttgttaaaatttcgagggaatccatgcgtactagtatattgttagttgtgacctctagcttttctaattaatcttgttttcattcaacttatgtcatctaatttagtttcaacactaatacacaagctctagtgcactggtttgaaagtcaaacagcatctctctgatctctctctctctgcacacatttaatttgcgtgagaaataaccgattaatttacttaaaatattgttaaataagaaacatgatagtacggttcaaagataaatgaattaaaaaggcctatatataccctactagttttagttcatctaataaagtaatagtaaattactaggtacatactcttgtccattcgatcttaatcttgatactgttgaaacaggaacacccccccccccctccaaaatagaaaccgtgtaccgatgttttcgcaaaaatctcaaattctattcctgtttttagctgggtagcaatgtgaatattggtatagaattcacagtattttatatgtaagcaaccaatgaattgcacaagtacaggttcattagctacataactctttttttttttgcggggaagataatgtattactcatttaaaaagtcatcacagcctagctgtaatatggacttacaatcctcttccaaccagaaaccggacaaggactcaaccctagccttattagcaagaaaatgactaatccgattctgactgcgctgaactttcttaatgaagatttctgtccccttccatgatgagttttgcctcctgaacaagattggctagttctgatcgatctctccctttctcttttttttttttttttttttttttttttgcggggagatctctccctctctcattcagcatttggataaccgacatacagtcggtttctaccacgatcggtagcatcgtccactggaacgctttcaccaatccatcagcgcaagcacggagctctgcttccagcgctccagagcatttctgcagaggcctgcagcaagcaaaaatgggtccgccggaactgtctctgaggattgccccgattcctcataactcattaatgatgcataactcattaatctgtacataactcattaactgtattaagcacgaatgcatatatattttagcgttaaaattctatagtactgaaatatcttcagattcaaatgtaaattccaaaacaggaagagaataacgtgtgaccctcaattttggaagacaattaattaatttgtatcgtgactacattttcctgctgcttatctgttggtgagttgtaacagctatccatgaattactgtaactaacaattgcatgccttccatataaacacatcaagaaatccctcttctccatccatccatccaaatttaatctctagcccttgctagctactccttccgtttcacaatgtaaattattctagcatttcccatattcatattgatgttaatgaatctagacatatatatttatctagatttattagcatcaatgaatatagaaaatgctagaatgacttacattgtggaacggaggaagtagctaatcaatggatgcacctctcgagaacaaccagcccgcagtcccagaggctgatgcaccaatgccaccgacaccacctcgtacgcgccctgtgccccaaagcacagcaagcttataagccgatgcaatgtccagataacttatcggctaacaccccgataaaacactagcataaacctatcggcttaacaagatctatattatcaacaacaatctagaaggtcgaacctaaccgacacagcacgaaattgtatatgataatttaatactcgatgagccgatagatctatctaatatgatggatataacaaatctatttagaacaacattgtgattctagagatatatcggctaagacagaagatcggacctaactaagacagtcctaactaaactgatgcgtctctaaacacaatgcaattagagatagagttcataaatcaggtaggcaaatatatcatccaaaccagagcgatccaagagatcgaagcgatgcagccttgaacaacaccaacgtagccgatagattcaccaaggccagcggaacgtatgacttaccccttcgccggagatcgaactgaactgacgcagccccgcgtcaggtgccaaattccgccggttgataagtaaaaacttcggaaaagagagtggtgatgcgccgagagtagttatattgatcgagagatactttacaatgaccccgggtgtacatatttatacccatgggtagatactcttccttgtaggacaagaaagaaactttcctaaagataaaaggaaaacacaaagtccttatcggacactaaacatacttttctaaagataaaaggaaactaacaaactattcctaattaatagataacttgtcatgttacatcctccttgaactcggtctcttctagataagtttccttaaccgaatcctccaagaatccgactgttggcgacttgataattctcatcggctgattccgagatgccgaagctgatagtgactaagccgatgatgatttcgggcttacaccattttggcgttaacacccatccccaaaccttcaacctctccgtgcggcaggaagaatcgtctcccactgacgtgcctaccgtttcctatcgcggctagcgggtctctcttctccggcacgtagagcctggcatgcaagcagcagcagtgcctgattgaggaaaaaaacatggcacgacagcggccatgcctacaataagctaggtaggtcatgtccaattaatgaaaataacgagataaattaagaaatggacacaactcattattcaactttaagtgccttttgcaatcacggataattttgcaatcagttaacacaaagcacaaatacttgaatggagaagtttttgaacgaaaagaatggagaaatgctccgagtgcatccaatgcggccagcgggaggcttgccatcgcggcgaccaccataacatggattcgatctatagctagcgacgaaccaggcagtgagcagcagtacggccgtgccggtggtgaaggacggcatcaaggcagcttgggcctgacctgagcgctaccccaccgttgcctataggccagccggactctgaccctgcttgagttccgcccagtttaatgtctagttagctgcatgattcgatgaacatactacatgcgccggtgatgcggccggcctgctgctcactgcatggttcgtcaatggagagggagaagatttggggatggggatcgatctaggaaggagcacggagaagaggaaacaaggtaaggggtcatctggaaatctgtatagaggatgcgggcgtttttctaaaaagaacaccccacctacatcgtgtccgtcagatcaggatcggagggtttataacagccgagtgcatgagtgcagaaggttaggtgtgtgcataggatatgttgcccagttgaaaagaggaaagctggaacgggcacaagtgatattccattgtatgtgcagcagcatgcacacagagatggcagcaatggcggagaggctccacctccgccaccgcctccgcctccaccaccagcaggtgctgcagctgctgcgataaactgaaccaacaggacagttgatctgatcaatacatgcatgatgcagaacgaagtgtgtactagattttaacttgtttatgaacgtttggtgttcttgtgataagggggtgtggagattatgggtaccccatacccacacggcatggttatccgactagttataggggataacttatatctatgtaatatgtaacagatcatgacttgggtgttatgtttccttgtatattacggaacggcctaaagtcctgatttaggaaaccgataccgtattggttaaggtttctatcttgtaatcctgccccccatcctatataaggtgggcaggaggccctctagggggcatatatgagacaacctgatcgtcagatcaatacacacccggcggattcaaatccccaaacaggagtagggtattacctctcattgagagggcctgaacctgtctaaatcctttgtctccacatccatccacttttaggtctcgtgcgctaccccgttttattattgccgaattcatgtttcgacagttggcgcgccaggtaggggttgcgtcgagtttcctatcaacgagcacgatggaattaacttcatgagtcgccgacttcgttttcgcttcgggagttttcacttcctttccgtcgaccacttcttcaagctcctcttctctgacttgatccaaatcagtcagggggaaactcaatctgatttttatcattatttatcatattgatttttaatctcagattaatctcttgctattttttgttgttgttcgcatataattacgcggcactattgaggcgattaatgctggtcatggagtcgaggcgtctcagctttccggtcgatcggccgcgagtccactctgtcggcttgtcttcgccaccgccattgctgataacaacaacgacttcaccgccggcctgcctccgtcgccgccgagtggtgcctccgtctacacggctggcctattatgccgccgctgttgggcgtctacgacttcaccgccggcctgcctccgtcgccgccgactggtgtctccgcctacacggctggcctattatgccgccgctgttgggcgtctacgacttcaccgccggcctgcctctgccgccactgactggtgtttttgcctatacggttggcggactccgccgctgttaatgggcttcatcatctacaccactggcttggttccactagcgctgactggtgtttttgtcaccattgatggactgctttattcccacatcggctacttctgctgtcatcgagggaatacgacaaagctaagtcatcatttatttcattctttatatgatattttgtcttttcctttgcctcactacatcaactggttcgccgttgactagtgagtcgggggctatagatgttatatcgtattttttaaacaattttcataatatttatcttgattgcttgcgacataatctgagtacaaaagtacctatcgagttatggagttctatcttcctatgctttccgtttggtttgccaatggatggttgcctttgggccgattcctagcacccgggggctcgttggatggaccgagtaacgcaaggtgccaagtattattcggaataaatcaaaagcatagagatgagataaatttattttctgctcttaataattgcaaaagtacccgagtagtaaactccgatccgtgaaactttgttccattaatgacgaactcatgtcactcatatgcatgtttgggaagtgcttaggccgactcccagtgcttggtggctatgactagtcgggcagagtgtttaaacgtaatgagtcatctgctcggggaaatcaaaattaacaagagaagaaatacatattttaaactgcttgaatttttctcgagtattatatttatatcagatactactcatcctatatgtttgttctgcaggatccagatccagatatgcataaaagggattcatggctttaagcttatctcttacgctacaggaatggatcagtcagaacatcaccaccggctcgcctcgaccgctgccgacttgtgtttccgcctgcacggctggcctttatgccgccgttgttgggcgtctacgtcttcaccgaccggccgcctcgtccgccgccgactgatgcttccgcctgcacggctggcctattatgccgccgttgttgggcgtctacgtcttcaccgaccggcttgccttcgccgccgccgactggtgttcccgcctgcacggctggcctttatgccgccgttgttgggcgtctacgtcttcaccgaccggcttgccttcgccgctgccgactggtgtttccgcctgcacggctggcctttatgccgccgttgttgggcgtctacgtcttcaccgaccggccgcctcgtccgccgccgactggtgcttccgcctgcacggctggcctattatgccgccgttgttgggcgtctacgtcttcaccgaccggcttgccttcgccgctgccgactggtgtttccgcctgcacggctggcctttatgccgccgttgttgggcgtctacgtcttcaccgaccggcttgccttcgccgctgccgactggtgtttccacctgcacggctggcctattatgctgccgttgttgggcgtctacgtcttcaccgaccggccgccgcatccgccgctgactggtgtcactgcctgcacggctggcctgttataacaccaactgatgctaccttcttcacggctggctacattgctgtcactactaataggcatcagtatcttcaacacaagctgcctacgtttgccatggctgccgactggtttcttcacttccatggctgcatgattctgccagtgttgattggccttatcttcttcaccgccggtcgtctcgtctgctgctgactagtgccctcacctctacgtctggtttatacagctaccactactgatggacatcatcgtcttccgttgccgactggttatgccgccgccgactagtgcttttatcttcacaactgcgcgtcttcgctaccagtttgcttctgttgccgccgacttgtgttcacttcatcacggcgatgcaactttgtcatcatggtggagcgacttcatctttattatcttcggcactggcaaattctattgctgctacttcgcaagttttactacttcaccaaccacgacgtctttgtgaacctcgacatctcggcatgcaatgccatgatattttactacaacaagtgactctccaatattcaggatttctacttggacaccttcaacacatatcttcaatcaagcaatgactactcgacgacaagaagctataattctcgactctatgttcagttgtttcccaactaaccaaagagtcgggggctacacaaatataaggctcaaaatttgacaaattttatgtcaagctgaagaaatcaattaatcatccaatgagtcaactccaggagtcattatcttcatctttgcttcggaacagacattctacttcaacaacttcaaatatttcggtttagacgagttgggcaacaacatcaactctcctccaattatttgtcttcacggttggcctactacgcaactgccgatagaggatctcatcgttatcatcggctgctacatcgctattgactggatcaccgacatcgtcatcttcatcaacatcttgtcaagcctcatcaacatagcctactctgctgccgttgatgggaaacttcatcatcatagtcagctatctctgttgccgctaatcatcattaccgtcggatgcgtttgtcgccgccgattattttcttcatcttcatgattggtggatttcgccatcaccgttgatgcgcgtctacgtcttcatcgtcggtttgcttttgtcaccaccgactgttctttcgttgttgttgggcgcctacatcttcactgctagctgacctgactgttgccgactggtttcttcgcctccatggctatgcgacttcagtacttttgattggtatcactatcttcactaccaccaatatttttgccacctctggtgggcaatattctctctatattggttgtcttgtctctatgccaactgcgtcagctaccatcaatgaacaattgtgactacgtgctcaggggcttactagctcaaatacaagtattatatcttcaatttggacttgctccggatacatgcaacatgaattcatgatcatgggtctattttatatgctcaaagactggactatttattattccccgtaagggttatcaactgaatacttgcgccagtcgggattcgattgttacatctattttggagtatcccataagggataaccactcagatcagaagctattcatatgagctacgcttggtctatattacccggaagatttgttactcgggagcatgttatatgcgtcatcctttaaagggtatcgaaggcatatttttttgcctaggcctaatatgtctgcagcccatattttcaggtgtggcctgtcacgttcttttagggacttaggcactttttgcttaggccaaagtgcgcgtgatcaagtgcccaataccttaaaatccttttataccgcagttactcaactttttaggagttggtacaatgcatcttaaaaggtgtcaaacagtaaagctttatatagctgccccgctgactttttaatatagtcatggtgctgtttgggtttttaagcaattgattggatacaatatcgttgctttttgccacgtaagtgtgcatttttattgaccaatattatggcttaggctgattatatattgtggtcatttttcaggcggttggtaaatcctttatgagtttatttactcggattttataccacatatgccatatatttccaggtgtggtggaaccatgtgtcttctagggacttaagcacgtctgttaaagcagtgtgcgcatggcgtatgcccaatactttggaaatttctttattcacaacatacaagcttctttatagctattttgctatgtgaattttcaataatgtagccaactttaggttacactcatcatattttacaaagcagtcggtatatcacttggatcatattattcagggattcacaccgcatatgctacatattaatattaaatcgcttggttgactataattatcaaaaccactcggttggttggattatttattccttgactatatgtttggtttgttcgattaaccacatagtcgggggttacacctattaggtgcatctagtcgatgcacctgactatatttttcagccctccacagtcttcagatttggtaaaagtactcgggagaccatgacgaagatgattgaagcactcggctttggagtaatctagttcgagagaaggttatctttccgactgtgaaggtctcaggggctactgtggagattatgggtaccccatacccacacggcatggttatccgactagttataggggataacttatatctatgtaatatgtaacagatcatgacttgggtgttatgtttccttgtatattacggaacggcctaaagtcctgatttaggaaaccgataccgtattggttaaggtttctatcttgtaatcctgccccccatcctatataaggtgggcaggaggccctctagggggcatatatgagacaacctgatcgtcagatcaatacacacccggcggattcaaatccccaaataggagtagggtattacctctcattgagagggcctgaacctgtctaaatcctttgtctccacatccatccacttttaggtctcgtgcgctaccccgttttattattgccgaattcatgtttcgacagggggattgtttgatcttagagtggtcaaacagtacccttctttagctataaatttctcgtatgagtaataatctgaaacatatattttgttcgatgaaacttacttgcttcttcaaactgagaaatgttgtactccataattctctacaaaatattttgcttaatggaatacttggcatatatctttatttaatgtgctctgtgctgtagtagttattatggatttgatccaaaatggtcatgcagtataccttgctatatctctctttagttgcaaaattgatttcaatttccagtatcaataatcaaaagcattattttgttcgatgaaaaattttcttgcattggttaaacttcataatattgtacttgcatattctctggttttttagtatgggagcattttggtatggaagattcgttacacaacaaacaaacaaggatctggaatgggttccatacatcgtcattttggtggcagtacaggaggttagggtagacagaaatgcaagaatttttcaaaatgaaataacaatatgccaggtaaaattaatcacgggaaagattgaggagcaagaacttgatgaatccctgggacaaataaacacctctttctgtttagcataatcacctataacacaggagatctagtatagacacattgtctaaatttctgcattttgcttaatttttctctgctgtactctcactactgtgaacctcacttacctagcatctctttcgtccccagctctatcgacgaaaacaaggtaaaccgagcactgactatactcagtttctaaaaataacttcataattattgaacacatactaactgtataatatgtttccccacgtgtgcgcagtaaattctttcaatatttgtgcaggtgtgtatttcatgatgaccttagtatttatttccccataaataaccacaaaatgaatattggtacttcagtttgtactgaaactatatttaattatattgtaaaatcattaatgagttatgtaattgacggacatagcaaatacctgctcaattcaatggatgcctacggtataagttagaatgcagcattacgagattatattcgtaacaaaactttttcaactgtttttatgcatattcaacctaaatgtttttttttttgacagcggagcaaatggtgccccccactccccaatcctcctctttgtatgtagtcgactagcattatttcagactcatgtgataagtttggctcaagggagaggagggagtatatatgtcaagatccatcggtgtaattatgtaaatgcatttacaaattatatgtactagccacctgcgaatataccaccactcatttaagcgctccaattctattgtccatcccacacaaggattgtgcccacccgatcaagatagtacttaaaaaacacaaaatccacttccaactacttttcttcgtacattgcttcccggcatcacgcgcatgttcccgagtacgtctattcccgatttttctttgccttccttcgtgtactctgattaggagaactatactgagaaggatagcaagatcaatggatagattcaatccaaatacctgatcatcgtctgtagttcctttgggtgatctcagttatagttcctttattggcctagcggcggatggtcatgcttagcggcgtttagttcgatgctagctagccttcttggggtctttgtgttcgtgctgtcgttggcttgttgcgtgagtggtggttatttttcttcgcattcctggttatgacctcccaaggttgtaatcttgtttttttttcctgctttatcaatataaacttcgcactatctggtgcgagtcattcggaaaaaaatacctgatcatcgtgggcctcaaccattgtttaattcggtaacagatctagctggtggttgctgcttgtcaatctgaaaccaaattaatgatgtgtcatttgctggtatagagtatagacaactaacagcagccgttggatggtagcttctacgtactctccataaggccttattcagtttggaggggattgaaggaaaataattccacaccacaataggtgtaaaattaatccactctaatcctttcctcacgaggattaaccgaacatggcatgagggattaggggatagagatgcagatgagatgccccttccgccgctggagattgcatcccatcgatgtcaccagataagatgagatggaaaaacttattttgtgatcatatgtttatttcccgtattctaatttctaatctcatcggatttaaaaaaatttctagtatcatccttattgttagttaaaaatcaatcaaaattagagcttttatatatgttgttatgctaagtaactaactgcaaacgtatgcatgtatagtgctcctatgcaatgtttccatcatgaattatcggctattcatagatcaatcggctacccattgatactggtaattttctattttgatagttcctcttccaactttcccaactatattgtgctttccacacaaaacacaatacaattatgatagtataagtttcccacgcgatatgagatttgattacaatagcagcaatttgtatatgtagaaaaagaaaaccaaagaaaaattatagctagcgtatatatagcgatcctaatatttcaatttaataattaacccataatagctcttgttccgctcgataaaactcaaagctcttatattgcctacacattgtaaactgaaactaagctctcatattgtctttacccattgtaacttccgagtatttttttttaagtctaatttaaatataaattccaaaacaggaagataatgactggtgattctcaaatttgtaatacaattaatgcttatcttttggcgagtggtgacagccaatcatgagttaatgcagccatctcgatttccgtcctatatgaacaccccaacacagatccctcttctctcatccacccaacttatcttctatccctagcaagcaagctctaatccatggcggcgcctcaggggaacaacaaccaggctgcagctccggcggcgccgcctccgctgccgccgcagccaccgaggccgccactgcgacggcaaccgctgctggaccagctcccgagacgcctggagcatgaggtttatatatatatccttgttccgatttgatggatcgatttcatccatttcttgtgatagatgttcatgcgttaatgagcagatcgtgatggtattttatggatggcttatatatatgtgcagatcagcaggattgatggtcgtatcagggagctagaggatgaatgctacaggcttgtctctgaaggacatgggtcgacgctggtgataaggtttaggattgaaaagatggaagctttgagggcaaagctgatatcccgttacctgcagcagcagcagaacgacgacggcggcgatagcaatggcggcgactctccgcctccgcctccgcctccagccgccggtggtgccgctgcggtgaactgaaccagctcatgggtggtgcatggtcaatctgcaattctgcatgatacagaacgaaatcttatatatatgtgcctttgtagcatatgatctgaatcatgtactggtacttaataatttgtttatgctatgaatgtttggtgtacttttgataatggatttgatcttagagtggtcaaacagtacctttctttaattataaatttctagtatgaaatccaaaacatgtttttgtttggtgatccttgcttattcacaaatatagtactccatagttgtctgcaaaatatttttgcttaatcaaatatttagtttttttttgccgataaaccattttctttatctacaaaaagtagttttgtgttgttcaactgttgggaaactctgtgctgtagtattgattatggatttgatctaaaatgttcatcagtacgtaccaatattaattacattttctttcttgtagcaataactctagttcgaagaaaaaacccctttgctttgttcaagctagttatctggctaatttgttgatgaaagctagctgggcctttattatatcctccctttatcatagaaaaagcttccactgcacaataatcctatatattattgtgaaaggaaaaattagaatagaatatgctatatatttttcagaaggctaagcctcatgcgctggtatgtggataagtacaagacggctgaaggaaccagcagtccaaaatgtttatgggatcattcaccaaagtgtctgcctgttgctacttagctacgataagaaatccatgcgtgctatctattttaacatcaagcgctcaccggaggctacaacctcagatctcgctggagacagccgccaccggtccaccaatatcgaaacagacaccctagttggtggagggttgacgaacgccggagatgggtgggagggtagccagagattgtagtgagagcactcgcaatggtggattttggggggtcatggtggtggatttggagaagatatctggaagagaggtgagtggtatgggttattttcttttcttttctcccctcaaatgccctgactagtcaaagtgtgtgcggtggaaaaatagttggtgcccgaagtgaaagtggtggtgcggaatgtatttattcagcgggatttcaatattgcgggaacccaaaagtgtgccctgacgggcaaaccacgtcaattcgtatatatcgttactatggtgaaagaacgtagagtaagaccttttatgatcaaataaaataattgataacaaagctggactatttcaatattttcaatccagtgagcactaataattcaacatttgaatgcaagattttaacacggaataggaaaaacgtggaaatagattgcaatactacatgatctcaaaacataggaacaatagaagtaatatcgtgttagctggtgcataagaatttagaattgaaacacagcaattttacaggaaatcctatgtgtgtgtgggagagagagagagagagaagagaagagagagaggggggggggaagagataatgtgcattggacttagctagcataggaaaaatgaaacatgagatatgagctcatgttaaatttcttatggagggatgtagggaagcaatccatacgaatcttacaatcctcttcctttgttccaaagggtctaacatacacaaattttaaatatattatatgaaaattaacttatagctcataaaaacttacaaaattgcatgcagaaaggtcaaatttagattaaaaaataaaacaaaaaccacctataacagagaaaaaaaaacacttacattctacaatgagtaatttcatgtgactgaatttcagcagcactccattgggccacttgtgcattctggccttgtgggcgttgcatttgtaggttcgaaacaaataggtcgccttgccttcctcaccgtcttctcctcctcctcgtccgccgccaccgctggcggccatcaccgcaatgttcgtctggtccgtcacttccccctcctcccctcctcctcctctccaatttctgaaacaccatgctccccctcttgcagcggcaagcatggcggtgccgaggaggaccaagtcgatgtccgccgtgaagacaaagcaaggcgtgcacgtgttggaggtcctggggtacagccggcacaagggcatggggggcggcagcttcatcagatccggtacaccaccagtgatcggatctttggtgactaccccttactgtcacgaaaagttagaatgccgtccccaagaactttgttgacagtatgccatcacaaaacgcctatcacacttgattggtcacgaaatccaatatttggtgacggcaagccgtcacaagttatttagtgactgtatagcagtcaccaaaaggctattcccctcattttgttgttttggctattttactgagagtaatgtgttagctgtagggaaaatcttttcatttggcaggggatgtttgtattcacctaattattctttttagtgataagcgatgtaccaatcaatagtatagtgactgtagcgaatctagaattattttagagcctgggctaacttcactaaagctattatttactatagaaattctatctcaattttcctaattatatgaaattttagtggattatccaccgacgagcccgggcaactgcttggggttgctgggcaatagattcgtcactgaatagtgaggcgtatgtggatgtgatgacacaaacccaatctctcaaaggtgctcaaaaggatacgatgagtgtgtgcacgtttataaggatgagtatgcgcgtgagtatatgagtgcctaaattataccatgtttctaaaaaaaacaataaaggtactaggcaactgatgaacacaatgccccgtacaccgacaacatacctcagtgagagtaaaaaaataggatcattggtgtttaccaatgtagccacacaccaatttatagaatccgtctgttttacaaaatctgaatttagattcatacaagtaattccaccttataggcttataccacattttgattttcttttctatctcgctttgcatcacaaatagcaatccaacctaaaaatccatgagaaaatatagagaacactattccgtgggaacgggatgacttaagtcactaatggtaaacgctatttcgatcagaaagacgatgcgcgcatgattttcacagagtgccggcactatgcatgtgtttttccttttcttgcacaagatttttacaaacaggtctccggcccatgtggaccgtttgggcatgtgaatctgttggcctaactacaattcatctatacctggaccgttcatgtgactttttttaaaactttttttcccttttttctcgctttgtttttaattttattttatttttggttgtgatgcttttaagatttagtatggaacagaaaaattgcattagcataattataataatcgtgtaatacacactatttttttctttttattcgatacctataaatatcagatccaatacgtgagtatcacgtatcagacccgatatctaaatattagatccgatacatataaatattaggcctggtacctatatgtacccagatccaatacctgagtattagacccgatacatatagatatcacgtccgatacctatatgtaccagatccagtacctgagtatcagatccggtatctaagtatcagacccgatacataaagatatgaaacccgatacctatatgcgtcaaatccgatacatgagtatcaggcccagtatctaaatatcagacctcatacatatagataccagaccagttacctgagtaaatattagacctggtactcatatgtaccatgtctagaatttagaatttaggtaacatgtatgtctaatatctaagtatcatgtacagtacatagatgaatcatatacggtacctaatacttacgaggcatatgtgcatcacacatcgtaggagacctgtacgagtatattgtttaatgacatggttggaaatgggagattggaatgacgaagcgctagaagcaggggaggtgatgtcagcgttataattgatctcccgttgaaacagaatcctgtggtgtagtagttctcaaaatccatgggcctagcccggcccacttaaaaaagcccatctatcagtcagataaaaataatcagaaagaggtaaaaacgaaaaaaaaaaagacgaaaacaactccgctgcggtctcatcgccgtcgtcatcgccgccgccgccgccccattctccggccatcctccgaaggttcgctcgctcccatggcttcccctccactccccactacttcttgctccaaatgtgctttctcttttttctctcaccccaccctgacatgttgccgttgcttcttgattccctccccaccggcaatccaccctcgccgccgccgcctcaccagatggcgcgcgcaaagacggtgtcgaagtgcatcacggagacggcggagggaagccacgtgttcagcatcaccgagtacagccagaagagggggatgggcgtcggcaagtgcgtccggtccggcgccttctccgtcggcggccatgactaggccatccgcttctactccgacggccatgggagctccgattacatccacgtctacctcgatctcctcaacagaggtgtcgaggtgcacgcgtcctccgacctgaggctgctcgaccacaccaccggcctgtctacttcagtgacaaagacattgcccaaagtgttaagctgctatgattccagtagttttgcttcattggctaattggtcgaggcatcggcgtatctccgcgacgatcgcctcgacatcgagtgtgttgtcactgtcatgaaagagccacgggtgtctcagaccaaatcttcccccaaagtcgcggtgccgccgtcagacatcgcggcgcatcttggcaagctgctggaatcgaaggaggcggccgatgtcacattctatgtcggggaggatacctttgcggcgcacaaggtcgtgctcgcgatgcgatcaccggtcttcaaggcggagctctttggcccgatgagggaggcgggggcacaggtcttacccatcaaagacattcagcctgatgttttcaaggccctgctccatttcatctacactgattcattgtctatcattgatgatcttgtgggagatgaccgtggtgaaatgattcggcacttgctcgtggccgcggatcgttacgccatggagaggctgaagctgatatgtgaaagtgacctctgtgagaatcttaatgtgcagactgtggcagctaccttggctctagctgatcaacatcattgtgcgtcactcagggatgcttgcattgagtttatgtcctcttcttcaatggatgatattgtggcgacacaggggtttgtagatctcaaaacaaattgtccttcagtcttggtggatgcatttgtgaacatgagtatgctcaacaaaaggtagactagcagcttcctgtttaatgaacctgtttatttattaggagtgagttttcaaggtagtcaggacctcaggtcatcaaaagctaaagctattaacggttagtttagtatttgcatgaacaccttgctacatatttatctgctgaggacttgatgagatgaatatatatattaaatgtctacttccctacaagcttgatgttttcccactaggatttcttcttagttttgaagttagcctttagctgatcagtacaactatgacaagcttaaggatgtttgccttgaattttatgaccgcttcagcggtgatagatactgtgttggcaacacaaggttataagaatctcaagaaaaaaaagatacacttctgtcttagttgatgtattggaggaaagaatcaaatgttataacgcatgagcggcacaactctatcttagactgtctctggttagtttagtttttgacctgaatgagtagattgctagtctttgatttctagagagcagacaatcttttcttgtggcatcatcagtgatcagcttgggttcttaaatgcatgatgaggagcctcatcatcagtgatctaccttttgctagagcagctcatcctgaattgaacacatggatgaggagcctcattataagattacctatcagattttactggctacaagagttttaaagcatgctctcttcttagataaactcgtacaagagttctaatggctagtttgatcaataatttttgggtaaatcttactggttttatctgttgatgaactgaacatatgaatcgttttgcttctgtgaaaggtctatgttccaattatataacttttttcttataatattatatgcaacatatttgttcctgtttattcccatgcttaatactgcatatcacagtccagatggtctaaatcggatgtagatttagtgttttacactgttatggtctcatgcacatcaacaaaacagagtcaagaataatataggatgcagttgtttagtggatatggaatactaaataaattggaattatgttggtgctgtcactggggtgattgtattttggtggaaattcattttcaccattccgattggttatgaattatgtgatcaacaacctcagagagttcttagagggagaagatgggtatcgtccaatacagagactaacttaaaaatagcttgtagcgttaggcaaatattctacatcagcaatcacaaagttaccagctgtaatatgaaatacttgagctccatggtcttagttgacaatgttgaagggataaatgatgttaactgagggccctgtttagctcttaggcctgtgcatattgttattatcttaagcctatgtttctattgtatttcagaattgaatttttgaagttttgatatttgaaccctgcaatacactgtttcatgacttaataaggagcacgcctcttgttgtacagttatgtggttttttaagcatcattgtacattcatgcgttgagaacacattttacattaatatcttatgaaaacacaaacatgtatcagtacttcgtttttcttttttggagttactgttaaatgctatcccctctaacaaaacttaaaggttgatacaccctttataactagttagtacttttgcacggaatttgtgagatacttggacttggtactttatctgaacctgttctggtctgtgaaccagcctaattatcatctataccatctaatacatgttgagatagtgagattctgaagtatgaattgatatgcttggtgttgcgatgacaatattctgtagcaatatgaatcagtatgcttggtgttgagatgatgaaattctgtagtagtatgattcaatatccttggtagatttaagagtagaattctactctcccgttttttaatgtttgacaccgttgacttttatagataattaaatttgtccattcgtcttattgaaaaaatatataattattatttatttgttgtgatttgtttaatcattataaacacattgagcaagacttacactattttaatttccacatggatataattcaatcccactgactagctgagtgctgagacccgatgtatcggttgatacccagttcctatgggctcgaggagagaacatgttatgtggaaaatacaaagtgaactggaatgggtctgtagaccaaaagagctaggattgctcgacttgcaactcttctcttgtgccctacatgtcagatgtctttggtacgaatggacatagccgaacaaaccatggctagggttaccagttctgtgtgatgaagacattgcactctttaatgttgcaatagagatcacttcagaaatggtgccaagtatatagacattcaaaccctcagttgtagtaccaactctcttccaagtgttgatggcgggggggagtacatgatagtcaaagatacactcaccggccagcaatagatgggtcgcggagttacaatccctactcttcaccactttgcagcatttccatgaatttgtctatctttggcctttctgcacatggtgcacctccaacaaataccgatgacacgatccgatggaaattcacagatattacatccggcacaactgatgacgaacaggaacaagtgtctaaggtcgctggctccattctaagtacggcccagcaacggcctgttcgtgtaactaggcccaacccgaagtataagggtggaaactgggttaactagctgtatataaaggagagagagagaatcgggagggaggacatgtaaagacagaattcccaactcaatacaaactcaatctctctctacaactctgtctttctctctgcttctcttcctctattcctctcaaactttctctgattctctgaaaatatcttacttctcttccaagttggtaacatttggtatcagagccgcaatcctggagaaacctcagttcaaaactcgtcttcagatccaagtcgacgacatggcgaagcaaaacgagggattcgagaagactctgttggagattcaagcggcaattggaaccatggtcgtcaagcaaggagagacacaagagatgctgctcaaactggacaaatctgtggcgggatggcgacctcaagttgatgctgctgtacaagggttgtagcacgacatgtaggagctgaagctgcatgtcctcaagttggagaagcagagcgaggagggcggcaattcgtcgaacacctcgcaggcgtcaagggtgacggaggaagggggtcaccaagctcctctgcttcctacgcccagcacgccgccgttgttttccggaacagcggcgagcgatcttggtccagatggccaccgcgtcacaaattttcaccgggggaaggcaccgggggtagttcatactctcgggccacctccggtcaagggtacgtaccagattcccactgaattttctgttcctcatggggttgagtttggcgcaaattcgagtcggggaaatcgggatttgcatggggagcaagggttcaatcataggctaccgaagttggatttccctcagtttgatggttcggatccacagggttggaggatgcgttgtgagcattattttggggtttatggaactcatccaaatttgtgggttcgggtagccaccatttacttcatggggagggcaacgtcttggctacgttcatctcgtgctcatgaagtttttgtcgattggagtcgattctgtgaagcggtgaaccaaaaattcgatagaaatcaacatcggcaactgattcgacagcttgatcagattaaacaaaccggttcagtgagcgagttttatgaacggtttgatgatctgatgaatcagttgttgacgtatgatcctatgtataacactttgaatttggttcaccggttcatagaagggttgcgttttgacattcgcaaagctgttttgttacattgtcccgaggatttggagtctgctctggttttggttctattacaggaggagttgtctgagcggaatcaagagcaaaggaaatttgtggatggatcgcagaagtttaaaaatgcatatccattaccattgccaccaaccaaggttttgaaatctgaggagaagaaaggcggagagctcaatcggggtactaatctttctgacaaggttagtgcacttcgatcgtttcgtcgtgcacaaggtttgtgttacttatgtgcagaaaagtggtcgccgacacataaatgttcaggaacagttcagcttcacgctattcaggagctctttgcactatttcctgacaatgcaaatgaggatcaggctggcatatcttctgaagatagtgattcttccttgttagctacgtcagttcatgcagttcagggtactgattctcagtctaccattcggttacaaggaaaaattcaggggttgaatatactgatgcttgtagattctggtggttcggctagctttgtcagtgatcaattggctgaccgtcttactggagttcagttcttagctcatcctctgtctgttaaagtggccaatggagaggtgttgcattgtcagaaagaaatgccttcagatgaatggtttgttagtggtcagaagttcttgaccacatttaaagtggtggccttgggaggttatgatgcaatcttaggcatggattggttaactaagtatagtccaatgcaaattgattggcagcataagtctattcacttgacagttatgggtcatgaggttttgttgcatggggtacagtccaatacttctgattgtgccttgatttctagtcagcacttacagcatctgcacagtatcgactcagtggcaggtttggttcaattatgtgctaccctcagtgactctacagaccagttatcctcaattccagatgctgtccagtctttggtacaggaattctctcatctatttgaggaacccagtggattacctcctgctcgagattatgaccatacaattcctctaattcctggggctgtgccagttaatgtgaggccttaccattatacacctgcccaaaaagatgagatcgaaaaacaggttaaggatatgttacaaaaaggaattattcagccaagtgctagtcctttttcttcacctgttttgttagtcaaaaagaaagatggcacatggaggttttgtgtggattatcgccatcttaatgctatcactgtcaaaaacaagtatcctcttccaataattgatgagttaatggatgaattggctggtgcttgctggttttctaagcttgatttgcgttcggggtaccatcaaattcggatggcagttggtgaggaggctaagacagcttttaaaactcacaatggtcattttgaattcaaggtgcttcccttcggacttacgagtgctccagctaccttccagggtgtgatgaatacagttttagctgatcaattgcgtcaaaatgtcttgatctttgttgatgacatcttggtatacagtcgcactttggaggagcacaagaatcacctgcgtcaggtgtttgagactctgagtaagcatcagttacgagtcaaattgtctaaatgttcttttgcacaaactcaactgtcttatctagggcacatcattagtgctgatggagtttcaacagatccagaaaagattcaggtggttcggcaatggccagttcctgtatctgttaaagatgtgcgtagctttctaggtttggcagggtattattgcaagtttgtccgacattttggcatcattagtaaaccattaactgagttattgcgtaaagggcagccttttatctggacacaacaccatcaagaagcttttgacactttgaaacagagtctgatatcagcaccggtgttggtcatgcccgatttccagaaaatgtttgtggtggagactaatgcttctgaccgaggtattggtgctgtgcttatgcaagatcagcatccggtggcatttttgagtaaggctttaggacctcggactcaagttctttccacttatgaaaaggaaagtctggctattattctcgctgttgatcattggcgcccgtatttacaacatgatgaatttttaattcgcactgatcaccgcagtctggcctttcttgataaccaacgattaaccatctcttggcaacataaagcaatgactaagttgttgggtcttcgttatcgtattgtgtacaagaaaggattggagaatggagccgcagatgatttatctcgtagatcttctgatggtcttccaattttaagtgcattatctgttggtttaccggattggttacaggatgttgttttgggttataagtctgatcccgaagctcttcagcttttgcattcttttaaggaaggcacatctcattctactcattttgagttgcagaatggtattctttatttcaagaaacgtgtttgggtgggcaataataggcagcttcagcagcaagttctggcaaatttgcacactgctgctctagggggccattctggaattcaagtaacctatcagcgagttaagcagctgtttgcttggccaggtttaaggcaaactgtgcaggattttgtgcaaagttgtgcagtctgtcaacaagctaaacctgaacatgtgccttacccagggttactacaaccagttcaaatacctgaacatgcttggcaagtcatatcaatggattttattgaaggattgccccgttcagcctcttataatagtattttggtgattgtggataagttcactaagtttgctcacttcctgcctttatcccatcctttcactgctgtgtctgtggcgcaattattcatggacagaattcattctatacatgcactaccgcaggccatcatttctgatcgtgatcgagtgttcaccagtattttttggaaggaattgtttcggcgttctggcactcaattacgaatgagctcttcttatcatccacaaacggatgggcaaacggagcgcgtgaatcagtgtttggaaatgtttctacgctgttttgttcatgcctgtccatctagatggagccagtggttatctcttgctcaattttggtacaacacttcatttcattctgccttgatgttgactccctttgaagcaatgtttggtcataaacctcgtcattttgggctctcggtggattctgttggggtgcctagtgcattggaatgttggatgcaggatcatcataacatgcaaagcttgattcatcatcatttggttcgagctcaacaacgaatgaagagtcaggctgattctaagcatactgatcgcgtgtttgcggtgggtgattgggtttttatgaagcttcaaccttatgtgcagcaatctgtcatgactcgtgctaattagaagttggctttcaagttctacaggccctttcagattcttcagcgcgtgggttctgttgcctataagttacaattacctgccaccagtttgattcatccagtggtgcatgtgtctcaattaaagaaagcagtagctgcctctgaagttgttcaatcaacattaccacgtttggatcctgattctgggcatctggctactctagtagaggttcttcaacagcggctacgtcgtcgtggtgataaaatgattgttcaagctttagttcgctggtatggtacttcgtcatccaccacttcttgggaagatcaggaggagttaaggcatcgctttccttctaccacagcttggggtcaaactgtgtttcaaggaagggggaatgttacatccggcacaactgatgacgaacaggaacaagtgtctaaggtcgctggctccgttctgagtacggcccagcaacggcctgttcatgtaactaggcccaacccgaagtataagggtggaaactgggttaactagctgtatataaaggagagagagagaatcgggagggaggacatgtaaagacagaattcccaactcaatacaaactcaatctctctctctacaactctgtctttctctctgcttctcttcctctattcctctcaaactttctctgattctctgaaaatatcttacttctcttccaagttggtaacaacagagcacgccaatatactgcaaaatcaacatatcggctccaattcgaaggtgcagttgcaacatatttcaaaaatcccatccgggatacatagaccccgccaaaatattaagttcttttcatggctaataatcgaaaatagagtttggacagtacacatgctgcaaatcaattgaccaaaccaactacattgttgctttgccgagcagcacaagaaacaacgatccaattacgtccgcattgatgcctttccaagagaatctaggaaaatgttggcatatggttgcaactacacatcaaaccatcaaagtggacaaactacgcaaccatgcaagagtggtggacaacaagaagctatgcgcaaaacacgccaaaaagccacacaaaatgatccaagctatttgcacatgatcaatcgagtattaaatacaataaacttgaaaatgaatatacttgatttttttaaaaaaatatatagaaaacttttgcacgaattaagcgtattgtttagcggttcgagaaaagtgctcatgaagaacaaggaaatagcttatctgactagctaattagaactcaggctcacactactacaaaatggaagaattgtaggaggtcagaatcagttttcacatacgaataaatggaccgcttgcaaccataggctattaaaaatcgaaaatgtttgcaggtagtttttatcctacctgaaaaagcctattttcacatatgggggcactaccattcccaaaatatttctgtcatacctcgtaaaaagacctgccattcccaaagataaaatcaattgagccttcaatgaagcactcactaaaatagcgccagctggaaattcttattattttcgcttgtccgtcttgatcaatgggctttggagccagggagacattttaagtgtaccaaaaaaatgcattagtagaggctaattgaactctcttgctatatcaatatatatatggcattttcttgcctacatttcaaaagataaagaaaaactaatgttcttagctataatcatgttgtgtgaacatcaatagaagcgttctaaaatgtaccattcttagcactgttttatcaaacaatggttgtcaacttgaacccctggccttgaaacgtaatgtttggctttgacatatgcattgttaccttttcactataagataaaggtgtacaccaatatttgcttcaacaatgtttgaatatttatcaaaattagaagtctaaatgcaaatgtttataagtatattcctcttattgtgatgttgtttggaataatttcaatttctacatgcacaatactgaaattgtagtagttatgggaatcaacatagaaaacggaggggaggatacaatgtataaggaggtgggggccaaggcccccagtcaatttcgactccacacttatacccatatatttatgtcacttggcccccccaatccacatgaccaacaacctctacctctgttctgtttttttggaatacactcatgtgccaatctagtagtttatttctccccttcaattggaagcatcatttctagttgtttgtaccgaaattaaaatggttactttatgtctctaaattgttatatcaattatgaaggtatattgtaagggcattttttttctaatatagctgtccacactcaaattgttgtatctgtgtccacccatagaccatatgcaattgtgtaggcggctagaaattggcacaaaccgttcttgactgaaacaatgttgaggtgaatggaagaagctgtgagatctatatcatttcacgcaactccaagcacatgaagatgctacatggcttgtgatactgagaccaaggcaggtacaataaagctgtgaagctaaaatagtaagggaaataacattatgtgccatttacacgacaaatcaatatatcaaattagaaaatgacatgtgtaattgcgtcacattattgtgtgtggtatctgctatcgcaaaaaaaagcctggtgcataattataatctcccttcactacttcagcatgctgcttcattctccctctgttttttaatatatgatgttgttgacttttgagatatatttgacaattcatcttattaaaaaaatataattatcttttattttattatgacttgatttattgtcaaatattctttaagcatgacttgaatttttttcatttgcacaaaaaatttgaataagacgaatagtcaaatgcttgtcaaaaagttaacatcatcatatattaaaagatagaggtagtagcttttagttattatactctctgctctaacaggttcatccagtcgtgtcagcatgtcttcagtcagtttaggagtgatgtttgtgccaatttccagccaccaattgacgcgattaaacatgccatatttttaatttggtatattgatatgtcctgcaaatggtgcataatgttatttccctctactttcagggtttattcggattagaggaacttcataggatttttggaggaatactgcgtataggaatttttttcctttcctgtagttcggatcatgaaaactggttgtaggaaatccaaaggaaagtttcctttgatgctgatttcacaggaaaagtacatgaaaaatccatccacctcgagctctttttttcttcccgcatgcaaatcctaggcaatcaatttcctgtgatctaaatgctctcaacttttgtattcctttgtttttcatttatctgttttacacttagattccttttatattcatatacttttcctatcctattttttccttcctataatccgaacattcctataatccgaacaagccctcaacgtattgtgtcacaaacactaccatcgagttgagtattggtttcatttttctaaatcaacggtgggttgagacttcacatgcatcctacagtattgcatcctagtatttttgtagacttaacaaataagaatgcattaagatgttcactggacatggccataaaaggtagcatcttcacgattgcctcttcctgtaaattgcttgagaacgcatattagcagcccatgatcttatcggtactactatgaaaagacaatggtagtagtggtgatcagtctgccatcaccatcatcactgacatttaggcaataatatcggtaaaacacatgtaaatacgatgcttgctctttgtactgatgtgctctataacagttggggagcttaaaattctgagaagcagctgctgagaagctagctggtgagaatctggagaaactggaaaacccagcttctggcttctagtatattttccagattcccagaatctgggtaagaagctggactatttgggggagcttctggcaactggagattctaggagaagctgcagctgctagaaactcctccaaacaggctctaatactgtctccttcagtgcggaaaggaaaaggcatttggatttgggtgagtctgtagttaggctgcagctttttaattttctgagcataaacatttctttttgttttttaagatgaaaaatcttggttcgagaccaattacttttgctattttcagtagtccgttgcaatacatgagcatttactagtgaagggaaaacataaagagtacttatcttcacatggcccaaatgaataccttgcaacacagaaaaatagagagagatccaaaacacatgagaggggagatgctagaactggaaatcaaacacacggtggtagatcaaacgatgtgcaaggggaaagaagacgaagcaaatcaagaacaatggtctcaagtgttgtttcaatttcttcgcttttcagccatcattgtgtttcacctctcccaatttcacaacatattgggtctaattctagtcctggaagcaggaaatgatttgtattaaaaaaattgcagttaagttttttaaatacaagtgtctctgaactttaatatataagtatgtaagatgcaatttgagtaaaaatcatataaaagctagtgcttcatataaagtttcccagttttaaattttctccatatattcattttctcggctttatcaaaacatacatgtgaaaacttcttgcaaacgaaaagatatgatacgagaaagtcaacaagagagagtaacgaaagcaataagcaatggcagcttagcagtggaactggactaaatcaagagcagtctcttcaaagagccggggacactcgttgctgttctcactataaaactcttaagagtgtaaataatctgttccctgacattattgatgtacttcagtatattgagaaagatggtccaaatgatgggaaaaaatgtcaagcacgtggtcttttggattatgtcaaggattttgacttcgtgtttcatttgcacttgatgttgcttatcttgggacatgcaaatgctctggcactgtctttacaaaggaaagacaaggatattttggaggccatgttagaggtgaaattaaccaaataaagatttcaacaagttcgggatgatggttgggaatctcttttggagagatcatactcattttgtgaagagcacggtctccctaaattggacatggaagaagagtatgtagatcggcataaaccaaggagaaaaactaatcgcactaattatcaacattatagatatgattgcttgaatcctattattgacttgcagctcacagagttcaatgatcgtttcaatgagataaattctagcttgcttactcatatggctgcattcagtccaaaggattccttcgattcctttaagcatgaccatctaatagagctagcaaagtcctatccggatgattttgatgcaaggcaattgaaggatcttgatcatgagcttcagatttacattgacaatgttcgagaagatgaaagatttgggaaattaggcactatttcacaactggctaagttgatggtcgatacaaaaaaacatcttgcttttcctttggtctatcggagcctcaagctagtgttagttcttcctattgctacggcatcagtggagagatgtttttcagcaatgaagattgtgaagacagcactacggaatcgtattagtgatgaatttatgaatgatgctatcttatggttcgtggagaaagctttactagctacaattccaaatgacgacgtgatagctctctttcaaaacatgggaattactcgtagggtggaggtggaagtataataggtaactattgttgacattttatatttcgttggcatatattgttaattaacttgtttactgtattttttttcaatctattattaatccattacaatctactagcatatagccctgtacaatcatgaatcgtcaatcagttagtgttaaatttttgaacaactagttagtgttaaaaattgagagtgacactggtgactatttttcctggatccgccactgatgaaaaggaaccatataacaaaaattaaaatctgaacaatcaggaaatcagatttaactaatgacaaatttagctgcaaaatttgtagaatttttggggtatattcattgtcctatcaaaatcaaaaggaaacaaactgttaggcatctaaaaaaagtacagatatttcatcatacaaaaatgcaatggttgggctcccctaagttctaaaaatgcattccagaagaaattgcaatacccttcagtgaaaattgcactataatttgcactgcaaatatatcaaatttaatatgcaattttgaattgattattaccttccatgagtcctgaaatcaagcacagttttattatttcatcaatgactctcttttttcttctccatggttctcttcttcttcccttcaaacagctgtaggagctccatggaaatcaatctacatatatcaaaaataaagaaataactgaacaattagatttaaaacaagataagtgagaactgttggtacattaaaaaaaataaaaatgttgcatactgccatgtagtgaaaattacattatgagagttgcactgccactatgagagatttgcatgatgggggtaattggaggctggtgtttagaagaaatctttatgagcggagagaagagcttgctgaactaaagagtatgattaacttgtgtcagtttgatgaggggaaggagagggacaaagttatattatttggcctataataggaagaaaaccttgttcactaaatgcatacaatgtatagaatatacagaaatggtggaggtgtggaagagcaaaatcattttctcttgtggtggagaatatacaaaaaccttgttcacaagcattttctcttgtggtggagaagctgccatgtgctttagaacaaagtgatggggtggggggggggggtgtactatcctttgactctaagtggccgatactatataggaatgtttcctcatagaggagggaaaacttttgtaataagattgaaactactaatcacatcttgtttgaataccctttagcaatccctccgaaaaaatcttgtcgatttcagggagtgtttagggctgctgaatgagaagaataagtccagagtgtgggtgcgtggctagtggctagtgtctgctgggttttgtggcctgttagaacttacaaatgattgggtttttaaaaatgctcttataaattctcctttgtatgtcatttataattccatatccttcttataaaaatatagcatcttgctaaaataagaagatcaagttattctagaatggtggcacaaagcgattttggagcagcttttttttaaaaaaatgaagaacactagacattgggatgattctggagcagctataacaagtgaagccgtggaatctgtctgtagtttcctctacggtgatacggagtatgttattgtctggtgtttgtgcttttttgatgattgttgccgcctgcagcatggtgttacgagctgtgcttgttggtgttgggttttctcacaaagtcagaccaatataataatataatctatttcaagaagacgaatgaaaaatctcaattattttttatcaattttataaaatcccacctattaggatcaaattgtataaaatcacagtgattgacatgacatattaataaattatgtttctaatgtttcgtaaaaccacgttgttaataaatctgatatactcatatatcaaagtttttaaaaaaaacttcagttacatggatatatcatttgtatgattaataaaaaacaataaattggagatataattatagaaaaaaatatgatagatcatatcaaaatgatcaatagtggttttgtgaaactttataactatataataattagggttattttttatataccaaaatccctatagttttgtgcaacttacaccatataatacctagggttaggttaaatttactctctctttttttggaaaaaaaaatcagttatagcgccagccggcaattccactcctgatcggagcagagctaaccgaaaaatcccaacaaaaaaaaaatccgcaaaaaactccgttccgttccgtctaaaattcaccgcggatattaccaccttccgtttgggctcggcccaatctgctattgggctccctcgtcctcgtcttcccctccatccgccaccgccgccgccgccgccgccggcgatcttctcaaggttcgatcccctccaccctctcccctcccctccgccgctccggcttgccgtactaacccgcccttccttccttcgcagtgccgccgccggtggttcgattctttctttctttctttctttcttttttccccaatccgttcgtccgccctccacctccgacgcggcggcggcggcatgaagcggcaccagatggagtcggtgccgaggacggtctcgacggtggtgcccaacacggcggaggccacccacgtgttcgacatcgtggggtacagccagatgaaggggaggggccgcgaggagcacgtcacgtcggggaccttcgtcgtcggcggcctccactgggccatcctcctcttcccggacacccacgtcatcctcctcgacgacgaggaagacaacgtcaccgccttcctcgagctccagagccaggggggaagcaaggtgcgggcgtgctgcgacgtcaggctggtcgaccagaccaccggcctcgcctcctctgctgcgccggcgcagccggatgccaagacattcaaggtgttcaatgccgatgaatccaacagggtcagctgtctcaagatgaagaggaccgaattcgaggcgccgccgtatctcgtcgacgatcggattaccctggagtgtgtggtcactgtcaagaaggagccgagggtgtcgagagctagaccagtcccgaggatcaaggtgccgccgagcaacatgatgcagcaactcggcgatctgctggagtccaaggagggggcagatgtggtgttcgatgtcgcgggggagaccttcccggcgcacaagcttgtgctggcgatgcggtctcctgtcttcaaagcggagctatgcgggccgatgagggagagcgggacagagcctatcagcattgtggatatgcaaccggttgtgttcaaggccctgctccagttcatctatactgattggttgccgtcaattcgtgatcttgagggagacgataacagcgagatgatccggcacttgcttgtcgccgcggacagatatgctgtggacaggctgaagctgttgtgtcaaagcatcctttgcaagaatcttcgtgttggtaacgttgcaactacactggctctggctgatcaacatcattgtggcatgcttaaggatgcttgcattgaatttatgtcatgtccaaacatgttggatgatgtagtggcatcccaagggtttgtggatcttgaaaacacagctccttctctcgtcgcttaggcaaaggaaaaaatgggcaggttcaagaaaatgtcgaggatgacaaagagcaatgcaccggaagatgaacctaacagtaattcgtttagtttataagtaatatggatatctgtctacttttactggatcaggtccttgtggttactttactctctatataaatagaaataacttaaacactggtattgcttgcacctattgtgtttagaattaacttttgggtaaattcacatacctaacttgcacattagactaggttttgcaaatcagtaccgagcttgttttccagttgcaaaatttgtaacaaaacttgctccaagcgataaacttttttcaagatccaaaccaaagtggaacaaaggtagaaaaaatcaattcattgtgaaatttgctattatttttccaggaatactatttgactggagtaaattttctaggatgtctgtatgttatgcctaagaccacccttgcagtaggataccgtctgctttgggttctttattatattatctccttcgagggttttttaggatcattcaggctatatttagtctattttggcttttacttccttttctcagggaagtggttaaagacctcagaagcagatttctgctgctcattatatgtccttgttttctaagagccatgcatattgagaaatgaaggtgaaaattggaggactgagtaagtgagtatttctatttgatcagctagtgcagccccaacagtagattttttttatatatatgccaattttatgattccagcctaagaagctattgtgaaacattgaacgtgctgtgtttgtggcaacttttttcttctccaaattttgttttattaatctgagtattctactactgtatttgagttaatctattaaatgcatcaaagtgaaactggggcaagttgatgctgcctttattcgttcagcacaaatcagctattatcacctttggtcctttggtaagaattctttcaatgtttctcctggaactgtgcttaattttggggtgatgcaagtctgtaacaccattgcccttggcaaggatgaagataccaacatgtctgagcattttttttttacttaatacccattttggacaagataccaaactcttgttagttctgaaccaaattcttatattgattttctatagcaaattacctatttaaaccaattaaatcaaggttttacttaatccaaagatgctctaacaactctacttctagtactccctctgctaatgtaatcatgtttaccttatgtcacagcctactttcaggtgatcttcacttcttcagcatatcatgaacaacataataacctgaaaaagattgaaacggcatcattaatgataggaagaaataaaattagtcatatctgacgaaacatatagtatcaattcccgtgtaagaacaatatgtgcacagtagattaccatgtagcactaaataagaagattagggaaaattacgacaggaaaatcctaagcaaaacagaagactattccaataaaaaggaaaaacagaatctggcatatactgttcatttatttgtattttctcaaaaatatccgggatacaattttttttggcagaagtatgcgtcacaactattgcgcaaaaattacatggacatgaaggtggtgtttgaatccagggacttaactttagtctctgtttttagacactaatttaatttagagtattaaatatagactacttataaaactaattacataaatgaaagctaatttgcgagacaatttttttaagcctaattaatctataattagagaatatttactgtagcatcacataggctaatcatggattaattaggctcaatagattcgtctcgcgaattagtccaaaattatggatgggttttattaatagtctgtgtttaatatttataattaatatccaaacatccgatatgatagggatttaaaagtttagtcccatctaaacacaggtcgaagtctcgcataaggaaacagcgatacagaacagtgtcgcataaagaaaaagcgatagaatgtcttgtccaacggtgccgcttaattagtgattaattatcctaattaaattaattaataataattagttattaattagttgctaatcaatgtgattaaacattaaccattgcccctgttggtgagttgggcagccatgccgtgcggtctcgcaaatgggctgtgcgagaccgtacgctcccacccaagctgcgcgtcgtcactaaagtttacaaaccgtgcggttatcacgtgcgataattttcttaatttttgaaactatgatatatctcacggtaatcatacggttttcacgataattatgtggtaaccgccaaaccatggggtgacggtatccactcaaaaacggtttagagaaccctagtcatcagtcgtcaccccatcattctcacgcaatgggtcagcaataccatattgctttcgtcagcgacgaaggtatagttgtgctaaaaattttcatcccgaatatttctgagaaaaaaaataaacaatatatttttaaatttaattcgcctttataaccgtaaggcctttttccttttctgaatggggttaagttcatgggccgcctaattgggtcggcattaggccatccaaactaggcccaaaaaagggcaaaaggcatcgtgttggtccgtctccgagttgtttccctatttgggccttctctcgtctccgtcgccgccgccttctccaaatccccttcgcattcgatcccctcccctcgccgccgtctcctccacctccgccgctcgccgcccgatcccctcccatcccctccgccccgccgccccgcacctagatatgccgtcgtcgtcgtcggcggcggcggcggcgtgcgggcccccggagttcacgccggggtggaagacggtgtcgacgtgcgccccggacgtcgtcggcgagggcgtccacgtgttcgacatcttcgggtacagcgaccacaaggggatgggcgcccacgagcccatcaggtcgggggccttctccgtcgccggcctcgactgggtcgcctgcctctacgccgacggctacggcgtcgccggcatcgacgacgtctccgcctacctcaggctcctcggcgacgcgcccaccccgcgcgtgtgggtctcctgcgaggtcaagctcgtcgaccagcgcaccggggtggcctccacgccgcagcccttcctcaggtacgccctggcgttcggcgacaagtgcaaggccctccactgtatgatgatccccaggggccagatcgaggtggagccctacctcgtggatgatcgcctcaccatggagttccatgtcgtcgtcaggagagacccccgggtgtcgaggaccgcccggttcccgcgcatcttggtgccgccgcccgacatcaagcggcagtttgccaacctgctgcagagcaaggagggcgcagatgtcaccttcgatgtcgcgggggagccgttctccgtgcacaagctcgtgctcgcgatgcggtcgccagtgttcaaggcggagctctgcgggctgctgagggagccgggaacacagcctattaccatcgttgatatgcagcccgccgtcttcagggccctgctgcaattcatctataccgatcagttccccgtgacgcgcggtttcgagagacgcgacaattgtgaaatgatccggcacctgctcgttgctgcggacagatacgccgtggataggctaaagctgctatgccaaggtatcctttgcaagaatcttaatgttcacaatgtcgcgactacgctggcactggctgatcagcatcaatgcgacaagctgaaggatgcttgcatcgaatttatgtcatgttcaaagaagatgaagggtgtagtggcgagcaaagggtatgaggatctccaaagaatggcaccttctgtcttggcggatgccgtggcgcagatgtcgaagctcaacaaaatgtcaaggggtagtgttccacaagatgagtctaagagctgttagcttaatttataagggatatgggtattctttcttctcttcctaaatcaggtaccgtagtcagtttactctttacattttgggagcacctttgtggtgcttatctgtttatatgatagataggtttattttatctctttgcaagctttgtttccattaactgacatataacctgttgtccttccgcaaaatttattttgtgcgcccttgatcaaaatttggatactgaagataatcctacattaacataactctgatggcctgctccgttgcaatggaacagcatcaacataacaaaatcgcggtgttgagggagcatagtggcatcaatagcaataacattgacttagtttagtattgtcggtgactattgtggttccttgaaaattaacttgccaggaattgtatttggcaagagtttgtatgttttgactacaacctcatatttatttttcctaatccatgttttagaaacctaaatgaacttccagtaggaccaggggcggatccaggaacaaaaaattggaggggactcaattacacagtttcttcaatctccagccatttagggacctttaatttatcatttatggtgaaaaaattgaaggaggtgctccgggggtatccatgggtcttatgggtgtatgggggactcgagtccccctgcacccacgttggatccgcccctgagtaggactgagtgcttctctttgatcaaccagagcagcatgtttttatttttctcatgtccctgaatcaggggccctgaccatagccaatttgcgatttgagccaatttgtcatggaaccaaaaagagggcatcaagatgcaatagtatatcagcgtgacgttgtgctcagtttgtactgataatagtaggaagcactatatttctggaggcaggacgttgtgctcagtttgtactgataattatagtactatgtcaaattaattttttataacaaaatagtatatcaagatgcaatagtatatcaagatgcaatagtaggaagcactatatttctggaggcaggacgttgtgctcagtttgtactgataattatagtactatgtcaaattaatttttttttgttgtaatatatgattagaatggaggaagtgtttgtcaggtggttctgtgattgacagtatacctctctgcttctgtccctattttcagaatgattgttctgggccttctcttaacagaaggttaaaggcaacccagattatttatcccctattctgaaatttattctaaattactggtatgcagcgcttttcatggtcatgtattgtgcttcactttgttataaacagtttgtccaaaattcaggatgctgtcgcattgttactgaagtgcaagcaatatttatgtatgtctaaatttgtagctaggagttggattattttgggatggagggagtattccatagatagttgtttgcttgtcttttacttcctctattttacaatgtaagtcattctaccatttctcacattcattttgatgttaatgaatctagatagatatatatatctagatttattaatatcaatatgaatgtgggaaatactataaagaattacattgtgaaacggagggagtatgagatttgataggccgaagtacgaaggtagactgcatttttatctagaatccgacacatatatatggtagtcctcgatagttagaaggctgaagaattcgaattcctattcgtagacctcgatagttagaaggctgaagaattcctagtggtagtcctaactaagctgaagaattttctgaagcaaatgcgtcgataaaatcaaccatgtagattggaggcgcctccaaatcgggtgccagatcctctaaaaaaaaatcggtgcccgatcctctcaaaaaaaaattgatcggtcaaatattgtagttgaccatcaatgaatcaaacattaaattatacatagtgaaaaaaaaatcagccacttacattttttttgaaacacttgtaaagacacgttgaaacaaattactgtcacgtatgaaacattgcattgagtattaatggactgaaacatatatttttttccactagaacataattatgtaataccttattgtgaagatttaattacaacgaacaacgttagatttaattataacgaatacaataatgttattggaacatagattagagaggagagacaataggggcaaaaagaaagtcggtcaaatgttgcagttgacacctagtgaaacattaggttatacatagtgaaacgataaaatcagtcactgcaacatttaattgttttttttataaaatcagtcactgcaacatttaattgtttttttttgaaacacagtgaagacacgttgaaacatgttcctatcacgtatgaaacattgagtattaacagaatgaaatatatgttttttttttcatcagaacataaacatgcgatatcttgttgtgaagatttaattataacgaatacaatggttttatcggatggtagattagataagtactttaagacaaaaatcattttgaatgttgctaaatccatgcatgcatgcatggatagataggagagagagagttggggcaagtagttaaataaattttgtgaaatacactcaatgtacattttaaaacatgtccctatcacatagggaacattaagttctaacggtctgaaaaatatatttttcttttatcaagatataatcatgtgatatcttattgtaaaaatttaattgtaacaaattcaatggtacgatcaaatcgtaaatcggataagtagtttaggagaaaaaaatattaaaagtgatgagagaaaagaaaaataaactagttagtcttgcatgcatgcagtatcatggagccccattttttctcttcaaatcgggcctctcgctgtagatttcttgaaaaataaatcttattgccagtgccaactgccaaggataaggtataccttctatagatggggtcatggaatacattaatactatatactacaatataatgtattagagttctagtcgcggaagataagatcctttaattaagtaaatatgtagataaaaaaggttaattaaggaaatatggtagataaagaagtaaattatcttttcggaataagaaggtattagaatcctagttgggaaagataaggtattctatatctcctagttttacttggaaaggaaaatgatcttcggtataaatacaagactcctgaggagaaaggacatgccaagccagattcaagccaatatagatctagacaaaccaaatgtgggagccaaagatgccgacgtaagggatctagagctatctccaatctcgccgaattcatattcgaggacaaagactgcactagccgttggctatttgtgagagctccatgccaccatgctactagattagattatctaaaatattgtacttgtgtgatactgatatataaaggcaaaacaccggtttcggccaacaggagttgggttattacatgtcatttaaggggcctgaatctatataaacatctttgtcttctatctcttttactacaatctcgcgtatatcctggttccaacgatccccaaactctacaaatattgtatgggtatagtccgtcaaaagtggtgcgctaggtagggggacttggtgcttcaaggtttcgatgcgatgggtttcaatagacggattctttcgataacaaactcctcgatgacttcgactttgggagatatgacctgatcgaaatgcgttctcctataaagcaggacccttattatctctatctttctcaagagatcgtcattgtgggtttttcgatgagggacacttcaacaactttggctctgctatatatgacccaactagagtatgtcaccgccaacaaccagatctatcaagatcaaccaagtttcaagacgtcgcaaccgtggagaacaatagttcaatgttgtcgacaacgaggccccagctcggatcaactacttccatcctaacattgcatccaaaatttgattggatcagaccggcccaaaggcacgaccagcccatcgacaatagcagcagcaggctgagcactatggtcgacgacatcagcggctgccaaagcggtggcctccgtgccaatgctagtagaggcgtagctaacgggggatggccccaagaatacggagatccgaggcggattcatggatctcctatctctccacccctctaccctctcggttctcactctcacaagtagagcggtggaggaggaggtgaggaggatgaggagaggagagaaaagccgagccgacaaccaagtaggtcgtgccgtgctgggcatggcccaacggccaggctaggccaacatgagcccaacaacagtcgggccgtgccgttcttggactaggtcaaattctagtgccatgtgccgggccatcgggctgcgggccttttggcaaactatacctgtagcaaaatttaccaaaagaaaatgtagcagaattttccaagccggacaatagcttaaaaaaatattgtaaatgatgatcagtcgattcagtaaatatacgaacaatcgtttcagtaaagtaataataatagtaaattgcatcgccggtatacaaacttgtcaggtgggtataatttagtgcacgaacttgtgaaatgctcgttttggtgcatgaacttgtcttgtgcatgcggaggaaggcgaaaaggacactacattactaatcttattgatttagggcatatctcttagaagtttgctattagacatacacttcttcaataaagaatagaatatgatatagtgatagtagaaaaagaataaaaagacaagcaatggtacaaaggttagaaatatatgaaattcatcatttccatggtgaagaataaaatggagaccaaatttataaatattgaatatcctatagatactcactacacgtatgcaagtcacattctaatcaacatcacttcataaaattaacattgtcaagttattttggtcctcgttcgcaccaactaggcaagttcgtgtactgaaatgaacattttacaagtttatatactaaggccctgtttgattcagcttaggattattataatctggattattagaaataagctaaaacaaacggatagcttattatgatagattattacaatctataaaccagattactataatctcaactctaaaggtgctttttagattattgggtggctaacaactaacaagccgcttataatctaggaaaacaaacagctcacagcttattttatgccaacttatcataattcaaattatagtaatctagttcaataatctagattaatcttaagctcgaacaaaaatggcgagaatgcttctcattgggtgtccgggccgacgcaaaaaatcggatggtagtaaccctcttcacccgagacaacagaagtcctcacgtgcacgcagggagttagtacacatcagcacacgtcaagtgcatgcgtccatgcatattcaaatattcaaaatttaaatacatgtttctctacaattatttatccacctacgatttaattataccattagattcattataattacatctttatataaagatcttgcatggttatatcagacagcggcgagcggcggcggacgggcagacagcgcacaggggcggcggcacgcgggggtggacgggcggtagcatgcgggcacgcgcggtgcgaggcgaggcggcggcccgtggctcatggagagcagctcgttcgccgtcggcatgaacgcccggcatgtctccggttacatggcgtagctcgtggaagatggtgacgacgatgaggtcgttggccatgaccaccagggtggtcggtgcagacggcgatgctcggagtggcacgcacgacagcaggcaggcctctagctgccgcctccgccaccagcccgtcccccctatcccgagcctcgcctccagcctcctccgccaccagccgccgcccccatcccgagcgccatcccaacggcgaagaagaagaccggaccgcggcgtcgaacgcctacctgccgccgtccgcgccgccgtgccgtgcgtgctgccctgcctaccgtcgcccaccgccactcccatccagacgacgaagaagaagaccggaccttcccctctgcgtcttgcgccgccgttgctccctcccggcggaggagttcgctgtcgctgcctttgtgtcccgcgcggacgccgcctctatatcccgcgccgtcgctactccctcctggactgcggcacagaacacctgcctcgccgaccacccacacccactacccgtccccacactgccgtgcgcgctacgagagaggaacaacaagagagaggaagagcgagagatagaagggagaggggaagaggggtatgacatgtgggtcccacattttttaataaataaaatgctgattggattgccataagtacgctacgttggacaaaaccgctttggattgggtcgagaggggtaatttgtctggtattaaaagttcagggtgaacgatgattggttttcgggtttagggggtaattcggtcgaccgcgctagtttagggggtaattcgtactttttcctaatttttttagtgttgcacatagtgttatttagatgtttcacaaaatatttgctaatgttgcacgtggtattttttcggatgtttcaaaaaatatatttttatgtttcaataattacaactcaatgtttcatgcatgatataaaaacatttcaacaaaatcaaatatatgaaaatatattgtatgtttcatataatttttttatgtttcattcgttaggacttaatgtgtcatgtaacagttgttattgttgtaatcaatattttttatatgttgcatctctatgaaatatatttcattaagtaagttgaaacatttgcacaaatagtgaaacatttttttttcagtaaatagtgcaacaatgattgatttttaggaaaaacatatatatttttcatcaaaatacggggccacctacgaatcaggcgcccgattttttttttcaaaaatcggggttccaccaagtagatcagaattgtttcactaagtagatcgaaaatgtttcaattgtttaaaaagctgaaacacaaccaaatcacctcattaaacattttgctacagcgtatgaaacaaagggtttcctaaaaaatcgggcgatgttttaccttatataaaaacaatgtttcagcaaatagcaaaagaatgtttcaattcactgcaacatttgatccatatgtagtgaaacattataagtacactaggtgaaacatttttggtggaacaaaaaaaaatgaaacggcttcccttaatagagagtttctgtaatattgggtgatttgttgcaaaagaatataggtagagttagcggtgtttacaccggtgtcatgtgtacgggggtacgtgtattgagaaaaaaggccgagaaggcctgttttcgaagctagaacataggttcagtgaggtttaggtactttgacacctaaaccgatttgaaatgcgtaatatcgcatttctataagcatagtattgtccctcgttgtgcatgcgcacgtgcacacatgtgtgatgtgcgcatgcgtatgcgcacgttctattggtacacgcgggaagccttctccctctcagattcaagagtcaagaccctaaacaagaagcagcttgttctttcgcgctactgcgctcaattcgttgcttgttcctttcctttggatttattatcataggtagtgttcgagatcgcctctgtgcggtgaacgctcgaattaattcactgcaacttttgatctatacatagtaaaacatcataagtatactagctgaaatatttcttgtggaacaaaaaaatggaacagatccccctaatagggcgtttccgtaatatgtgggtgatttgttgcaacggtggggcgggtggtggggatacgtggtggaggcgtgggaggcgtggaagggtaggggccgatcttttctccccccgtcgggcacctatggggaggatttccgtcaaaatacaaatgtgtgtgagatcttgttttaaagatttaattgcaacgaatgtaatgatgtagtcaaatcatagatcaaataattaatttataagaaaacatatttaatttcgaaaaacaagttgctagttgcactactatatgtattgtgatgagtgagagagcactgagatactacatgccaatgccatgcagtagcagtgccagcgtatagcacacgttacactaggagcatgaaccttgcgtgtgctagttgttgatttgctattagttattggatggatatcgtaaggctaacatggcctaaattgcatccacctaatatgtttgtataccaccaatataataatttactcgtaataataatatcccaatggagcagtcgagcgcggagcctagtattgacgtggaaatttccaggccgtccgatgggaagctaacgcacgggataaaccctacactgatgagagaataacgaaccatccgcctcccacgatctcgtctcctcccccaaaaacgccgcccctctcccctctcatcctcctcgacctcttcggtgattccgcctccgcgaggtgctctgcttgatcgagccgcctccacctctgccgccgtcgatcctcgacgccggtctccagcttgcaggtacgaacgtcctcttcgcctcgggtctagttacttttacatctggatgtataggatagttctcccttgcgaattatggattttatttttgttgttcttttatacatgcgcgacatatctaatgtacagattcagatccatggatatctagtttgtgttcaattcaattgatgtgtagttggtaatctttttttttaatctatactcttgtgtgtaattaaaataggggaaattcggtctatgacatcgcatcaacctgaaattaagagagaaattaggtcagccaacattggatgggctcttgtatgaattgattgaccgtgccgatcaagaatttctttgttttcctttttgttgttgttgttattcataagatttaagttttttgtttggctagagaggaataggaggattttccaaaacgtgtcttgctccgttagcgaagtagcctatttgataaagcaggacttagatttgcgaaagacggcctttaaacctccctgaggttctttagtttcgtctgaacttctatcccttcaatgggattgtaaatacttttggttttttcctcctttcaattaaattccggcagttcttctgccgtcgtttctgctcaaaaaaaaagatttaagtttttttttaatccgagtgggcattcaagacaatactcgcaatcgatatatgcatgtgttgttcatatactcctccatttctaaatatttgacgccgttgactttttttaaatatgtttaaccgttcatcttattcaaaaaatttaagtaattattaattcttttcctatcatttgattcattattaaatatactacttatatgcatacatatagttttacatatatcacaaaagtttttgaataagacgaacggttaaacatgtgctaaaaagtcaacgatgtcaaatatttagaaacggagagagtatattctttagaaggtagtaataacttaggcagactttttcctgcaagaattaattctttgcattgtactgtttgctttgtattgtaccatacctgtatgagagaataaacataacacatgcaccatggatagtaacctaattttaacccctatttctctccagactaaataaaataaaataaaattctaacaaatgctgcttgtacccaggaaattaagggtgtgcaatggaccgtctccctgacgatgtgttcataaaagtgctccgctgcctccctgcaaggatgtgtccaaggaatggtgcactatcatcgacaccaatcggctgctgctcccacatgttctgccacacactcagtgcacggcatcttttccaactaccttgaccatgacatgacgcacttcttctcccgccctagctactccgcgggctgtgggattgatgggtgtttcaagtttttacccattgacgctataggatttaacaaggtactggaccactgcaatggcctcatcctgtaccacggcaaaatctcagaacaatataagctatttgtctgcaaccccgcgacgcatcgatgggtccagcttccaccgttcacagaatatgatagtctatgcattagtgctgagtacctcgtcttcgaccctgcagagtctctgcactatgaggtgttcctgatccctgatttgcctgaaattcctaccaagaagaagtgccacaaaggtccactcgtgggtaaggacgctacagcggaatggccaccgtctgtgcacacattgtgggtattctcgtcgaggactgggaggtgggaggataaggcttttctccatgaaggccacgcca

SEQ ID NO: 6354 - DNA, 2511 bp, Oryza sativa
tcctgcagcccgaaaaaaaactttagtcccggttggtaacaccaaccgggactaaagatggtagtgctacaatttttagtcccgggttatttcaagcgggactaatgatgggcatctttagtcccgggttgtaacctgtgattaaaggggttgtaaaccaggactaaagatgagttccccagcagacacatgaagaaacaaaattaacaaattttattatttttatttttttacttgtagattagatagaaacttgcatgtttgtgtatagacttatatcatcataattgatgttactaaatttttttaattttttctataataactatttaagtcacatgtaaatgttgggtgtcatgacacctactaggtgtagagaacctagtcgctttcttgtacctttccttttttgctttgaactacactttaagactttgttcttccacggggtaatgaagattggagaaggggaccagttcgaaactgcactgaaagttcaaattcacctatctttgttacgctggttgcttgacaaaacgagagcatagcagcaatgtatccaaagtattctgcaaattgagatctattggtctgaattttagtatacttatatgattattgggatcatgttatacacatttagatcttctagactgaactaaccattctagatctcagccagagatggggatgaattaggacaaaacaatgtttcggtagtaatctatgcagtcattggacagcattagctgaatatcatatgagatctatcaacaatgaacacatgtcttgcaagaggtctcttctgttggtgccttcgatcatttctgttttgttaatatttctgagtttcttacaactccaacatttccaggccctctgtaaggactaggatatcgactgaaaacaagaaaagtatgtaacaaatatcagttagatatatggactgtttgattggattgttggacagaggaaattgtaggaaaagttttctggacaaaataaataaatgcttggaaaatagacagcatcatgtaaactaaacacattgctcacattgccaattaggcagctctctaaagagcaaaccaattgcctcacgagctgtacatatcccttgtaaatgtagaacaagtaaaatgaactaaacatgactaatactcctgtatggagcaattaacgaagatgagtcctccaaaccaacttgtgggtatggataaaaatctaaatatgacaaaaattatctcgctatacaaatcctatgagtgagaaaacttgcaaacctagcgaggtgtgatggacgttagtgtcaaacttgaggacgacaacggctgcccctccgctgaggccatcggcggtgcatatgttggcacgggcatcttagctggtaacacgggtagtggtccattggattggagaactgccatggcagctctgatagatggacgtgcacatcggtccggatgtgcacaccagagtccaacagccatgacacactccatgctagttgtgtcgtattcattgttgagccgctcgtctgctgcattgagaacggctccttggccgtacaggtcccacacccattccaccagtcggaagaggcaattgttctgggtgtcctgcaggctaattggtctcctcccacatgccacttccaatagaacaatgccaaaactataaacatcggactcagcgcttgctttgcccgtgattacgcattcgggatcaagatagcctggtgtccctgaggggtgagtcattgtttgtatcccaacggcatggtcaataagccttgcaaggccgaaatcgcctagcttcgcattgaaggattcatccagcatgacgttgctcggcttgatgtcacggtgaactacacattgatcccactcctcatgtaggtagagtagtgcagatccgagtccatgaacaatgttgatcctgtggcaacatccaagttagcagatgaattgaatttcaaaggtgtcgattgcacataacgaaaattactaaatcaatgagttaattaataaacctcattggccatgtgaggaaggtgccattgccgtggagatggacgtcgaggctacggttggggaatagctcgtagacgaggagcagctcggtgcggccatggcaccagccaatgagctgcaccagattgcggtggcgtagccggcttattaccttgatctctgacttgtactccttcctcccttgcttagaggaatttttggcaaacctctttatggcgacggcgaggccaagctctctgaggtagccccgatacactgcaccgaaaccgccttgcccaagcttctcctccggcgcaaagctcttcgtagcgtcgacgagcttgtggtacgggaaccgccttggtcccatccccatctcaatctccacgatgggctcgccgtcgtcgtcatcgtcactgccgtgccagcctccatctctgcctccctccttttcttgtctgacgtcgtcgtacaaggactgctaccatggcgaagagga

SEQ ID NO: 6355 - DNA, 3634 bp, Oryza sativa
gcccagcaacggcggcataataggctagccgtgcaggcggaagcaccagtcggggggggacgaggcggccggtcggtgaagacgtagacgcccaacaacggcggcataaaggccagccgtgcaggcggaaacaccagtcggcggcgtcgaaggcaagccggtcggtgaagacgtagacgcccaacaatggcggcataaaggccagccgtgcaggcggaaacaccagtcggcagcggcgaaggcaagccagtcggtgatgttctgactgatccattcctggagcgtaagagataagcctaaagccatgaatcccttttatgcatatctggatctggatcctgcagaacaaacatataggatgagtagtatctgatataaatataatactcgagaaaaaatcaagtattttaaaatatttataaacatgtatttctcctcttgtcaattttgatttccccgagcagatgactcattacgtttaaacgctctgcccaactagtcatagccaccaagcactgggagtcggcctaagcacttcccaaacatgcatatgagtgacatgagttcgtcattaatggaacaaagtttcacggatcagaatttactactcaggtacttttgcaattattaagagcagaaaataaattatattatctctatgcttttgatttcttccgagtaatacttagcaccttgcgttactcggtccatccaacgagcccccgggtgctaggaatcggcccaaaggcaaccatccattggcaaaccaaacggaaagcataggaagatagaactccataactcgataggtacttttgtactcagattatgtcgcaagcaatcaagataaatattataaaaaatatgatataacatctgtagcccccgactcactactcaatggaagaccaattggtgtagtgaggcagaggaaaaggaaaaatatcatataaagaataaaataaatgatgacttagctttgtaatattccccttggtgatggcagaagtggccaatgtgggaacaaagtcgtccatcaataacaatgaagacaccagtcggcggcgacggaggcaggccggcggtgaagtcgtagacgcccaacagcggcggcataatagaccagccgtgtaggcggaggctccactcggcggcgacggaggcaggccggcggtgaagtcgtagacgcccaacagcggcggcataataggccagccgtgtaggcggaggcaccactcggcggcgacggaggcaggccggcggtgtagatgacgatgcccatcaacggtggtgtgaccaaccgaccgtataggcggggacaccagtcggcggcgacggaggcaggccggcggtgtagatgacgatgcccatcaacggtggtgtgaccaaccgaccgtataggcgggggcaccactcggcggcgacggaggcaggccggtggtgaagtcgtagacgcccaacagcggcggcataataggccagccgtgcaggcggaaacaccagtcggcggcggcgaaggccagccggtcggtgaagacatggacgcccatgaacggtggtgtgaccgaccaaccgtataggcgatgacaccagtcggcggcgacggaggcaggccggcggtgaagtcgttgttgctatcagcaatggcggtggcgaggacaagccggcggagtggactcgcggccgatcgaccggaaagctgagacgcctcgagtccatgaccagcatcaatcgcctcaatagtgccgcgtagttatatgcgaacaacaacaaaaaatagcaagaaattaatctgagattaaaaatcaatatgataaataatgataaaaatcagattgagtttccccctgactgatttggatcaagtcagagaagaggagcttgaagaagtggtcgacggaaaggaagtgaaaactcccaaagcgaaagcgaagtcggcgactcatgaaattgattccatcgcgctcgttgataggaaactcgacgcaacccctacctggcgcgccaactgtcgaaacatgaattcggcaataataaaagggggtagcggacgagacctaaagtggatggatgcagagacaaaggatttagacaggttcaggccctctcaatgagaggtaataccctactcctgtttggggatttgaatccgccgagtgtgtattgatctgacgatcaggttgtctcatgccccctagagggcctcctgcccaccttatataggatggggggcaggattacaagatagaaaccttaaccaatacggtatcggtttcctaaatctattttacaatattatcgaatcaggactttaggccgctccataatataaaaggaaacgtaatacccaagtcatgatcggttacatattccatagatatatgttatcccctattactagtcggataaccatgccgtgtgggtatggggtacccataatctccacactacctatctactgtatcttaactaatataaatattcgtatttttcctttcgtcacctcgtgcatgcggtgatttttcgtcccgtcagcccccccccccaaatcccagtcgaaattccgtatcacacaaatagacccacattgagcacaccttctctctaaaatctcaaaccatcccaatccaaataaaaacttttcaaaattccaatccaaatctaaatcggaatcataaaaaaaaatccaaaataagatgacgacgtcacaacgatttttcgtccataccgcgatttttcttccgtcgcgcacctcctcttcaaatcccacatcatcacaatcctacccaaaaacaaaatctcaatttcaatccaaatccaaatcgtaatcaatgagaggtctcctctcataaaaaccccaaaatcaatcacggcaacgacatcatcatcacataaaaaaaaatagaaacaacccatacacaaccaacaacaccggcagatccggccgcgaggggacggcggcgatgtcgggcagatcctctcagttagatccgtccgcgggtgccgccgacgtcgccaccgccggatccaagggagaagcttggggcggagggggagggggtaggggatcgctagatgtcacaccctgaaaattcaaaatatataaattgttgtttaattggaatttttagaaataattttaaaagtcttgaaaagaaaatctaagtttaattaataaattccaatataaaattgggccagataaaatttcattaaatactttgcttaattctataattcctagatttttctgggatttatttgagctaagaaagtatttgtaataaatggaattgcatttaagaaataatttaaattgaaaaggttttaaaaagtcttcttttggctttgggccgaaagtcggcccaaaacctctcttctctctctcctcggcccagccggcccagtcagccgcgcgcgcgcggcctcgctgtcgctgacaggtgggtcccgcctgtcggagtcgtcgtctaccttcggccgtcgccgccgaaaccctagttcgcgccgccgccgtttcctttccaaatccggccgcctctttccttctccggccgaatcaatagaggggaaatgatctccgggatctcctctacctttctcctgggaatctttggtaaatcgctttggaaag

SEQ ID NO: 6356 - DNA, 14620 bp, Oryza sativa
gggaagcccaatggcccgcggggaagaaaaaaaaaaaaggaaggaaaaattggcccaaccggcccaaaaaggaaaggggggggaaaaaaactttttttaagggtttttttttataaaacctttttaactttggttattccttttcaaatattatttgtgctctgaaaattccactaaaatttatttaagcattttaggcttttaggaaatatacaaaaatcctccaagcctcatttgacttttatctttgcccattttaattgttggaggctttcacatgaattttaattattctttgcacaatttcgaggatgaattttagagtcgatttgggacgcgacatgaatggagtataaagtatcatgagcttctttcagaattgcatcctttaaatctttgttgtcggggacacagattctctcacccaaccatacagttccgtgctcatcctccaagaaaccaatagcttttcctcttctcatattcttcttgatctcttgaatatcaggatcattaatttgggcttctctaacttgatcaattagagtgggcttcgcttctaaggctgcaactgacggagctcgtggctcctcaccgggagaccgcacaggccccccctttgccggttcggccgggggcttagggtgagatctcaagctctcgctgtatgtggaaagatcgcgtgccaggaagaaacgcgagacacggacgatgtatacaggttcgggccgctgggaagcgtaataccctactcctgtgttttggtggatttgtgtgtggaggagctacaaagtgtgagccgatctatcccttgctctaggctctaaatctggaaaaaatccatcctcctctccctatgggcaaggtcctccttttatactttaaggggataccacatgcactcttccctttccaaactggacttttttctttacataaatggacggagatttgcacggttgccctccgaacgtccttctgatgggacggcccatacctacctccacttctgccgggggcaggcgcgtcgtgggaacgtggctatgcgctgacgacatgagcagtgtcagaccggtcacaaatcggtcattcttgtccaccgcgtgtcagcttagcaacgtgcatgtttgcccttcttcacacaacatcttgcctgtaatggttaggatgaagcctggtattcatctaaccagggctaacgtgtcatctctaagaggtaacacgctagctccggctggagacgcgtgcctagaggctctcgtcttgacgggacggggcgaggcgtgcgccaggccgccagtcgccacctaaccgttgatctgaccggtctgtgactggtcacagaccggataaaagagtgcgctgcattgcgctgcatgctgcatgacacgcttgaccagatcgcaataaatgcggttaggtgagccctaccgtgttcacccaacctatgtacataatgcaaaccccacaaggggtcggggcacctcggccctcggagctggggcaggagcaacccgacccccccccctcggggaaatcaggaggagggcggacacctcaccctcgggcccgacgtccccgaaggtgccaggccacgtgggcgattccatctgcctcaagcctccgggcgcaatactcccggtcccatatcaccgacagcaacgaaacctctaccgacaattcccaaatttaatctttcaaattccttgcataattccaatggcaactgtcgtccttctgtagcattgcaatagccttttctgctaagagcgtctgctacaacattagccttccccggatgataatgaattcccatgtcataatccttaattaattccaaccatctccgttgtctcatgttcagatccggctgagtaaagatatactttaaactcttgtgatcggtgtacacttctgtacgagtaccgaaaagataatgacgccaaatcttcaatgcatgaacgactgcagctaactcaatatcatgagtagggtagttcttctcatgcggacgtaactgtcgagaggcataggcaaccaccttcccatcttgcatcagaacacaacctaacccaagtttggatgcatcacaatacacttggaaacccttctttggatcaggcaaaatcaaaataggagctgatattaagcgacttttcaattcttgaaaactctgttcacattcttccgaccacttgtacttcacatctttctgaagcagtcgtgtcatgggcttagcaatcttggaaaaattctatataaacctccgataatatcctgcaaggcctaggaaactgcgaatctctgaaactgtctttggttgcttccaattggttacggattccacgttactaggatcgacggcaactcctccggctgagatgacgtgaccaagaatttcacttcggacaaccaaaattcacacttgctaaacttagcatacagttgatgttctcgtagcttctccaatgcaaggcgaagatgttcctcatgctcttctttggttcgagagtagataagaatatcatcaataaagaccaccacgaacttgtctaagtattccataaacaccttattcatcaagttcatgaagaaagcaggggcattggtaagtccaaaagacataacagtacattcgaacaacccatacctagtggtaaaagctgtcttaggtatatcttcctctttgattctcaactgatgataccctgatcgaagatctatcttggagaaaacagtggcacctttaagctgatcaaacaaatcatcaatcctgggtagtggatacttattcttgatagtcacatcgtttagtgcacgatagtccacacacattctctgagtatgatctttcttttccacaaaaataaccggagctccccatggtgatgaactcggtctgatgtatcctttctgtagcaaatcatctacttgcctcttaacttctgccaactcattggctgccattcgataaggtctcttatggatcggagttgttccaggtaccaaatctattctgaactctatatcccttttaggcggcataccaggtaaatcatctgggaacacatcaggatactcccggactataggaatctcttccaaagttatctggttcagtcttgaccttaaagactcagatgacaatgcatgaacagttacaactcgaccatcatagctgttgagagttacttttctgttggcacagtctatcacacctttatgtctggctaaccagtccatccctaggatgacatcaaggtctttggattttaacaagataagattggccagaaatggtactccttgaatttctattctgacagaggggctacgttgcaaagagagtgcttgattatttccttggttttgctgattctgaaattgctgcatcatcatgttcataagctgtgtctgttgagcaagaacttgggccagagtgggattctctccattgttgttgttattggggttgttgggaccattcccattgctacgagtgttcaccatctggcatggacagggcacaagaagagaaaccggggaaactacttaggacagagaattactttaacttttattgatcttaactgagtttcattattacaaactaaagactctcacaccactaaactcaccaacttcctaacactcaaaagcaaacaaacacatgcaattacatcccaccactgatgtaaatcacatgcgagccacacacaagcaaacttaaagcaaaccaactaacacaacgatctaagacaacgacttaacaagtcactctagttcttccaagcatcggaggtcgattgaaggctcgtttttatcatcttgagttgctacccactcaatcttggaattgttgtgcttagattcttcttcttcatcactacttatgatgatgaccgaaggatccgcttgagctggggcaacttccttctccaccacacgaacctttggcgccaattgatagcgagggacaaatagagctctcttccttgcggtaagacgaatcctggccttctgcggcggtgcttctcccttcaatgcggctaattccttctccaaacgatccaccttgtcttctaacttgcaaatcttaccacgattccggtcttcacgatcttgagctgctaatacagtctccgcacgactttcatccatagcccacaacatctcaaccaaatgtttcgtggtaacatcattctcaattccttcagtctcaaggtaactgccacggtccttccctggggttggcgaggatggtagcgatactcaatgtcggccaactgatcactgtagcgatcacggagctctcctatggcgatccttgccacctcctgacatgcatggatgtagtttcttcctccagcttcaaacatcactgaggggacctcttcactattactgttcaaagtgactttgactcggcacttctcttcatgacgatcatgaggaatctgggcataaaaaggggcagtcccaaatccaatgacaaaggacatcgtgcgcaactcctggacaaaaccctcaacaccaaacaggtactcaggcttgtaacgcggcatctaaagacaagtgaaaggagggagttaagacctttatccaattaatagcacaagtttttggattaatttgaataaagttagaaaatcagagtaaaaaggtaagtaaataaagtaaaccaagctttgcgagataagttaaaatagttggaaacgaggtcacaaattttgtaattttgaataactggtttcaaaagaaatgaaagaaaatgataaaatcaacatgataaatttattttattgcagcaagattaaataaaacagtattataaaacttttgctggtaaaatgagccattagtacagtaatagatgtacagtactaataacactggaataaattttgaatgagaaccattaaaagagattatgaagtgcatgtgccattagtttggtttaattaaaagagaaagggaggagaacagttctacttttccaatatttttcagagggcttctatgggtaaccatttggcataacctagggtcaaagaggctctgataccaacttgtcacgcccggaatttctatccaaaattccaaacgcttacatgtgtgtgaaccctcgtccaggaatcagccgaggcacacaataacaaattgataatagagtacaaatattactctaattaataagcgaataaaatgtcattacagaggtagatagttcctctcaatcaataaagttctaagcagcggaaaataaataaacggcgcagacggctccactccacaggcagcttgaccaaggctacacctaatcctccacaccatcagcctcattgtagaactcttcctctgatgaatgattgcaaggtgagtatatgacatactcagcaagccacgcagcaaatatgcaagtgcacaggataacaaaggatggcataatagggtttcatttgcaaaagcagcatttagcaaacatttgagaatttaacaaaacagttaagtaataattaaacaatattaatacaacgctatacaacataccctgttgtataggcccaaccattctgaacaaccaccccggctgcacagttctatctccaaaccaggaatgtaccattccaaaccaggagctaatcaaattattaccagtttaagcatcttttacaatgatgagaggtgtgagactaatcacgaaagacattgttagacccgcccataaccgcgggcacggctattcgaatagttttactctggccagaggtgtaccactgtacccacaagacacaaccccacatcatgtcaccatgtgcctcaataccaccacggtatctcggaaaggagttgtgacaatacccctcgcataacacaatccactgcagcgcaccttcctggatcataatcacccccttataaacaaggcatggactccccagcgacccccgtgggcttatctccgccacttctcagtctggtgccccgcaatgaaccatgctatacaaaagataaagccgttgcccatgctggcttgtggttggcacgataaatgtttcacaactgaaactcgtgaaccggtccttaattgtcatgagcacgaccatcaaaaccatgtgcccacaacccaccattatcaggttttagttggcacattaattaattaactaatcacgattgaccatcgtgaactatcaataagccatcatgaaataatagtgagtcattagttatcccataaatgtactaatgtttctaagcagggctaagcaattatatctaatatctagttgaaccaatataaataaagctcaactagtcaaattaatataacccaaggtatcaaggaataaggtaatcaagtacgaaagggccataacaaagaataggtcaattccacccaatgacattcgaaaatagatgcaatagttgaatagaaacaatagctttaaataggatcaacatgctcaaagggttgtttgggatctgtgtgacttgccttgctggccttggaactcttcaaactcttcttccgcgaaaacggactctccagaaacgacggaatctaagcaaaaagaagcaaaatcaccaaaacagcacataaacaagcatgaacagtacatgtggatatttttaatgtgtaaatctcaattttagaaaaatttagagacttgaaccaactaaatcggagctaagatgaattagttatgaatttttaaagattaaatcggattaaaacacttaaatcggtttaaattgaattatgacgcaataatgaattatttttgaaaaggaaaagaaggattattgcgtcagcggctagggtttcggtggaccggcgcacgggcggcggttcacgcgaacggacggccgagatctaaccgatccaagatggacggccgagattgatcgagtccacggcggttcacggcggacgaccccgatggcgtcagcgatgacgtcaccgacggcggcggcggctcggcggagcggacggctcgggcggcgcacgctcaccggcgaacggcggcgctacggcacgaacggaggacaccaacgggaagcggacgacacggcgaacacaccgacgaccaaaacgacggcggagaagcaacggacggcgacggcgacgagaaggaagcggcggctaccttcgggttgtcgacggcgacgaagctccggcgggttccaacggctgcgaaggggcggacgaggacggcggcgacttggcgatgacgacggcggtcttcccgagcggcggcgacagctggagcgacggcggagcatggctgaagcggcggcggcgacggcgaagctagggcacacggcgctaaggctcttccggcgacgagaggcgaaggcgagggctgcgacgggtagaggagacaccgggggtccttttaaaggggctcggaggcgacggcgaaggcccacggcgacggcaacggcgaaggaaaccttcggcttggagagagggaaaaccgatccgaatcgaactcgattccaaagctttccaaagcgatttaaccaaagattccaaaggagaaaaggtagaggagatcccggagatcatttcccctctattgattcggccggagaaggaaagaggcggccggatttggaaaggaaacggcggcggcgcgaactagggtttcggcggcgacggccgaaggtagacgacgactccgacaggcgggacccacctgtcagcgacagcgaggccgcgcgcgcgcggctgactgggccggctgggccgaggagagagagaagagaggttttgggccgactttcggcccaaagccaaaagaagactttttaaaaccttttcaatttaaattatttcttaaatgcaattccatttattacaaatactttcttagctcaaataaatcccagaaaaatctaggaattatagaattaagcaaagtatttaatgaaattttatctggcccaattttatattggaatttattaattaaacttagattttcttttcaagacttttaaaattatttctaaaaattccaattaaacaacaatttatatattttgaattttcagggtgtgacatctagcgatcccctaccccctccccctccgccccaagcttctcccttggatccggcggtggcgacgtcggcggcacccgcggacggatctaactgagaggatctgcccgacatcgccgccgtcccctcgcggccggatctgccggtgttgttggttgtgtatgggttgtttctatttttttttatgtgatgatgatgtcgttgccgtgattgattttggggtttttatgagaggagacctctcattgattacgatttggatttggattgaaattgagattttgtttttgggtaggattgtgatgatgtgggatttgaagaggaggtgcgcgacggaagaaaaatcgcggtatggacgaaaaatcgttgtgacgtcgtcatcttattttggatttttttttatgattccgatttagatttggattggaattttgaaaagtttttatttggattgggatggtttgagattttagagagaaggtgtgctcaatgtgggtctatttgtgtgatacggaatttcgactgggatttgggggggggggctgacgggacgaaaaatcaccgcatgcacgaggtgacgaaaggaaaaatacgaatatttatattagttaagatacagtagataggtagtgtggagattatgggtaccccatacccacacggcatggttatccgactagtaataggggataacatatatctatggaatatgtaaccgatcatgacttgggtattacgtttccttttatattatggagcggcctaaagtcctgattcgataatattgtaaaatagatttaggaaaccgataccgtattggttaaggtttctatcttgtaatcctgccccccatcctatataaggtgggcaggaggccctctagggggcatgagacaacctgatcgtcagatcaatacacactcggcggattcaaatccccaaacaggagtagggtattacctctcattgagagggcctgaacctgtctaaatcctttgtctctgcatccatccactttaggtctcgtccgctacccccttttattattgccgaattcatgtttcgacagttggcgcgccaggtaggggttgcgtcgagtttcctatcaacgagcgcgatggaatcaatttcatgagtcgccgacttcgctttcgctttgggagttttcacttcctttccgtcgaccacttcttcaagctcctcttctctgacttgatccaaatcagtcagggggaaactcaatctgatttttatcattatttatcatattgatttttaatctcagattaatttcttgctattttttgttgttgttcgcatataactacgcggcactattgaggcgattgatgctggtcatggactcgaggcgtctcagctttccggtcgatcggccgcgagtccactccgccggcttgtcctcgccaccgccattgctgatagcaacaacgacttcaccgccggcctgcctccgtcgccgccgactggtgtcatcgcctatacggttggtcggtcacaccaccgttcatgggcgtccatgtcttcaccgaccggctggccttcgccgccgccgactggtgtttccgcctgcacggctggcctattatgccgccgctgttgggcgtctacgacttcaccaccggcctgcctccgtcgccgccgagtggtgcccccgcctatacggtcggttggtcacaccaccgttgatgggcatcgtcatctacaccgccggcctgcctccgtcgccgccgactggtgtccccgcctatacggtcggttggtcacaccaccgttgatgggcatcgtcatctacaccgccggcctgcctccgtcgccgccgagtggtgcctccgcctacacggctggcctattatgccgccgctgttgggcgtctacgacttcaccgccggcctgcctccgtcgccgccgagtggtgcctccgcctacacggctggcctattacgccgccgctgttgggggtctacgacttcaccgccggcctgcctccgtcgccgccgagtggtgcctccgcctacacggctggcctattatgccgccgctgttgggcgtctacgacttcaccgccggcctgcctccgtcgccgccgagtggtgcctccgcctacacggctggcctattatgccgccgctgttgggcgtctacgacttcaccgccggcctgcctccgtcgccgccgagtggtgcctccgcctacacggctggcctattatgccgccgttgttggatgtctacatcctcaccgccggcttgcctccgtcgccgccgagtggtgcctccgcctacacggctggcctattatgccgccgctgttgggcgtctacgacttcaccgccggcctgcctccgtcgccgccgagtggagcctccgcctacacggctggtctattatgccgccgctgttgggcgtctacgacttcaccgccggcctgcctccgtcgccgccgactggtgtcttcattgttattgatggacgactttgttcccacattggccacttctgccatcaccaaggggaatattacaaagctaagtcatcatttattttattctttatatgatatttttccttttcctctgcctcactacaccaattggtcttccattgagtagtgagtcgggggctacagatgttatatcatattttttataatatttatcttgattgcttgcgacataatctgagtacaaaagtacctatcgagttatggagttctatcttcctatgctttccgtttggtttgccaatggatggttgcctttgggccgattcctagcacccgggggctcgttggatggaccgagtaacgcaaggtgctaagtattactcggaagaaatcaaaagcatagagataatataatttattttctgctcttaataattgcaaaagtacctgagtagtaaattctgatccgtgaaactttgttccattaatgacgaactcatgtcactcatatgcatgtttgggaagtgcttaggccgactcccagtgcttggtggctatgactagttgggcagagcgtttaaacgtaatgagtcatctgctcggggaaatcaaaattgacaagaggagaaatacatgtttataaatattttaaaatacttgattttttctcgagtattatatttatatcagatactactcatcctatatgtttgttctgcaggatccagatccagatatgcataaaagggattcatggctttaggcttatctcttacgctccaggaatggatcagtcagaacatcaccgactggcttgccttcgccgctgccgactggtgtttccgcctgcacggctggcctttatgccgccattgttgggcgtctacgtcttcaccgaccggcttgccttcgaccgccgccgactggtgtttccgcctgcacggctggcctttatgccgccgttgttgggcgtctacgtcttcaccaccggccgcctcgtccgtcgccgactggtgtttccgcctgcacgctggcctattatgccatcgttgatgggcgtctacgtcttcaccgaccggcttgccttcgccgccgccgactggtgtctccgtctgcacggctggcctattatgctgtcgttgttgggcgtctacgactccaccaccggcctgcctccatcgccgccgactggtgtttccgtctgcacggctggcctattatgccgccgttgttgggcgtctacgtcttcatcggccggccgcctcgtccgtcaccgactgatgtttccgcctgcacggctggcctattatgccgccgttgttgggcatctacatcttaatcgccggtcgtctcgtctgttgctgactagtgcccttacctctacgtctggtttatacagctaccactactgatggacatcatcatcttccgtcgccgactgattatgccgccgccgactggtgcttttatcttcacaactgcgcgtcttcactaccagtttgcttctgttgccgacgactcgtgttcacttcatcacggcaatgcaactttgtcatcatggtagagcgacttcatctttattatcttcggcactggcaaactctattgctgctacttcgcaagttttgctacttcaccaaccacgacgtctttgtgagcctcgacatctcggcatgcgatgccatgttattttactacaacaagaggctctccaatattcaggatttctacttggacatcttcaacacatatcttcaatcaagcaatgactacttgacgacaagaagctataattctcgactctatgttcagttgtttcccaactaaccaaagagtcgggggctacacaaatacaaggctcaaaatttgacaaattttatgtcaagctgaagaaatcaattcatcaaccaacgagtcaacttcaggagtcattatcttcatctttgattcagagcagacattctacttcaacaacttcaaatatttcggtttagacgagttgggcaacaacatcaactctcctccaattatttgtcttcacggttggcctactacgcaaccgccgatagaggatctcatcgttatcatcggctgctacatcgctattgactggatcaccgacatcgccatcttcatcaacatcttgtcaagcctcatcaacatagcctactctgctgccgttgatgggaaacttcatcatcatagtcggctatctctattgccgctaatcatcattaccgtcggatgcgtttgtcgccgccgattattttcttcatcttcatgattggtggatttcgccatcaccgttgatgcgtgtctacgtcttcatcgtcggtttgcttttgtcactaccgactgttctttcgttgttgttgggcgcctacatcttcactgctagctgacctgactgttgccgactggtttcttcgcctccatggttatgcaacttcattacatttgattggtggcatctttactaccactgacatcttccgttacttctgatgagcaatttcgtcttcatgttggtcatttcatctccatgccgactgcgtcagctattgccaatagacaattttgactatgacagaaggacaagctatatgctcaggagctcatcaactcaagcgtgaggattatatctctaatttggacttgttccggatacatgcaacatgaatttatgatcatgggtctattttctatgctcaaagactggactatttattattccccgtaagggttatcaaccgaatacttgcgccagtcgggattcaatttttatatctattttggagtatcccataagggataatcactcagatcacatggtctatatcacccgggagcatgttacatgcgtcatcctttaaagggtatcgaaggcatattttttggcctaggcctaatatgtctgcagcccatattttcaggtgtggcctgtcacgttcttttagggacttaggcactttttgcttaggccaaagtgcgcgtgatcaagtgcccaataccttaaaatccttttataccgcagttactcaacttttaggagttggtacaatgcatcttaaaaggtgtcaaacagtaaagctttatatagctgccccgctgactttttaatatagtcatggtgctgtttgggtttttaagcaattgattggatacaatatcgttgctttttgccacgtaagtgtgcatttttattgaccaatattatggcttaggctgattatatattgtggtcatttttctaggcggttggtaaatcctttatgagtttatttactcggattttacaccacatatgccatatatttccaggtgtggtgaaaccatgtgtcttttagggactaaagcacgtctgttaaagcagtgtgcgcatggcgtatgcccaatactttggaaatttctttattcacaacatccaagcttctttatagctattttgctatgtgaattttcaatgatgtagccaactttaggttacactcatcatattttacaaagcagtcggtatatcacttggatcatattattcggggattcacaccgcatatgctatatattggtatcaagtcacttggttgactacgattatcaaaaccactcagttggtgcatctattagatacatctattcgatgcacctgactttatttttcagccctccacagtcttcatatttggtaaaagtactcgggagatcatggtgaggatgattgaagcactcggctttggagtaatctagttcgagaaaagattatctttccgactgtgaaggtctcaggggctactgtggagattatgggtaccccatacccacacggcatggttatccgactagtaataggggataacatatatctatggaatatgtaaccgatcatgacttgggtattacgtttccttttatattatggagcggcctaaagtcctgattcgataatattgtaaaatagatttagggaaaccgataccgtattgggttaaggtttctatcttgtaatcctgccccccatcctttataagggggccagaaggccttttagggggcatgagacaccttgatggtcagatcaatacacactc

SEQ ID NO: 6357 - DNA, 6532 bp, Oryza sativa
actttcatgtagaaagcatatttttattttgccatttaaatggtctaagtcgcgcttgaaagcaggcttggtttatgggccttcacatgttggcccacttctaaagatatttttcttttgtttatttctgttaacatctttattttaacaagtcaatccaaacttaaaaaaacctaaatatcttttaatatacggggtattacattcctcccccttcaatcgaattcgccctcgaattcgcccactgtagagcttgagaaaccgtaagatggaaaggaatacacaaaacatacatataaagtagttaggactctcaagcaatttcgaggacatctcctatattcgcaacactgcttgcgtctaggtatggtagataataattaactagcataagaaagtatggtagccaacaattcaaaagcagctaataaaccaacttggacctactagacaggaatattggcttgccaaagaagtgcaatgcacatactaaaacacccaattgggacatatacaaaaatcattggaacacatcatgaagaatcttactacaaagcaatgaaacaaattgtgaaaacaacctttacgctcaagggaatcgagaatacaacacaagcttttaatttaaaatttaaagaaataaacactcacacccatcacatcttattagtatgttgctcatcttcaacaactaaaagtctatctttgattgcaaattatttagaggtaataaacaatatctacgaagtcaatctcaaggaccataggccacacttgttccacttataatgaacattctgagtaactagaacgaaagcattatcctcaaaaactgctctgaacatcgatagatcttgaattttctaagaaactcaaacattccaaagtaaatgaattaaatccactcaataaaaaacaatttgttgggtgcatgtaattggaaagaaataatcaaatatggaaggtcaagcaacaaaacaaacacataaaaaaatgaatatttagtctcaaacacggttttcttaagaaatctgagatcaggataatgacaatctgtaataaattcaagaatcacacgtaaagacaatggaaatatttagaacatggaccgagtataaaaccactttttgaagaaaatgcgtagaaggaagcatcctcttcaacttgatttttttaaaaaaaaacaaaaaggaaatatttttttaccataaactcataaaccaaaattcaaagttttggagtttgtttgtcaactcaaatagcgaatccgaaagccattctataaaaaaattcaaataaagattaataatcaaataagtgtggacatcaatccaagaatatcaatactgcacacagttctgagccatgtaatgaaaataaatcacttggtaaagaaattcaaatttaatacaagttctccataacaagatttaaattagtattttcaaatagtattgtgcatatcaataatttataatttatcagtacaaagcaatcgcacaacacttatgtttgaacaaccaagcgaatgaaagccacaaaagtgaaactaaaataaatatttagtgttaattcctttctgaaagtaaaaaaaaatagaaatcaggagaatatttgtcaccaagtgatgaatgcagagtcaaatgttttccttttggaattatttcagaacgtgtaccacgaatgagaaagtttttttttttcattacctcaaccatagtcacataatagaactcacaaaaagaaactaataagccatatcgcctttgaatctcaagtctgaaaaatggaacatcctttttttttcttactttttttctttgcttttcgggtgaagacatcactaccttggtgcatcatgcataacatgtagacacatctcaccactgtaagaaaagaatagaatgagtagatgacatgggggccaatccatcccatacccaaactattaactcggtacagtgatagatgtatcacgacctaacactcacactcggacaacctcacttggcattgggaaaaaaaataaagaaaaagtcccctcctctaaccactttgcattgcctatacggaagaaaagttacctattcttaaaggaccattgagtcttataggatacaacattaattacttctataaaagagattaacacaagttagagccatgatcaaactagtttaactaaggtctagggaaactaaaactttatcatgtacactcacacacctcaagtataactgtaacaccccatgttgttctccctaatagctttccgaatatagttatgcgcaaacgttaatctccacactatacaccacaccaacgaatcaaaactgaataatttttttatacctcctagctttacttattatgcaatcaggtcttattcgtagaagagcatatatatatatatatatatatatatatatatatatatatatagtaacaacataactccagaaatcacaaatacaatgagatagagatcagtaatcgataaaataaatcagaagtgtgatgcaaagaatgacccaaacccatcctactgtgcaccagtgtgtcaaattttattggtttaaatttaactcaaattttacttctatttttcccatcctaaggaaaacatgatcaatattttaagttgtcatatttacttcccatggacctactgcccactcacataccaattgtaacacaccagataaccacgtaccaagagtgccacaccaaaaaccactcaaaccactaacttccaaaattattagaaattacggcagagtctcccctgtaaatacggacatccacgacagacaattataagttaaactaataacaatatcattcccacaatacgatccatccttataatccatggggaagaaaatattagaaatctaaaagattattacaagaccaaaccaggatataatttaagtgtcattttgaacctgagcctgtcgaacaaccttgtgtgatgtactctgacggctcatggtcgcacaagggggcgggcgccgcggcagtactcacttcgccaggtggcgtgccaattcgatatgccacaaggctgcagttcgacacgatcaacaacacgacagagtatgacgctgtactgatgggcctaagaaaagcgaaagcattgggggttcggcgcttgcttatccgaacagactccaaactggtggcaagccacgttgacaagtcttttgtcacgcctagaaatttagcccaaatttctagactattttgtgtattaaattcctgtccaggaccagccagggtacacaaaacgacaagtaaaatatagttccaaacataaataaaagcgtaaaatacttacagaagaagtggggtcgctgggcccacctgtcggggagggagagagggaggagaacccagggggttatttagactttgcgcgaggggaaggggaaacgggccgaggcgagagaggaagagagggggcgtgggccgtgggaggaggaagggacctggggccgaaaatggcccaaggaggaaggggaggttttatttgcttttctttttatttaattttattaaatgatctttgtgactttaaaattatttcttgagctccgaaaattcgcgggaaatttcagagagttcattagggcacagagaatattacaaaatatttccggccaaatgatttttaaggaaaatttcaaattctcccattatttcactttattaaattgctttaacttttattaaaaatctagaaaatgcattatttaatgggttttaatcccgaacgaaaatcggggcgttacatcttttgaggcaaaggaagaaggcatgaagaggtatctggaggctgttcgatctatggaaaagtgtttcgccgcataacggtcgaacacttacctagaggccagaacgaggagccagacaccctggcgaaatccgctgcttgcggaggaccacattcgccaggcatattttttgaagtcttgtacgaccaagtgtgcccacagagagcctggacatcatggcaattgaccaggcagaactgggcgaagacccagaagactggcgaacaccgttcgtgaagtacctcaagaatggttggctcctagaggatgaagtagaagcgaagcgcctacagctcagagccacaagatacaaactcagggcagttgtatcgctctggggtgctccaacgcttgcttcgctgcatatcctttgctaaaggcgaggaaatagcgaaagaaatacactaggggctgtgcagtgcgcatcaagccgcaagaacggttgcctccaaagttttttgccagagtgtatattggcccactgtgctaaaagtttgtgtgtgtcacgaccgaaaataacccaacgggtgttccttacgtgagtgcattattccttgtcccaggaggcaaggtacaccaaaagttgatacagttcagagttcaacaagcggaagcgtaaatagttaatttattacatgggcggcgaaggcccagcacacacaaagacaaacgggaaacagcagaagactagggcgacgaccacaggcgcttgacggtaggcacgagctagacaccaaagccttcatcttccagggactcctcttctgggtttgggaaaaattgagcaagactgagtacaaccaccgtactcaacaatacacacccataagtgcagaataaatgaaagggagtacaagggggttataatataaagggttagggtttgcagtaaacagcattaaaagacacttagttgctcgaagctattttgtaaacacgattctagagctatacaatattattaatcaaggccgtggacccacacgaacctgccttaacccaaggcctacgatgattcagaccgaactggcaacccgaccctgggtcccagctcgtcccaagccaacccaggccaattattccacattttagttgttaagcaggttttaagaattaaaacactaacttgggtacattgctcggcttgcccataaccgagggcgcggcaattcgaatagattgtactctgatcagaggtgtacatctttacccacaagacacatcttcctcacgtgtaaccacgtgccgcagaccaccacggtatacggacggaagacgtgacatagtttccaacccatcctagccatagacaagaataccgacccaaccccacctacggctggaacccctgggacaggtaggcaggactgagccccgagcagcaggacaccggccctgtgccatgacatctcgactaccgggccacagctcatgtagccttcatttgtcctagagatgtccatcgatccccgacttcgtccatctccatctgtgtacttttgtttataaccagactgagccacaaactaagccttacccactagacatgtggaagtacggtagtgctttgcaacagaggcccgaagaccggtccttatatggccgaggtgctactatcaaaaccatgcaccccgagcccagcgtaaaaccattttggggattttgaatagagggggaggtgtgaatccaattccacaataatccaacaattccatagtgtccaggtgataagagtattcccaaggtctagagttgtaaaaccacctaatgttgcctaattaaccagtgaagcatctacctaaaatcatactagtggtaccatgagtagagtgtccactagttggggttttgtttaatctagggtgaacaaggtaataataacaataacaataataataaggtcataataaaggtaaataggcatggctaaataaaacagtgataacgcgggaatttaaataaagcggtaatgcaataatttaaatcaaaataattttataaactgggattcaatatgttcaaggacgatgtgacttgccttgctcgctttcccaaacgtcggcttcaacctccacgaagagcggatctttcgaagctgcagcgtctacacgaccaacagaaaagaaaaggactttactctaataaactccatataacaagcagaaacaaagcacaaaaatgggttcttgacttcttaaggaaaaattagagacttgaacggtccaattccgagttcaaatggccaagttatagtcatttgaagtttatatgctctttaaatgaatatttgcgaatttcttcatttaaattttaatttaaaaagggtttattgcgtcagccgaggggagggggcacgcggaccgggtccacgggagtggggcccacgcggctgacggccgggccccacgcggcagccactcggcgcgcccgagggcggccaagcctgtgcagccggcgggaggcggcgcgcccgcgccccgatggtcgccgccggtgaccaccggcgcggcggagcggcggccgagagaggggaagggaagggggaaaagaagcggcagtccacggctcaccctaggttgacggcgacaacgaaaaaggcggccggtgcggaggaaggcggcagcgctgctcgggtcgacggggtcgacggcgttccggcggtcggtgagcgaaacggaggggtggacgaggtcggt

SEQ ID NO: 6358 - DNA, 2404 bp, Oryza sativa
aaacattgcatggggctagcaagatcaaccaactcctattctattttgtcttagagcaggtcctccctccttcaacctctttaccggccagcttctctagatcactcttattcatctccagccgatgcaaagtgttgaatagtctttatattgattgtggaaggacaaatgacataagatataagtggaagagcccctcacctcaaggctagcttttgtgatgggaaagactatttacgatcctacgcaaagaactccacggcaataagaaagagacaatttggaaaggtagatacgatgttgtttctcgttgttcatatatagagtccagcaaatggttaaattcagctctaatgtcagcaaggataaagaagtcatcaaaagctctaatgtcagcacggataaagaagtcatcaaagttaagaggaacataatcccagttgagcacatctctacataaacaccaaacaaccagttcagcacatctctacataaacaccgaacaaaatacgccaaagggcagctaaagattatgtacatctctacagaaacaccaaacaaaatgcgccaaagggcagctaaaaattatgtacatctccacagaaacaccaaacaaaatgcgccaaaggacagctaaagaatatgtggtttgtagtttctagatggacagtggagaaaaaaattctaattttaaaatcagtaacaccaaacaaaatgcgcctaaggtcagctaaagattatgttgtttgtagtttctagatggacagtggagaaaaaaaatctaattttaaaatcagtaactagagggtgagcgtgtacggtacggtgttaacacgggccacggccggcggggagcacaaaagttacagtctctatatttattttagtgctagagaagacacatatagtaaggccctgtttagattctaacttttttacttcaaacttttaacttttttgtcacattcaactttcctacacacataaactttcaacttttccgtcacatcgttctaatttctttaaacttctaattttaacgtggaactaaatacagcctaatatatgctactccctccgtcccaaaatataaatatttttaaacttcgacacggtctttgagatactactttgacaaataatatctatgttttaactaaaaagagttgtatattatgataatttgtttaatgatcagtctagtaacatcaaattgacatgatcaatcttttttcttttgctattaatagtcaaaatttaaaaggtttgacatcacattactctaaaaatatttatattttgggagggagggagtatcaatcatttgaagagttcagtgacattgtaccctaaggacgaaacgaatactggtttgacttactcttgtttcgtcgtcacgcgccaggccgagaacgggtccaatggaggatacctcaaatacagactcagactggcagtataggaagttgtgtcgttgctcctccagctggagaagccgatcagtacacagtactagtatcacagtactgtatcagtatcaccttgcacacgatctatcgacgctggatcgccgacggcgatggccggcttttcgttgaccacttgtgctaccggcctcgtcatcttcttctccgtctgctacctgcagcccctccggctcctgtcgccgccttgtccttcaactactccaacttcagctcaaacaaccagaacatcgaaattgaaggcaaagcctccatccgcgtcgggtatattgacatcagcgcgaacgacgctcgggacattttcaccagcgcgggacgggtatcctacaagacaccggtgcagctctgggacgccgccaccggcgaggtggccagcttcaccacaaccttctccttcaacatcgtcaccccgagcgataggaacaacaggggcgacgggatggccttcttcctcggcagctacccatcgaggttgccaaagaatgcctccagtagtggactcggcctcaccaacaagtcctacaccaacgtctccaccggcgaggaccggttcgtcgccgtcgaattcgacacttatctaaaccgcgacttcgaccccaacgcaacctacgaccacatcggcatcgacgtcaactccatcgtatctgtgacgaacgagtccctaccagacttcagcctcaacgggagcatgaccgccaccgtcgactacaacagcagttcgagcatcctgtcagtaaagctgtggataaatgacacaacgaagccgccttacaacctaagcgacaaggttgatctcaagagcgccttgccagagaaggtcaccatcggcttctcggcggcaacgggcgcatcagttgagctacaccagctgacttcttggtacttcaactcgagcccgtcgttcgagcataagcatggac

SEQ ID NO: 6359 - DNA, 1811 bp, Oryza sativa
  unsure (1)..(1811): unsure at all n locations
ggttaccagctttacaaaatggagcacagagagcactcggagatgattaagtaccaacagacaaggggtatattaagggggtgtttaggtgagagaaggactaaactttantccggacttattttttttgtgagagggaccctctcacccaaacaccctctaaacctctaaagactagacggcagcaatctaaaacagaccgaacgccaaagcattgcacggggctagcaagatcaaccaactcctattctattttgtcttagagcagctcctccctccttaaacctctttaccagcttctctagatcactcttattcatctccagccgatgcagaggactacactgcaataagaaagagacaatttggaaaggtagtattaggggtgagtaaacaagtttatccctgaacatgatgttgtttctcgttgtccatatatagagtccggcaaatggcagcaagcagggcatttttcacaactatatgtttaattcagctctaatgtcagcaaggataaagtcatcaaggttaagaggaacatgatcccagttcagcacatctctacagaaacaccaaacaaaatgcgccaaagggcagctaaagattatgtggtttgtagtttctagatggatagtggagaaaaaaaactaattttaaaatcagtaactagagggtgagcgtgcatacggtacggggtcgaccacgggccacggccggcggggagcacaacggctacagtttatacttattttagtgctagaggagacacagacagtaatacacgctacttccttcgtttcataatgtaagtcattctaatattttccatattcatattgatgctaatgaatctagatagttatatatgtctagatttattaacataaatatgaatgtggaaaatgctagaatgacctacattgtgaaacggagggagtagtatcaattatttgaagagttcagtgacattgtaccataaggacgaaacgaatactccactttagtggcatgtggtttgacttactcttgtttcgtcgtcacgcgccagcccgagaacgggtccaatggaggatacctcaaatacagactcagactggcagtataggaagttgtgtcgttgctcctccagcaggagaagccgatcagtacacagtactgatatcacagtactgtatcagtatcaccttgcacacgatcgatcgacgctggctcgccggcggcgatggccatcttttcgttgatcacttgtgctgccgacctcgtcatcttcttctccgtctgctacatgcagcctccggctcctgtcgccgccttgtccttcaactaccccaccttcgcctcctcacacaaccagtacatcgaaattgaaggcaatgcctctgtcagcgtcgggtatatcgacatcagtgcgaacagtgtgggcaacaacgtcggacgggtgttctacaaaccgccagtgcagctctgggacgccgccaccggcgaggtggccagcttcaccacgcgcttctccttcaacataatcgctccgagcgatagaagcaaaaagggcgacggtatggccttcttcctcaccagctatccatcgaggttaccagtgggccacgaaggtggcgaaaacctcggcctaacgaaccagacagtcggcaacgtctcgaccggccagaaccggttcgttgccgtcgagttcgacaccttcgtcaaccccttcgaccctaacacaaccaacgaccacatcggcatcgacgtcaactccgtcgtatctgtgacgaacgagtccctaccaaacttcaacctcatcgggaacatga

SEQ ID NO: 6360 - DNA, 7799 bp, Oryza sativa
aaacggagggagtaacagtataactgtatacgtgtgggctccttgaaaagctaatattaaggtggaaatggattagatttgcagcacacaactgacagatatatcaatcaatggtgatattctcttgaatgaaatcaatggacatttcttgaatctatctggaatcaaatttgaatatatagtatacaattcacacagttttcagtctctgcattgtccttcagtccagccacttgtttggcgtcagctttatttgtacctgttcctgtatgtggatgctttttattactcgatacaaacgcgtacaaacacttcgcatgttcccgaattcatttttttttgttgaatcgatgtaacattgacactgggtgctcaagatgtcgaagtttcgatttattccaataacaaaacctggaacaaccagatttaaacaacatgaaatatgattcattgacttcattaaaaaaaaattgatacattgaagattcatagagctggtacatggaagattcaaagctattgatcaaaatgggtcttcaaatccccaaccactcgagagcagctgcatgctggctagacttggtcataatttggggaaaaaaatctctagaattcactcctatatgatcactcagacgacaacatataaatcaaacttcattaaaaaaaacatataaatcaaactggttagaattctgagccctgcttcaaattttcgattagtcaagccttgcatggttataaacaggcatatctacatgaggtaactttatgaaggagaaaattccggataagcatggagtgaatatgctattttcaaatcaaagtggcctgaaaacatatatttgaaatcaatggttaactgatatcgtgcaatccttttgaacatttatgcacaagagtgttaatgatgctcatttagatgatttttcagaacctaaatgctttccattgttatcccaaaatccatttcaaagagggaaattaagctaatatgagatttacatagaacatctcgcaggatatggtagtagctagtatcatgttgtttcaaaatgtcacaaagatatgtacattactagtatcttatacattactagtaacaatggagagaaccatcagtttatataatcattgtgggcaattttgaaaggaggatttgatagaaatctgcatgaaaatcttccaagggaaaacttatttccattcatattagagaagaaagggggaaatggtaactagttattatgacaattaatacctggaggagtacgtataatatatctataaaaaatggagaaaaacaatgcatttcatttaccacgcattagctgcaggatatacaaatactgtacgcaatgaatgcattgcatttatactgttttgcaaatcacattgaataatactgatcaagatcaagatccagtcgtccgtggaatagctgcctgcaggcaattatcccaaaagaatagtccaaatccatatatttctccacaacagaataaaaaggtatacatatataagagataatgagatgacatcaaggacagatatttatcaacaaacataatattagcttgcaaaaagaatttaaaatcgacatatatatggctttacgaacctccctcaaacttcaacaaatgcacaaacgtttgtcctacttgatatacatatatttatcgaattatcgtgtaatttaccatgtagaagtcgaaggaccatgcataaacataaaatcaaaaacatgcgtggataatatatgtaagaaaacaataagcaaccaagccaattcggagaaaggaaaggattaattaggagaaggttggaaaataggagggaatatgcttggctccgtgcacgccatccatcataggcaacctctcgcagaagtttgttgctctagatgagtggcatacagggagccaggcacattcccaatatcatcacctttgctttagatcaattatccatgcattgatctccatcatctccttctcttgtcacctagatctctcatctttgctacacatatatctccatgcatgtcaatgccattgcttatgcatggatttgctaccacaatacatgttgcaatatgaacaatcaccatctcctgaactactactacacaatttctccatggattgttgacgaggacgacaagatctagagagagagagagatagctaggaagaactagagagagagagagaaatgatgtggtgatgtgcaaggtgaatgggagaggatactctatatataggggggtgatgatgtgtgagagaggaagaatattccgtgcacacatacaagctatgaaaagaagacaactcacaaagtaaaaaatagctccatgaaaaccgagctggctctgcagtaatttactcgtggtaaagaaaaaaaacggtgatctccaaccaattaaatcactgttctcaccactgccagcataaaacagtgttaataagcaggaacaattcttagcctgcattgattattttatcaccattttcgtacaaaaacatataatttcgactgtagccagattgctgtttttattaattgccacactactgtacattctgctcatgatgttgcactagtagctggagtacctaaaagttaacaactatttacttgctttttgatttttgcagaagtgcagagcatgaatgattactactacatgagtagtgcaattccatcttgacaagctgggccgaatgcattgctaggccaaatttctgtctcacccaactcccaaagctaggttgggctgggctaaatttaaatgaatttatgcaccctataatatatcaacaagttttctctctttcaaatctgaacctagaaaaaaataatgataaaaaaaaatctgaagctagaaagactctgagcatgctctgtgaaaccatgataatattttttttatactctccgagtgctagattgtacttgtcagcaagcccctcgaaattcctggtcgaagagggaagtcgccggcgagggcgccactgcgccgacgaaggaggagaagctagcggcgacggagtagcagtggcggcggcggcggcgggagaaagacatgaggtcgaggtcgctgcacgggtccggcgatgcatcgcgctgggacccaccgccggtgacggcctcgggaggcgccgacggctgccaccgccgtcccgccccattaattttgggcgagtttgtttgaaaactttttattgagtaaatttcactgccaatatttaactattaatgcaaatttcaatttattttgaccttacttgcaacatggctaacgctaccttcatattttcacttgcaacatgtgttcttctacttgttggttttccacgcgcatactttccccactactaaatggtatatttttttttcaaaaaattctataagaaagtgatttaaaaaattatattaatatatatttttaaaattttttaatgaatacttgattaatctgctaataaaatgacatgttttacatggttatggattagttcgcaatacacaacgtcatatatatttgagcttttgtacttgtgactgggtctatggtttgggccatcacgttagcttcggcccacgctgcgcatgcaggagacagtgggccgtgttctatcaccgtggggcattgaagtctaagcgagatggcgcgagagtggctacttgactagagtggcaaatagttaaattcaccactttttgagcgccggagtttgttcgaaaattttggttttcttgacaattgaaagatttgccatagagggtgtgttcgatatatatttgttgcggttgtacagtgcagctgctatgttttcttttgcgtgggggcattttagctgtgatgtgactgcagcaatatgaaccgaacatagccatatgcttcatccgtctcataaaaaatcaaatcatggttacaaatctggacgtatgtacttgttaggaattaaagaataaaaaattgtgggtagaaatattaaaagtagtaacatatttcattaagaataattgctaaatatacttaccgtcgatattaaaaaaaactttcacatggacactaacaaattcttcagataaaacattctgttaaaaactttatgttacaaaaagcttatatagacaaatagacaaatgtcaatctgtattttaaatatattcaaaaatcacttttgaaaaatataaaataccattaacataacattagcctgtaaaggcctcttgcaagccccactctgtcaaaaaaaacataacatgtatgcatcattcatttatttttacatgtctctatggcaagaacattctgtatatatccaagtatccaactatatttaggaggataagatttgactaatgtatgattcttcacccagtgcatataagccatatacctgaattcggctggtacaatatatatgtttgcatgtagcttactagtcggacgcccagagttttttctcctgaattcagccgggtctaagaacttaatgtgatactccctttcgtttataaatatatatcgtttaaatatgtatatatggtgtcaaacatcaaaatattaactcactaatatctgcaactgcaaagttgtgaaaatttgatatgtaataatgatattcatagagttgccataaaaaaataatttcatatagttttatttttatataattttcataaacatatagtcgtaaaagataaatgcctagatgataagttaaaaataaaggaatggacggataagtttgtgtcacgatctatatgacaataaaaaaaaatggaaggattgagtccctgctttctgggaatcatatcatatatgcccaaaaatttacgatgcacattctgtgtacaccaacaaatttcacaaaatttttagagaaaattacacacatacttctaataatttatgcaaagtatcatctttagattcattatatttttagtcgtgaaaaaaaataaaattataacagattttcttttttatggtgagaatataataaatttaaagttaatattttatagatatgtgcaatactattagaagcacatgtttttttaaaaaaaatagatggtggcatttgttaattgatgtacacagactgtgatacctttcctgttttcaaacttgtagagttacatgtgtgaattagtaaaaaaaaaataaccccttacaagccaaattccaacgaacagtgtagtacagtaaccacaaactaaataatttttgtcctttcttttctacaagattatctggaagaatatttgatttgaatgtaaagttatccttgccacgtaaccaggctcatccctttctctttcttgccatttgtttacaagtgttctctcttcttttctgcacttggctcgatcgatcatcaccaaagtttaattacccttccgacagtagtttacattccaatttgatcgaatattggtggaaaagtgcaaaggtgagtcgacgattctccacttcacatctttaaattaatttggatttcaataaatttattagaccaatactgatcgatcttataccattgcttgcttcattaattaatccttcggagtcctttgtgtcgaattttggtaagttgataccggataagcaaaagctgcattgctttcttggcatggattaattagttgagagcttgtttttacacatcaaactaatgcaaagcacagtcagctatttgattccctaaaaggtataatttgtaactataaataaagttagtatatatacacgaatcgaattgtggcttcttggaagttcatagaggtagccatgctcagataatgtgattcgaccggttaaaagcaatatatgatgtaactatatatataggtgtcctaaaatctgttctaatccatttgcttgtagttatatgtaatgaaaaacacgccctattatggaatgcaccattttttccatcaatcataatagacatccacgaaagattaatgatatatatagaatattcgatgggcagctgattacgagcgctcacccctaaaccaccatatataattatatcatatcagggtatcaacaacctcgactagctaaatgaccggccaattgtttcctcgtctaagctattgtagtcattcggttatcttaggtgggactattaacagagaacctaagataaaattttaactttatatatttatatcttatacatattacaactccaaatcctatatattaattggttttgtacatatatttgacacaaaatatataacaatagccttctcacacgaatgttaaaaattttgattggcggccctaacgtcctatatactacatctgttttttttttaatatatgacatcattgatcttttgacaaacatttcttattcaaatttcttatgtaaatataaaaaataagttatgtttaaagaatatttgacgataaatcaagtcacaaataaaatgaatgataattatataaatttttcaaagaagacaaatgatcaaacttatctgaaaaagtcaatagcatcatatattaaaaacggagggagtatcaacacacttgtttcacaaatatgctttcgactttgaatttcatttttttagaaaaaagaattaactacctttgaccgcagagagagcttggagagtatatgtattgacacattaaattcaatggacacgtgctagagctcgcatactgatcgaacacgaccacatcatatatccttgtgggcttatttaattagatatgctacatgaattaaacacgagggaaattctatatatttggatatagcaatgaattattctacatgaaaaacacgtacgtacgcgtctgtgtttgtatactaatcagctggtcggccaagcgtgtgagaccagccaaacaggctagaatgtacgtaaagtatatattgtgtcgtgtgagagtacatatgtcaatatttggatcttgagaagatcaagctagatagatatttccatggagaaataaaggagatctgcaagcagctagctgattgatttgcacttttatctgcaacctgtcactatgagctatgcgctaactttagtacaggatcccttgcattcgtataggtgccagttttgaaactggcacctattcgattgaggaaaggtgtcgcttaccagctaaaaaaatcagcacctataataagttcccaacctatacaaataagacaacctcatcttttcgcttatacttacacttattagtcaaaatttaaattttcactcttaaatttgaagttgattttgagtttttttttatcaaagtttagttttcagcatttatttttagatagttaagaacacgtatataaattttggctcagtaatccgtatttatatgcatataatgacctgctggttttctttttcttaatctactgcattgcattttcttttttaccattacttgattgagaaaataattttaaggtgatcctttcttaccaacaaataaaatacatatagagttatagatggctgattgttatgcattatattattcctaagaaaacatatatgctttgttcatttcaattgatttactaatggatcgaatgaaaagaagaccgtaaaccaaggctcacatataattgtccttccttgattcaaaatctacatgcaaataaactagttgatcaaaccaatagatacgattgtacacaaatttaaaaaatatgacattgtattaaaattgcacacaaatttttaaaattgcattacatttgaaattaatatgtacaatatagtatatgtggtcattt

SEQ ID NO: 6361 - DNA, 6944 bp, Oryza sativa
ttgtgtgctgggccgttgttgcccgtgtaataattatatttacgcttccgcttggtaaactttgaattgtatcaacttttggtgtaccttgcctcttgggacaaggaataatacacgcacgtcaggaacgcctgttgggtgatttccggtcgtgacaattcaccctggtagtactaagatgtaccaggatcttaaggaaagattttggtgggcaagtatgaagcgtgaaatcgcagaatacgtagcagtatgtgatgtttgtcagcgagtcaaggcagaacatcagaaacccgccggattgttgcaacctttgaagattcctgaatggaaatgggaagaaattggtatggattttattactggtttacccagaacgtcatcaggccatgactctatttgggtaatagttgacagacttaccaaagtggctcatttcattccggtaaagacaacttattccggaagtcgcttagcggaattgtatatggcaaggattgtgtgtttgcatggcgtccctaagaagatagtgtctgatcgaggcagtcagtttacttcaaatttttggaagaaacttcaggaagagatgggttctaagctgaactttagtactgcttatcatccgcagacagacggacaaaccgaaagggtgaatcaaattttggaagacatgttgagagcttgtgctctagatttcggtggaagttgggataagaatctaccttatgcagaattttcatacaacaacagttatcaagctagtcttcagatggctccttacgaagcactgtatggtcggaagtgccgcactccgcttttgtgggatcaaacgggagaacgtcaggttttcggaacggatatcctaagggaagcagaagaaaaggtaaagatcattcaagaaagattgcgtgtggctcagtctcgtcataagagttatgccgacaatcgccgcagagatttgagttttgaagagggagattatgtgtatcttcgtgtcacgcctttacgaggagttcatcgttttcataccaagggaaaattggcaccgcgttttgtgggaccttataagattgtcagtagaagaggagaggttgcttatcagttggagttacctcaatctttggcaggagtccataatgtgttccatgtgtcgcaattgaaaaagtgtttaagggtacctaccgaagaagctaatattgagcggatagaagtccaagaggatttgacttatgttgagaaaccaatccgtatactggaaacaaatgagagaagaaccaggaatcgagttatccgtttctgcaaagttcaatggagtaatcactcggaagaagaatcaacttgggaacgagaagatgaattgaagtcagctcatccgcacctgtttgccagttcttccgaatctcgaggacgagattctgtttaaggggggtaggtttgtcacaccctgaaaattcaaaatatataaattgttgtttaattggaatttttagaaataattttaaaagtcttgaaaagaaaatctaagtttaattaataaattccaatataaaattgggccagataaaatttcattaaatactttgcttaattctataattcctagatttttctgggatttatttgagctaagaaagtatttgtaataaatggaattgcatttaagaaataatttaaattgaaaaggttttaaaaagtcttcttttggctttgggccgaaagtcggcccaaaacctctcttctctctctcctcggcccagccggcccagtcagccgcgcgcgcgcggcctcgctgtcgctgacaggtgggtcccgcctgtcggagtcgtcgtctaccttcggccgtcgccgccgaaaccctagttcgcgccgccgccgtttcctttccaaatccggccgcctctttccttctccggccgaatcaatagaggggaaatgatctccgggatctcctctacattttctcctttggaatctttggttaaatcgctttggaaagctttggaatcgagttcgattcggatcggttttccctctctccaagccgaaggtttccttcgccgttgccgtcgccgtgggccttcgccgccgcctccgagcccctttaaaaggacccccggtgtctcctctacccgtcgcagccctcgccttcgcctctcgtcgccggaagagccttagcgccatgtgccctagcttcgccgtcgccgccgccgcttcagccatgctccgccgtcgctccagctgtcgccgccgctcgggaagaccgccgtcgtcatcgccaagtcgccgccgtcctcgtccgccccttcgcagccgttggaacccgccggagcttcgtcgccgtcgacaacccgaaggtagccgccgcttccttctcgtcgccgtcgccgtccgttgcttctccgccgtcgttttggtcgtcggtgtgttcgccgtgtcgtccgcttcccgttggtgtcctccgttcgtgccgtagcgccgccgttcgccggtgagcgtgcgccgcccgagccgtccgctccgccgagccgccgccgccgtcggtgacgtcatcgctgacgccatcggggtcgtccgccgtgaaccgccgtggactcgatcaatctcggccgtccatcttggatcggttagatctcggccgtccgttcgcgtgaaccgccgcccgtgcgccggtccaccgaaaccctagccgctgacgcaataatccttcttttccttttcaaaaataattcattattgcgtcataattcaatttaaaccgatttaagtgttttaatccgatttaatctttaaaaattcataactaattcatcttagctccgatttagttggttcaagtctctaaatttttctaaaattgagatttacacattaaaaatatccacatgtactgttcatgcttgtttatgtgctgttttggtgattttgcttctttttgcttagattccgtcgtttctggagagtccgttttcgcggaagaagagtttgaagagttccaaggccagcaaggcaagtcacacagatcccaaacaaccctttgagcatgttgatcctatttaaagctattgtttctattcaactattgcatctattttcgaatgtcattgggtggaattgacctattctttgttatggccctttcgtacttgattaccttattccttgataccttgggttatattaatttgactagttgagctttatttatattggttcaactagatattagatataattgcttagccctgcttagaaacattagtacatttatgggataactaatgactcactattatttcatgatggcttattgatagttcacgatggtcaatcgtgattagttaattaattaatgtgccaactaaaacctgataatggtgggttgtgggcacatggttttgatggtcgtgctcatgacaattaaggaccggttcacgagtttcagttgtgaaacatttatcgtgccaaccacaagccagcatgggcaacggctttatcttttgtatagcatggttcattgcggggcaccagactgagaagtggcggagataagcccacgggggtcgctggggagtccatgccttgtttataagggggtgattatgatccaggaaggtgcgctgcagtggattgtgttatgcgaggggtattgtcacaactcctttccgagataccgtggtggtattgaggcacatggtgacatgatgtggggttgtgtcttgtgggtacagtggtacacctctggccagagtaaaactattcgaatagccgtgcccgcggttatgggcgggtctaacaatgtctttcgtgattagtctcacacctctcatcattgtaaaagatgcttaaactggtaataatttgattagctcctggtttggaatgggacattcctggtttggagatagaactgtgcagccggggtggttgttcagaatggttgggcctatacaacagggtatgttgtatagcgttggattaatattgtttaattattacttaactgttttgttaaattctcaaatgtttgctaaatgctgcttttgcaaatgaaaccctattatgccatcctttgttatcctgtgcacttgcatatttgctgcgtggcttgctgagtatgtcatatactcaccttgcaatcattcatcagaggaagagttctacaatgaggctgatggtgtggaggattaggtgtagccttggtcaagctgcctgtggagtggagccgtctgcgccgtttatttattttccgctgcttagaactttattgattgagaggaactatctacctctgtaatgacattttattcgcttattaattagagtaatatttgtactctattatcaatttgttattgtgtgcctcggctgattcctggacgagggttcacacacatgtaagcgtttggaattttggatagaaattccgggcgtgacaagttggtatcagagcctctttgaccctaggttatgccaaatggttacccatagaagccctctgaaaaatattggaaaagtagaactgttctcctccctttctcttttaattaaaccaaactaatggcacatgcacttcataatctcttttaatggttctcattcaaaatttattccagtgttattagtactgtacatctattactgtactaatggctcattttaccagcaaaagttttataatactgttttatttaatcttgctgcaataaaataaatttatcatgttgattttatcattttctttcatttcttttgaaaccagttattcaaaattacaaaatttgtgacctcgtttccaactattttaacttatctcgcaaagcttggtttactttatttacttacctttttactctgattttctaactttattcaaattaatccaaaaacttgggctattaattggataaaggtcttaactcccttctttcacttgtctttagatgccgcgttacaagcctgagtacctgtttggtgttgagggttttgtccaggagttgcgcacgatgtcctttgtcattggatttgggactgcccctttttatgcccagattcctcatgatcgtcatgaagagaagtgccgagtcaaagtcactttgaacagtaatagtgaagaggtcccctcagtgatgtttgaagctggaggaagaaactacatccatgcatgtcaggaggtggcaaggatcgccataggagagctccgtgatcgctacagtgatcagttggccgacattgagtatcgctaccatcctcgccaaccccagggaagtgaccgtggcagttaccttgagactgaaggaattgagaatgatgttaccacgaaacatttggttgagatgttgtgggctatggatgaaagtcgtgcggagactgtattagcagctcaagatcgtgaagaccggaatcgtggtaagatttgcaagttagaagacaaggtggatcgtttggagaaggaattagccgcattgaagggagaagcaccgccgcagaaggccaggattcgtcttaccgcaaggaagagagctctatttgtccctcgctatcaattggcgccaaaggttcgtgtggtggagaaggaagttgccccagctcaagcggatccttcggtcatcatcataagtagtgatgaagaagaagaatctaagcacaacaattccaagattgagtgggtagcaactcaagatgataaaaacgagccttcaatcgacctccgatgcttggaagaactagagtgacttgttaagtcgttgtcttagatcgttgtgttagttggtttgctttaagtttgcttgtgtgtggctcgcatgtgatttacatcagtggtgggatgtaattgcatgtgtttgtttgcttttgagtgttaggaagttggtgagtttagtggtgtgagagtctttagtttgtaataatgaaactcagttaagatcaataaaagttaaagtaattctctgtcctaagtagtttccccggtttctcttcttgtgccctgtccatgccagatggtgaacactcgtagcaatgggaatggtcccaacaaccccaataacaacaacaatggagagaatcccactctggcccaagttcttgctcaacagacacagcttatgaacatgatgatgcagcaatttcagaatcagcaaaaccaaggaaataatcaagcactctctttgcaacgtagcccctctgtcagaatagaaattcaaggagtaccatttctggccaatcttatcttgttaaaatccaaagaccttgatgtcatcctagggatggactggttagccagacataaaggtgtgatagactgtgccaacagaaaagtaactctcaacagctatgatggtcgagttgtaactgttcatgcattgtcatctgagtctttaaggtcaagactgaaccagataactttggaagagattcctatagtccgggagtatcctgatgtgttcccagatgatttacctggtatgccgcctaaaagggatatagagttcagaatagatttggtacctggaacaactccgatccataagagaccttatcgaatggcagccaatgagttggcagaagttaagaggcaagtagatgatttgctacagaaaggatacatcagaccgagttcatcaccatggggagctccggttatttttgtggaaaagaaagatcatactcagagaatgtgtgtggactatcgtgcactaaacgatgtgactatcaagaataagtatccactacccaggattgatgatttgtttgatcagcttaaaggtgccactgttttctccaagatagatcttcgatcagggtatcatcagttgagaatcaaagaggaagatatacctaagacagcttttaccactacgtatgggttgttcgaatgtactgttatgtcttttggacttaccaatgcccctgctttcttcatgaacctgatgaataaggtggttatggaa

SEQ ID NO: 6362 - DNA, 27104 bp, Oryza sativa
ctagcagacacatgaagaaataaaattaacaaattttattatttttatttttctagttgtagatcaaatagaaacttgcatgtttgtgtacagacttatatcatcacaattgatgttactaatttttttattttttttaataactatttaagtcgcacataaatgttgggtgtcatgacacctaggtacagagaatcctaatctctttattgtacccttcctttttttgctttgaaactacactttaagactttgttcttccacggggtaatgaagattggagaagatgaccagttcgaaactgcactaaaagttccagttcacctatctttgttacgctggttgcttgacgaaacgagagcatagcagcagtgtatccaaagtattctgcaaattgagatctattgttctgaattttagtatacttatatgattattgtgatcatgttatacacatttagatcttttagactgaactaagtaactaaccattctcaggggcggatccaacgtggggactcgagtcccccctacacccacaagacccatggatacccccagagcaccttctttaatttttttcaccataaataataaactaaaggtctttagatggctaaaggttagagaaacaacgtacttgaggccccccaattttctgttgctggatccgcccctgaccattctagatctcagccagagatggggatgaattaggacaaaacaatgtttcggtagtaatctatgcagtcattggacagcattagctgaatatcatatgagatctatcaacaatgaacacatgtcttgcaagaggtctcttctgttggtgccttcgatcatttctgttttgttaatatttctgagtttcttacaactccaacatttccaggccctctataaggactaggatatcgactgaaaacaagaaaagtatgtaacaaatatcagttagagatatggactgtttgattggattgttggagaggtgtaggaaaagttttctggacaaaataaataaatgcttggaaaactgaaagcgtcatgtaaactaaacacattgctcacattgccaattaggcagctctctaaagagcaaaccaattgcctcacgagctgtacatatcccattcaagcgtcaatttgtaaatgtagaacaagtaaaatgaactaaacatgactaatactcctgtatggagcaattaacgaagatgagtccttcaaaccaacttgtgggtatggataaaaatctatatatgacaataattgtctcgctatataaatcctatgagtgagaaaacttgcaaacctagcgaggtgtgatggatgttagtgtcaaacttgaggacgacattcgtgtcgatgatgagggctgcccctccgctgaggccatcggcggtgcatatgttggcacgggcatcttagctggtaacacgggtagtggtccattggattggagaactgccatgacagctctgatagacggacgtgcacatcggtctggatgtgcacaccaaagtccaacggccatgacacactccatgctagttgtgtcgtattcattgttgagccgctcgtcggctgccttgagaacggctccttggccgtacagatcccacacccattccaccagtcggaagaggcaattgttttgggtgtcctgtaagctaattggtcttctcccgcatgccacttccaatagaacaatgccaaaactataaacatcggactcggcgcttgctttgccggtgatcacgcattcaggatcaagatagcctggcgtccctgagggatgggtcattgtttgtatcccaacagcatggtcaataagccttgcaaggccgaaatcgcctagcttcgcgttgaaggattcatccagcatgacgttgctcggcttgatgtcacggtgaactacacattgatcccactcctcatgtaggtagagtagtgcagatccgagtccatgaacaatgttgatcctgtggcaacatccaagttagcagatgaattgaatttcaaaggtgtcgattgcacataacgaaaattactaaatcaatgagttaattaataaacctcattggccatgtaaggaaggtgccattgccgtggagatggacgtcgaggctacggttggggaatagctcgtagacgaggagcagctcggtgcggccatggcaccagccaatgagctgcaccagattgcggtggcgtagccggcttattacctttatctctgacttgtactccttcctcccttgcttagaggaatttttggcgaacctctttatggcgacggcgaggccaagctctctgaggtagccccgatacactgcaccgaaaccgccttgcccaagcttctcctccggcgcaaagctcttcgtagcgtcgacgagctcgtggtacgggaaccgccttggtcccatccccatctcaatctccacgatgggctcgccgtcgtcgtcatcgtcacgccgtgccagcttccatcctctgcctccctccttttcttgctctgacgtcgtcgtacaaggacttgtaccatggtgaagaggagtatgacgaacattaccacgccaactgtggctcccgctacaactccgccacgtctggaagtcggtggtggtgacggtgacgacggcggcggtggagatgctacttctgctgccagcttctgctcgaacgacgaagtcgacttgaagtaccaagaagtcagctgatgctgctcataggctgagccaattgatgccgagaagccgatggtgacgttctccggcaaggctctcttgagatcaaccatggagctaagggtgtaaggcgtcgtcgtctcatttatccatagcttaattgacagtattctcgaattgttgttgtagtcgacggtggcggtcatgttcccgatgaggctgaagtttggtagggactcgttcgtcacagatacgacggagttgacgtcgatgccgatgtggtcgttggttgtgttggggtcgaaggggttgacgaaggtgtcgaactcgacggcaacgaaccggttctggccggtcgagacgttgccgactgtctggttcgttaggccgaggttttcgccaccttcgtggcccactggtaacctcgatggatagctggtgaggaagaaggccataccgtcgccctttttgcttctatcgctcggagcgataatgttgaaggagaagcgcgtggtgaagctggccacctcgccggtggcggcgtcccagagctgcaccggcggcgcgtacaccacccgtccggcgctgttgcccatgcccgacacactgttcgcgcttatgtcgacatacccgacgctgacagaggcttggccttgaatgtcgatgttctgattgtctgaggaggcgaaggtggggtagttgaaggacaaggcggcgacaggagccggaggctgcatgtagcagacggagaagaaggtgacgaggccggcagcgcaagtgatcaacgaaaagccggccatcgccgccggccagagccagcgtcggcgcgcaagccgcaaggtgggttgatcggctggcttgacttggagcaacgagtcgatgcacaatgcgtacactgcttgtagtgcactggcagtgaatggtgccccttctccctggaaaaaaaacccttctttttgatggagctatgtgaatgtggaactatggaagctggactacaataattgtctttgtcgagctgaaaagaacaataccccaaaaatcaacgatgctgctacaatctccatgatccatcggagagacggagaaacatgcataattgtaagtaaatcgtaatgttcagacttgagagatattcagggttgcctcatgcagtcgtttgacgcagaacaagagcccagcggtcagtcaatggcccagcttatctgaaactatattgtgccaactccactgatcgatcgatggagagtgatgcggatcgcagaaagactttaaagactcccctttggccgtggagtttagtctccgcaaatttgagctttgttgtcatctagtacaaccgatcgaagaccgaattaagtgctgagttccagcttgcagcatacacgcacacgaccgtcaccgtgttgaaaaagacagtgaactctctactgacagtatgagctttcaattacttttcgagaccttttacggcaattgcgaggtatttaaaggtatctggaggtggaacaacgtgtacccttaatcaagagaggggcaaggtacgaaacaaaattattgtaacatgatggcaatggagtaattaactagtaaaacatgggcattatacatgaattgaatacctatatccatcgatcagtatatcattgtgcagattggtatgtcgtgaggaaaaaaaagtaaatcacggatacaccgttgatttagcagcgatcaattcgatctgtaccaaaataaacagaaagatcgcatctcctttcttctctcccttcgcttcgttcttgttctagggtttgaacggttcaacggaaggagacagaggaaaaagcgtctgcatggttgagggttgaagaggagatgaggtagcccggtcgatgactaggcgcaagctagcgcatctaaaagttatcctatgcttattcacacagttgtttagttatttatgtagtttataaactccttatataaggtactggaatttctgtgggatagtaaatgagatctccgcctatggtgttcttctagtgtttgaacaggtgcactcacgaggagacacggtcgaggaagaagatctggcatggtcgagcatttgacaggaggcaagacctgattgacatgtgcaggttataagaacccaacgtaaatctagagaaaaacacgtaaaagagaacatcaaagagcggtgtaactctagataaaatgatgcaacttaagaacctgtaatgctagtgccgactaaacgacttaactcaaacacaacgtaaatcaaatctagagaaacccacataaaagagaaaatacgcaaataataacatgtaaagctggtaccggggaaattaatgttaacttcgtacgggagtacctagcgggacccgattctaattttgaagacaattctaccctttttgctctaatagtaaaattatatttttatctttagtacttaagtacctataccaatagttaaataccttttacatgatacctatgattgaggagtgttggatcttataccttttttggaatgcaaacaccgtaaaaaagcctatcagattttgttgaggaaattgcagcagtaaagccactgctgaccctatcagaaccaactcttctctttcaaattttggcttgatcactctgtgaagtagcagagatgtcaatcttggacgatatgcttgctgcatgaatctcttatgtcttaaatctggcaattggctgctgttatttttgtgtgttaacaattttgcttcgatgttctcgattccgcgttcaatcaacaccggagtactgaacataaatatccacaatttgagacgattgcataagaactgcttcagtagaaaatgattggaggctctttgtgctcttgtttacagtagctagagcctatattctatttattttattaaatttagcttattaattatatctaggttcctgttgtttatcgacgaaaagcctgtgatggtagtgttacctatcttggttcctcttgttaacgccattgtgttgcatgttgtttttcctctttcttgtgcctttacttttcggattgagctttctcattttgtcttgaaagttgaaacaatactttagactttgttcttccacggtaatgaagatttggagaaagggaccagttcgaaactgcactgaaaattccaattcacctatttctattacgctggttgcttgacgaaatgagagccaacgatagaagcaacatgaatgaaacataatgtatcaaaagtattctgcaaattgagatatattgttctgaattttagtagtgtgatacctatatgatttttgtgatcatgttatatacatttagatcttctagactgaaaccattctaggtgttagccagagaagggaatgcattaggacaaaacaaaagtttaagtgataatcaatgcggtcgttggccagcattagctgaatatcatatgagatctatcaacaatgaacaaatgtcctgcaagaggtctcttctattggtgtcttcaatcattttttttttgtttatgtttctgaatttcatgcaactccaacaattccagaccctctaaggactaggatatccacttaaaacaagaaaagtatgtagtgaataacagtcagagatatggacggtttggttggattgttggagaggaaattgaaggaaaagttttctggacaaaataactaaatggttggaaaactgaaagcatgatgtaaactgaacacaattactcatgttgccaattaggcagctctctaaagagcaaaccaattgcctcatgagctgtacatcctattcaagcggcaacttgtaaatatagaacatgtaaaatgaactaaacatggctactgtacggagcaattaacgaagatgagcccttcaaaccggctaaagtatgcgaaaggaacttgaggtgtagggatgcaagtagttcgacttgttggtatggataaaaatctaggagtaaatttcacaaaactacaggtattttgaccaaattatcacaaaactacagatttaaagagctgtatcacaaaactacacatttaacaccaaatttatcacaaaactacagattttaggttaactatcacaaaaatgcatatttaatattgaacttatcacaaaactacaacttttagagtttaaatccctagcactattgttatggtggagctataaacattattactttgtgattaaattgattctaaacctgtagttttattataatttagttactaaacgtgtagttttgtgacacttcatcttaaatgtgtagttttgtgataaatttggagctaaatgtgtagttttatgatacaactccttaaatctgtagttttgtgatagtttggtcatagtatctgtagttttgtgaaatttactcaaaatctagatatgacaaaagttgtcttgctatacttatcctatgagtgcgaaaacttgccaccctagcgaggtgtgattgatgttagtgtcaaacttgaggatgacattcctgtcgatgatgaaagttgcccctccgacgaggccataggcggtgcatatgttggcacgggcatcttggatggtaacactggtagtggtccattggattggaggaccgtcatggcagctctgatagatggacgcgcgtatcggtccggatgcacacaccagagcccaacggccatgacacactccatgctggttgcgtcatagtcattgttgagccgctcgtctgcagccttgagaacgactccctggccatataggtcccagacccattccaccagtcggaagaggctattgttctggttgtccagtaggctcattggtctcctcccacatgccacttccaataaaacaacgccaaaactatagacatcagactcagcgcttgctttacctgtgatcacacattcaggatcaagatagcctggcgtccctgaggggtgggtcattgtttgtaccccaacggcatggtcaataagccttgcaagaccgaagtcgcctagctttgcattgaaggattcatccagcatgacgttgcttggcttgatgtcacggtgcacgacacattgatcccactcctcatggaggtagagtagtgcagaaccgagtccatgaacaatgttgatcctgtggcaacatccaagctagctgatcagttgaatttcaaaggtgttgattgcacataatggaaattatgacaaattaatgagagttaattaaaaacctcattggccatgtgaggaaggtgccattgccgtggagatggacgtcgaggctacggttggggactagctcgtagacgaggagcagctcggtacggccatggcaccagccgatgagctgcacaagattgcggtgacgcaaccggcttatcaccttgatctccgacttatactccttcctcccttgcttggaggaatctttggcaaacctctttatggcaaccgcgaggccaagctctctcaggtagccacggtacacagccccgaagccgccttgtccaagtttctcctccgtcgcaaagctcttcgtagcgtcgacgagctcgtggtacgggaaccgccttggtcccatccccatctcaatctccacgatgggctcgccgtcgtcgtcatcgtcactgccgtgccagcctccatcctctgcctccctccttttcttgctctgacgtcgtcgtacaaggactgctaccatggcgaagaggagaatgacaaacattaccgcaccaactgtggctcccgctacaactccgccacgtctggaatgcgacgttatcggggtcagggaaggcggtggtggtgacggtgacgacggcggcggcggagatgctacttttgctgccagcttctgctcgaacgacgaactcgacttgaagtaccaagaagtcagctgatgctgctcataggctgagccaattgatgccgagaagccgacggtgatgttctccggcaaggctctcttgagatcaaccatggagctaagggtgtaaggcgtcgtcgagccatttatccatagcttaactgacagtattctcgaattgttgttgtagtcgacggtggcggtcatgttcccgatgaggctgaagtttggtagggactcgttcgtcacagatacgacggagttgacgtcgatgccgatgtggtcgttggttgtgttagggtcgaaggggttgacgaaggtgtcgaactcgacggcaacgaaccggttctggccggtcgagacgttgccgactgtctggttcgttaggccgaggttttcgccaccttcgtggcccactggtaacctcgatggatagctggtgaggaagaaggccataccgtcgccctttttgcttctatcgctcggagcgattatgttgaaggagaagcgcgtggtgaagctggccacctcgccggtggcggcgtcccagagctgcactggcggtttgtagaacacccgtccgacgttgttgcccacactgttcgcactgatgtcgatatacccgacgctgacagaggcattgccttcaatttcgatgtactggttgtgtgaggaggcgaaggtggggtagttgaaggacaaggcggcgacaggagccggaggctgcatgtagcagacggagaagaagatgacgaggtcggcagcacaagtgatcaacgaaaagatggccatcgccgccggcgagccagcgtcgatagatcgtgtgcaaggtgatactgatacagtactgtgatactagtactgtgtactgatcggcttctccagctggaggagcaacgacacaacttcctatactgccagtctgagtctgtatttgaggtatcctccattggacccgttctcggcctggcgcgtgacgacgaaacaagagtaagtcaaaccacatgccactaaagtggagtattcgtttcgtacttatggtacaatgtcactgaactcttcaaataattgatactagcatatattactgtctgtgtctcctctagcactaaaataaatatagactgtagccgttgtgctccccaccggccgtggcccgcggtcgaccccgtaccgtacacgctcaccctctagttactgattggactaactgtatttatggcgtcatatttttcattaaaaaatagtcgatatgtatttatattgtaagtctctaaattacatatgtaattttaatgtatttacaatttaagttctaaaattgcatatgtaagtcttaaaattacatatgtaaatcttaaaattacatattaaccatatgtaaatgatgcgtaagtggggtgtaactagtatgtaaatttgtataaatatataattacaacaataaagtcaattgactgctacaaacccatagcaactccggatcaacaaataaagtaaaaaaaatgcaaagggataaacaggtggagaaacggatgtgcatcgtgcacacgatgtccagcgcagcgcataccagccgttaaaatccgactgtactcagccacataatgtggcgtcactttttcagcaaatccgttttaaaattagttttttttctccactatccatctagaaactacaaaccacataatctttagctgccctttggcgcattttgtttggtgtttctgtagagatgtgctgaactgggatcatgttcctcttaaccttggtgacttctttatccttgctgacattagagctgaattaaacatatagctgtgaaaattgccctgcttgctgccatttgctggactctatatatggacaacgagaaacaacatcgtgttcagggataaacttgtttactcacccctaatactacctttccaaattgtctctttcttattgcagtggagtcctttgcatcggctggagatgaagagtgatctagagaagctggtaaagaggtttaaggagagaggagctgctctaagacaaaacagaatacgagttgattgatcttgctagccccatgcaatgttttggcgtttggtttgttttagattgctgccgctttttttttaacgagacggtgcgaagttctattgatagagcaggaaaaaattacaagattacaaccttggaaggtcgtaaccaggaaaaaggaaaaaaaatatactaccacccacacaccgacagcgccaacacacagatccgggagaaggctagcaccggaccggccaccgctaagcgtgaccgaccaccgctaggccaacaacgggacatagacgagatcgcccaaaaacgcccttacaaccaacacaaagcccgactctattcacgtcttccggatttaaggagagggggtgagagaaaagaaggaacacctctccccctagggcctccgacgtgaccaacttgtaggaactaggatgctgccgcaagaggatgagaatctagagcgtgcttgcaccaattgctcgagtgatttcggcaaggggatacctaaacgacgtctccaaggagagaagcgatggaaaaccaacgccaccatccgtcaaggtctcaaaagagccaatactgggcttttgcccggcaaccacccttgaggggtgagacggcacgacaacgccctcaggagggagaatgacactcgagcactgatgctgggttttcacccaccgctcaccacctgcgagtccacggctgacgcaccgatgctccaccgaccgcccaacctctccgacatgtgggaccactgcatcagcgccccctgcacagaaaaatcgattttcgtgtgcaggcctcttaactggaacgcatgcgaaaatttcaattttcgtgtgcggctctttaagaggaccgtacggaaaaatcgattttcgcatgcggtccacaaatcgattttcgcgtgcggtcatattaagtgaaccgcacgcgaaaatacctctccctcgcactcacttcaaatttttcacacctcctctcccttcctttactttttattttcactcctctctctctgtctctcactttccttctctatctctttctccatctctttctcttctccactccactcctctccgtggctggcgacgaggcgcgtcgaccgggtgggcgcgccggcgagcggcgaggggcgacggcaaccggctcctaccaggatccggccgcggcggccgtcccccgcccggatccggtagcggtggcagtcggcgcgacggtggcggcggcaggcgagctcgacggtgacgacggtttcgacggtggcaggctcgatagcgatgacggttgcggcagcggcggctgggtgcggcggcggcgcgacgacagcgacaacgccgggagtggcggcgggtgattccagggttagggttaggattttttatttttttattttttttttgtgcgtgcgggcggtataatttgaccgcacgggataatcgattatcccgtgcggtccacttaacccgaccgcacgggaaaatgattatcccgtgcggttgggccgcccgcacgtgaaaatattgattttccaagacccctgagtgcagatgggcaaaacctctgtacggaaaaaacccatttttaccgcacggaaaaatgcttttcatagtagtggctccgcgtgaccgcaaggacggcggcagcggggcttcgcgcaccacgcgcttgtggcggccgggggagcctccggaggtggcggcggcggtagctttcccatccagatccgggccggcactggccagatctagcggggcgccgggagctagcggttggcggtgggggaggggttggcgccggggctagtgacggcgcggagactggcggcaggcacgggtggcgtcgtggtgggtgggcagaggccactcgcgccgaagttgcagcgtcggcgtcggcgttcgtctgcgcgggtccacagaggtggcgctgcgcaggcaggggctacggcggcgtggtggttgcggcgacgatggacggctgtggcgcgcggacgtcgaagccggcttgctccaccctggatggatctgagcgttcgtggccgaatccgtcgcctccgcgcttgatctggccagggcagccagccagcggggcggttgcgtgtggtggcgttgcatggctcgggtgagctccgatgagctcgatggctgcactgcgtcgcctaggcaggttccagtggggttgctcgctggcgacgagcctcttgctcgcgatgtgcggatgtggagttggcgggacgttggcttgcgttggcatgaagcaggaatggggcttgacatccacggcggtgtcttcctcgttgccggccgagtgttctccctccttttggtttccaccttctttggccagaccctgttctggttgtggggaatgctagggggagggcggaggctccaacttgctgtaggaatttgcagcggattgatggcgtttcgagggtggccaagggcacatccttgccgttggttacggtcaaagtatgacttcttgtgagacgccatggacttttctgtggccgtcgatgtgggggtgcttgtgtgggtgatatgaagacactagtgaaagccttgtcgtgcctttggccagttcgacgatgacgacgcccgtgggtgccgtttcccttcttggaggcgtcgtcatggcgttctttcatatccctcacaaatcttcaggtgaaaaaattgttccggatttcggacgagcggcggcggaattacgcgtcgtgtcctccttggaggcatcgtttcggagaagttcctatgcatcgacgattgttgatggcctttttcggttcaaaagctttgatactttaatgttcggcgaggccttcgccttcttaggtccgcttcgttcttgtggtgggtgacactctcttcggttgtttctactgatgaagtcggagctgctcgctgatgaggtgcggtgacgcttggcaacggtgacatgttacagtctcttccaaggagttggtgctagtcgtgtgaaggaagtggctctttgatggcttggctgatgtccattgttggataacggagctgcttttcgatcgctttggcgactttcgtggtttcagtgtcgctgcggttgtgaagtcggcgctgctgggtcgcttgggcggctagctcggcaacgataacacctcttctgcaatgtcggagctgtggtatcgcttttgtgtttagcttggcagcgatgtcctgtgtttgggctctgccgtcattgttagttgtgtagctaggtctcttgcttttttctctacggtgggtttcagccgatttcccataattaaccatgtagttgtatggtttttgggcccggtttcccttataaattaggtcaattctcttcttctaaatatacaagctgggacaaagttccacctcagttttgaaaaaaaaaacaatgccgcgagctgatcgcgaccgtaatttgtccatgcatttgtaatgctcggactcgaactcgagagatattagggtgttaaactaatgaatgtccatttttcttcagggatgtaaaatggatatttctcttaaattaatgatgtctatgtagagagcagaccaagaaaacatagggttttgattacgccacaagtgaaaattaaactgattactgtatcaccaagacacgtactcgtaagaattagccatacaaacaacaatagtactagttgtatgcttgcaactccctacagttccacgaagataccacaaatcaagaataaaggggttctttggatgccactctgtttattctatcagcaaatttgacaatgccacacttgtggaaaattttgactaaaaaatgatcaatttaggtgtgggtgtcgatggattatatctaatacaagaggtatacctgatccgtaatattgacagtcctgattgtcaaaaaaatatatgacatattattaatgtagtagaaccaacaaacgctaggttaagttagttaaatgtgtataccacaagtgtaacaaattaaagttttgcactcaatcaaacaacgcctaaggacactattggatcaagagtgatgtgggaatgcgcccccctgggtgtgaagaaaatagtcttccgctaatttgcgcgttgtttgcaatctggaaactgaagaccgggagtgggtccagcttaagtcaagggtatttagataaatactcaagattttgtatttaaaaataataggtagatagatatactatgtgatgcatgtgtaccaaaacaaaggttgtattcaatccaagaggttatattaaactcataatacgtatgtgatatatatatatatatatatatataggacactcatatggggctccatggtgcccaggcaccatggtatgaaatacacaaattcgcccaaatttttcaaaattttcaaattgtgagtatatatctagttataagtattcgattcatacctatacctagcaataaaacaactcaaatttatctttatttcataatccaatattacatacctaactaattatatgtttggatgttatatacctagaatcaaaatctaacatattacatgtttaaattcagttcaaacttgtttgaactagttagtaaagtagttaatgttaatacctaaacatttaaaaaaaattcatgctcatttgaattgagtatatactcaatttgaatcatggagcccgggcaccatggagcaccaaacaaatttaatatatatatatatatatatatatatgtatatgtatacatgttatattttttttgcagggatatatacatgttatattaggcttctgcctacaagtttattttaattaccccctcatattttgaataaacaattaaccttagaatcctaacccggtcctgctaaagaccgaaacgcttagatctatactatagctttggagacttggacagcgttcgtttgggtgagtttgagggagaaaacgtatcgttttccgcacgatggtacgtttttttaaaaaaaaatctataggaatgttgctttaaaaaatcatattaatctatttttaaaatttaaaattgttaatactcaattaatcatgagctaatagcttacctcgttttgcgtatcttcccaatctcctcgatttccttctcctcgaacacacctttggaagagatgagtcaaaatacatgtatacagtaagtccgtccgtacgtgttgaaaaacaagaaatggcctgttgggccatatgcctgaacgaaatactccaaacgtggcctgttccgctttttgcgcctgtcactgcgggcgaaatgcaaatatgtaccttcaaactgctggccacttgaattttactttccagttttatcactgctggccatagctgcatgttgctatagtggaggagtataatatcgttcacttgttgtggcgattggatcagcaaatcaaggagtaccaaccatccaaattaatcacgcgctcactcggggtcgtagctgttgctgtttcgtgttgagcaagagaatatccagactttaatattctcttgtttgtgaattgtgatatcacctgccagctgggtcttgtcaggtcttgagcaagctcggcatcatgaaacgccttgttgtttaaatgatcgatcgaacactgtctttgctaatgtacaattgtgtgtataggaaactcggcgagttcacatgcgagtgccaggatcactgcatcgctataactgaacacctgaaaatgcatagatccattgcatccgttgcctctactctactgagcggatgaaagttaaattggcgcacgtaaaaaaaaaagctattagcacataattaattaaattttaattattacaaacttgataaatgtatttatttgatattttaaagcaactttttatatagaaagttttcgcacaaaacgtaccgtttagcagtttgaaaaacgtgctaacgaaaatcgaggtaaaatctgtatgtgtgaaaaatgctagtggttgattggttagaattaatggtactgcttttgtttgcatatttttttcttgtctaatgatgaaatcgtttgctttgttcgtgagagaatttatatgtgctacatacccaatttggtgccgaatgctcattaacttgcctctacggctctacctgtgatgttccggtggccaaattatattttttaacgaatcgatatttagatggtgccaatttcatttaatagagtagaaaaaatatataagaaaaggaaaagaaagcccgaaaccaggtagcaatgctgcgaggtgttttgctaccccggacccaagtcttagcgaaccatattttgtcgcgtttgaacttaattacgtgtacacaatcttccacggcatttctctcaactttttcaccaggccgaccaaaagttgacagccagcgttttgcgccgatcatcgtatgagatctatcaacgcgatgaatatgtagtcctgcgagaggcttcttctcttgataccttcaatcatttttgttcttttgtttttgagtttcagttattgcaacttaaacaataaatgagttaacccacaaaattgctaatttgccatgtagatctctgcctgagggcgaggaagagaagaatatattcttaccttatcattgactctagacaaacgatgaaggactctaggtacaatatatgcaatgaattttttttaagcgaacgattgcaggagctctgctggaatttttagtaagtgagaaagttcaggttaaaaaaaggttacagggatccggagtaaaaaacaccccttttagaacaactggagaataccgcaaggtaagctaagaaaaactatcgacgaactaggcggttcaaaaatgaaatgttgctctgccacgatgaaggactctagatacaatatacgatgaaaaaatatatatgatgaaaagatggtacaccgaagtaaatttggaaatgatggctatatttgtggaatggttccttgtgtaatgtggatgacttaggaatcgagtcaagctcaatatagttgaacatgccctaaggaataggacatccactaaaaacaaaaaaagtatgttgagaatgacagcatccactgaaagaatgaataaagcgtagagagaaaatgacaggaaactaaatggttggaaaattgaaaagcatgacgtaaatgcatgtacgtacattactcacgtcagcactaggcagctctaaagaacagattaacggggtcacgtgctgtacataccattcaacgatcaactctaaaataagagcaaatcaaatgaactaaaaaaacatttagcaccatcttttcacttatgattatgtatgtaaaccaaaatttaaattttaaaacttagtttttttaaaaaacaagtgtgttttggttttatttgtgatggaaaattggtgagaaaattggaaaccatgtaatggtttttggttgaaaatttggtttggaatattggcgattatcggcgtgagtgctgcaatttaaatctctaagggtttgtttagattggtggattatcacgggatttttggaggaatactattcataggattgtttttcccttttaataccattcggatcacaaaaaccaatcataagaaggtcgcaggaaaaatttcctttacttttgcttccatgggagaaacatttgaaaatatccatccactctaatctcttttttcattttcttcgtgttggaacgaggcaatcaagcattaacaaatgcaaagaacagagaaagaagaatcagcgaagaacagagaaagaaaaggcagatctcacatgattggaaacatatcctatgcacacaagcttccgtatacactccatgcacaccaactagcagatgtcacagaaaattttagaaaaaattggacacatactcataatagtattacacatatctgcaaagtctcatattcaaattcattatattttagtcgtaacaataaagtgaaaaatctgacagtttttagggtaaaaatctgtcagaattttgtttttttgttacggctaaaatataataaatttgaagataagatttcacacgttggtgtaatactattggaagtatgcgtccaattttatctagaattttatgtgacatttgctagttggtttgcacggagtgtgcacggaaagcttttgtgcataggatatgtttcccatatgatttctttaaataagttccgtacaggaagcaaagcccatacgacaaagaatcccaagagcaaacaagagcaaagaggtcacgcgcagaggtcaccggcaacggtatcgaggtcagcttccagtgtggagctaatgcggcgcgtggcgtgcggaggtccccggtgacggattgaggttggcttcggtcatggataccgcgcgtgaaagttgccggcgacggatcgaggctggcttctggtgtgtagtggatgccgtgcgcggaggttgacagcgacagatcgaggccggcttctagcatggagactggagtggatgccacgtgcggaggtcgatgatgacggggatcgagagcagcaggccaacatccagcgtggagcagcaggctagcatgaggtaccggtatctcgaggtactttttgttggactggagcaaaatctttttctcctatcttacgtttttcctatgctataatccgaacaagccctaaactagatttcaccacgatagcaagatctcaggccctcctgagaaaggatccctgcccatagctaggtatccacaattttctatctaatctgaaataagaacacgaagtagaaaaaaagtgcacttataattaaatgatgtggatcaatgtgtaccatgagtgggcaagcgtacatccctaacgaggtgtgattgatgtttgtgtcaaacttgaggatgatattcctgtcgacgacgagtgctggccctctgatgaggccaccggcggcccatatgttggcacgggcatcttggttggtagcatcggtagtggtccattggattggagaactgccatggcaactctaatagatggacgagcgcatcggtctgggtgagcacaccagagcccaacaaccaagacacactccatgtctgtcgcgtcgtagtcaccgttgaggcgctcgtcggccgctttgagaacggctccctggccgtaaaggtcccatacccattcgactagtcggaagaggccattattctggtcatccagtaggttcattggtctccttccacatgccacttccagaagaacaatgccaaaactgtacacatcagattcagcacttgctttgcctgtgatcacacattcagggtcgacatagcccggtgtacctgaggggtgggtcatcgtttgtgctccaatagcatggtcaatgagccttgcgaggccaaagtcacctagctttgtattgaaggattcatccaacatgacgttgcttggcttgatgtcacggtgcacaacgcattgctcccactcctcatggaggtagagcagtgcattcccaagcccaagaacaatgttgatcctatgacaatatccaaggtagttgatcagttgaatttcaattgacatttgttgattgcacattgcaagaaataaaaaaaataaaatctgaaatattaatgagagttaattaattacctcattggccatgtgaggaaggtaccattgccatggagatggacatcaaggctgcggttgggaacgagctcgtacacgaggaggagctcattgcgaccgtggcaccaaccgatgagctgcacgagattgcggtggcgcagccgacttatcaccttgatctccgacttgtactccttcctcccttgcttggaggagtctttggcgaacctttttatggcaacgtctatgccgagctctctcagattgccacggtacaccgcgccaaaaccgccttgcccaagcttctcctccgccgcaaagctctttgtcgcgttgacaagtatgtggtatgggaaccgcctcggccccgtccccatctcgatctccacgatgggatcgccttccgagtcgtcctcctcttcctccctcatcttctttctctgacgtcgtcgtacgaggattgctaccatggtgaagaggagcacgatgaacagaattgcaccgacggtggctcccgctacaactccgccacgcgaatgttgtcctgtcggctgcttctgctccaacgtcaagttgaagtaccaagaacgcagctgatgctgctcaaaggatgaacccgtcgccgccgagaagccaacggcgaccttctccggcaaggcgctcttgagatcaatcttggagctgaggttgtaaggcgtcgttgagccatttgcccatagcttcaccgacatgatgctcgaattgctgttgtagtcgacgatggcggtcatgttgccgatgaggatgaagctaggcagggattcggtcttcactgaccggagggcgttgacgtcgatgccgatgtggtcgtaggtggcgtcggggtctaggaaggagttgttgtaggtgtcgaactcgacggcgacgaaccggtcgccggcggtggcgttgtcgaaggtctggctagtgaggccgagggcgccgccgtagcccatgtacggcatcctcgacgggtagctgacgaggaagaaggtctgttgcagttattcctggtgtggcccgagctgatccggacgacgcgggaatgcaacggtgtgtaacggtgtggcgagatgcccgggcaaaggagatcggtggcgactagttcgtgcagcgcaggaagcgcgatgaagcagagtgcatgacggggagtaacctcgtcgtttccacatttgtaggatcaaagttgttagcctataaatagttggtggtaacagaatttgtacgcgcgcattcagttttcatttcagttcgaaataaacaccgaaagttgcccaaatactctcccaagttattttgttcttgttctctgcattctctgaattctctgtctccctgaaagtttcttcagtctgctgtgccggatagctacaggacgcccacaaggtgttcgattggtgttcttcgccaacaagtggtatcagagcactcaggttgagggctgatctgacaccatggcgttggttccggcgggagccgcagcggatccggcgagggggagctcagggagtgcgttctcctacccacaactcacggcgacgaattacaccagctggtgcattcgcgttcaggcaatgatggaggaccagggcgtgtgggacgccatcgagccggcggccggggtggccgtcgacccaagaagggacaagaagtcgaagtcccatctgctgcagtccctcccggaggacttgctgatgcaggtggcaaagaagagatcggcaaaggaagtgtgggattgcttgaagacaaggttcgtgggcgcggaccgcgttcgcgaagcgcgcctgcagacgttgaagggtgaatttggtgccatggtgatggagccgggggaaactctggatcagtacgcgggccgcatcaccgcgatgagcgtgcgtcactcggtgttgggctcgacactgagtgattccgcgatagtgaagaagctgttcgacacggtgccagagaaattcatcagcctcgtcgcaggtattgagcagttttatgagattgataatatgccatttgaggaggcggtgggtcgtctcaaggcctacgaagaacgagttcgcaagaagaaggcggccgctggtggtgtcaccgccgacggtcaagtacttctcactcaggcggagtgggaggcgcgtttcaggaaggacggcagcgagtcgtcttcgccgcagaaaaacaaacctcccagcgacaggggaaaccgtgcccagggcggacgcggtcgcggcagagggcacggtggaggtggtggacgcggcagcgcgccgcggaacagtggcgctggtggctctggcggcggtggccgtgacaagagccacatcaagtgctacaactgcgaagaattcggccactactccacccagtgccctcatcccaagaagaagaaggtggaggcccatctcgcgcaaaccgacgacgcaaaccctgcattgttactggcggtgaccgaagacgagccggcgagcgggctggtcgtacacgaggagcgtgtgtggccgcagctgctgttggctgacagcggagcagccaccggggacatctggttcctggacaatggggcaagcaaccacatgacgggtgatcgtgctaagttcagagatctagacgtatcaatcaccgggagcgtcaagttcggggacgcctcaactgtgaaaattcaggggaaagggtctatcctgttctcctgcaagaatggggatcaatggctgctgcaggatgttttttatatccctagtctgtgttgcaacatggtgagcttgggccagctcacagaaacggggcacagagtggtgatggatgaagatgtgctcgaggtgttcgacaaaagtcccctgcggctggttatgcgggtgaggcgcacccctaatcggctgtaccggatcgagctgaagctagccactccggtgtgcctgctgacaaggatggatgagccagcatggctctggcatgcacggcttgggcatgtcaatttccaggcgatgaagctgttggctgacaagggcatggctggtggcatcccggcgatcacacatccaaaccagctctgtcaggcatgtctggttgcaaagcagataaggcagccgtttcccgcaacggcgaacttcagggcggaggagccgctcgagttgctccacattgatttatgtggaccgatcaccccgacaactatggccggtaatcgttactttatgctaattgttgatgatttctcacggtggatgtggatgttcgtgatcaaaacgaaggaccaggcactagaggctttcaccaagttcaagccgctggccgagaacacggccgggcggcgcatcaagacgctgagatcggatcgcggtggcgaattcctgtcgggcgaattcgcgcagttgtgcgagcaggcgggcatccagcggcatctgacggcgccatactcaccccagcaaaacggggtggtggaacgccgaaatcgttcggtaatggcgatggcacgatctctgatgaaagggatgtcagtgccgggcaggttttggggggaggcggtgcgccatgcggtgtatctcctcaaccggctaccgacgaaggcgatgggcgatcggaccccgttcgaggcatggacggggcgcaagccgcagctgggacacctgcgggtgtttgggtgcatagcacacgccaagatcacgacgcccaaccagaagaaacttgatgaccggagcgcgccgtatgtgtatctcggcgtggaagaaggcagcaaggcgcaccgcctgttcgacccgcgttgtgggcgtatccatgtaagtcgtgatgtcatttttgaagaaaatgtaccttggcaatggagtgtagtcgcaggggagcaaaactctaccgagttcacggtggaggaggatggagttgatgcaccgccggcaggagcgccggcctacccagtaccgcggtaccgggcgccatccccggcagtcccgcaatcgcctccggcaagcccggtaggggcgtcatcgtcattgccgacttcgccccagtcatcaccgagctctacaccgccttcaacacctgctaccggctctgccgggccggtggcgtcaccaggttccggcggcgaccttagaagcgatgagggtcccgtccggttcaggagtcttgaagatatcatgcgggaggcaccccgcgtggacctggtggaggatgaacacgatggggacgcgctgcttgcagagatggaggagccatcgagctaccgcgaggcagctggccagccggcatgggagaacgccatggcacaggagctgcaggcgattgagaagaattcaacatgggctctcactgcattgccggcaggacacaaacccattggcctcaagtgggtgtacaagctgaaaaagaacactgccggcgaagtaatcaagcacaaggctcgtttggttgcaaagggctatgttcagcgtcaaggggtggattttgaagaggtgttcgcgccagtggcgcggcttgacacagttcgtgtcatcctggctatcgcagctgatcggcggtgggaagtgcaccacctcgacgtcaaatcggcgttcttgaatggcgatcttgaagaagaagtgtacgtagcccagccagagggttttgtgaaacgaggagaagaacacttggtgctcaggctgagcaaggcgctctatggattgcgccaggccccgcgggcgtggaacacgcgtctcgacaagtgcttgaaagaactcggttttgcacggtgcacgcaggagcaggccgtgtatactagaggaaaggggcaagctggtgtaatcgttggtgtgtatgttgatgacttgattgtcacaggagaaaatccacatgagatagccatgttcaagcagcagatgatgggggaatttgagatgagtgatctcggtcttctctcttactatctggggatagaagtaattcagggggagaatgggattgctatcaagcaagctgcgtatgcgaagaagattctgtctcagtttggtatgcagggatgtaatcccacctcaatccccatggagccacggtcgctgctgcacaaggatgctgatggaaatccaattgatgcgaccgagtaccggcgtgtcatcgggtgcctgcgatacttgttacacaccaggccggatctgtcctacgccgttggcgtggcgagcaggttcatggagcggccgacaacgatgcatctcaaggcggtcaagatgatactcagatatctaaaggggacgctggactctggtctggtgtttgcaagcggcagtggctcgttggacatcacgggtttcactgacagtgacttggcaggtgacatggatgaccgtcggagcaccggcggcatggcgttctatgtgaacagcagcttggtgtcttggtgttctcaaaagcagaagacagtggcgctctcgtcttgcgaggcagagttcatggcggccactgcagcagcatgtcacgcgctctggcttagggcgttgctgagcgagatgatgggtactgaagcaaagcgggtgaaactttttgttgacaacaagtcggcgatcgccttgatgaagaatcctgtgttccacgggaggagcaagcatattgatacccgctaccatttcattcgtgaatgtgttgagagtgggcagattctgattgagttcgttcgttctgaggagcagcgagcagatgcaatgacaaagggactgccggcggcgaagctggcgactgcacggcacctgttgggtgtgcgtgatctcaggccacgccaagactaagggggagtatgttgcagttattcctggtgtggcccgagctgatccggacgacgcgggaatgcaacggtgtgtaacggtgtggcgagatgcccgggcaaaggagatcggtggcgactagttcttgcagcgcaggaagcgcgatgaagcagagtgcatgacggggagtaacctcgtcgtttccacatttgtaggatcaaagttgttagcctataaatagttggtggtaacagaatttgtacgcgcgcattcagttttcatttcagttcgaaataaacaccgaaagttgcccaaatactctcccaagttattttgttcttgttctctgcattctctgaattctctgtctccctgaaagtttcttcagtctgctgtgccggatagctacaggacgcccacaaggtgttcgattggtgttcttcgccaacaaggtcatcccgtcgcccttgttgctcttgtttttcggggtgatgttgaaggagaagcgcgtggtgaagctggcaacctcgccggtggcggcgtcccagagctgcaccggcggcgtgtacaccatccggcccatggtgccgccgctcgacaggttgttccctttgcctttggtgagctcgatccattcggcggcggcgccggcgagcgccgcgctgccctggagggtgatgttcttgctcgcgttgctgaagctggagtagttgaaagatacagtagtggtagcgacgacgctaggcatgacgagcaagcaggctagagcagccatgaacggttttgtcatgaggacgccggcggccatggccggtctttgagcggaatcagcggccggacaatactgccaatgccaaaaacggaaaactactagtagtactcaaatcagcaggtggccagtcgccagtcgccactcagagagaccagtcgagatcttaaggactctgctaatttaacaagttggtggttggcaaatcaacactaggctccatgagaccatgaccctgacagctctggctcctcggaaggtgctgaaatgtatcatattttgtctattttgctaatagatgacgaagttaagcgtaagttccgtttcttgttggtatcttccctttttcttcaaatacattttcaagaatgataaaatcctttttatatatatacatcaagctggtttatatatatatatatatataaaaggtg

SEQ ID NO: 6363 - DNA, 7083 bp, Oryza sativa
tttgtgggtgtgtcttgttgagtacggtggttgtactcagtcttgctcaattttccccaagcccagatgaggagttccttgaagatgaaggctttggtgtctagctcgtgcctgccgtcaagcgcctgtggtcgtcgccctagtcttccgctgtttttcgttgtctttgtgtgctgggccgttgttgcccgtgtaataattatatttacgcttccgcttgttaaactctgaattgtatcaacttttggtgtaccttgcctcctgggacaaggaataatacacgcacgtcaggaacgcctgttgggtgatttccggtcgtgacaattcaccctggtagtactaagatgtaccaggatcttaaggaaagattttggtgggcaagtatgaagcgtgaaatcgcagaatacgtagcagtatgtgatgtttgtcagcgagtcaaggcagaacatcagaaacccgccggattgttgcaacctttgaagattcctgaatggaaatgggaagaaattggtatggattttattactggtttacccagaacgtcatcaggccatgactctatttgggtaatagttgacagacttaccaaagtggctcatttcattccggtaaagacaacttattccggaagtcgcttagcggaattgtatatggcaaggattgtgtgtttgcatggcgtccctaagaagatagtgtctgatcgaggcagtcagtttacttcaaatttttggaagaaacttcaggaagagatgggttctaagctgaactttagtactgcttatcatccgcagacagacggacaaaccgaaagggtgaatcaaattttggaagacatgttgagagcttgtgctctagatttcggtggaagttgggataagaatctaccttatgcagaattttcatacaacaacagttatcaagctagtcttcagatggctccttacgaagcactgtatggtcggaagtgccgcactccgcttttgtgggatcaaacgggagaacgtcaggttttcggaacggatatcctaagggaagcagaagaaaaggtaaagatcattcaagaaagattgcgtgtggctcagtctcgtcataagagttatgccgacaatcgccgcagagatttgagttttgaagagggagattatgtgtatcttcgtgtcacgcctttacgaggagttcatcgttttcataccaagggaaaattggcaccgcgttttgtgggaccttataagattgtcagtagaagaggagaggttgcttatcagttggagttacctcaatctttggcaggagtccataatgtgttccatgtgtcgcaattgaaaaagtgtttaagggtacctaccgaagaagctaatattgagcggatagaagtccaagaggatttgacttatgttgagaaaccaatccgtatactggaaacaaatgagagaagaaccaggaatcgagttatccgtttctgcaaagttcaatggagtaatcactcggaagaagaatcaacttgggaacgagaagatgaattgaagtcagctcatccgcacctgtttgccagttcttccgaatctcgaggacgagattctgtttaaggggggtaggtttgtcacaccctgaaaattcaaaatatataaattgttgtttaattggaatttttagaaataattttaaaagtcttgaaaagaaaatctaagtttaattaataaattccaatataaaattgggccagataaaatttcattaaatactttgcttaattctataattcctagatttttctgggatttatttgagctaagaaagtatttgtaataaatggaattgcatttaagaaataatttaaattgaaaaggttttaaaaagtcttcttttggctttgggccgaaagtcggcccaaaacctctcttctctctctcctcggcccagccggcccagtcagccgcgcgcgcgcggcctcgctgtcgctgacaggtgggtcccgcctgtcggagtcgtcgtctaccttcggccgtcgccgccgaaaccctagttcgcgccgccgccgtttcctttccaaatccggccgcctctttccttctccggccgaatcaatagaggggaaatgatctccgggatctcctctacattttctcctttggaatctttggttaaatcgctttggaaagctttggaatcgagttcgattcggatcggttttccctctctccaagccgaaggtttccttcgccgttgccgtcgccgtgggccttcgccgtcgcctccgagcccctttaaaaggacccccggtgtctcctctacccgtcgcagccctcgccttcgcctctcgtcgccggaagagccttagcgccgtgtgccctagcttcgccgtcgccgccgccgcttcagccatgctccgccgtcgctccagctgtcgccgccgctcgggaagaccgccgtcgtcatcgccaagtcgccgccgtcctcgtccgccccttcgcagccgttggaacccgccggagcttcgtcgccgtcgacaacccgaaggtagccgccgcttccttctcgtcgccgtcgccgtccgttgcttctccgccgtcgttttggtcgtcggtgtgttcgccgtgtcgtccgcttcccgtcggtgtcctccgttcgtgccgtagcgccgccgttcgccggtgagcgtgcgccgcccgagccgtccgctccgccgagccgccgccgccgtcggtgacgtcatcgctgacgccatcggggtcgtccgccgtgaaccgccgtggactcgatcaatctcggccgtccatcttggatcggttagatctcggccgtccgttcgcgtgaaccgccgcccgtgcgccggtccaccgaaaccctagccgctgacgcaataatccttcttttccttttcaaaaataattcattattgcgtcataattcaatttaaaccgatttaagtgttttaatccgatttaatctttaaaaattcataactaattcatcttagctccgatttagttggttcaagtctctaaatttttctaaaattgagatttacacattaaaaatatccacatgtactgttcatgcttgtttatgtgctgttttggtgattttgcttctttttgcttagattccgtcgtttctggagagtccgttttcgcggaagaagagtttgaagagttccaaggccagcaaggcaagtcacacagatcccaaacaaccctttgagcatgttgatcctatttaaagctattgtttctattcaactattgcatctattttcgaatgtcattgggtggaattgacctattctttgttatggccctttcgtacttgattaccttattccttgataccttgggttatattaatttgactagttgagctttatttatattggttcaactagatattagatataattgcttagccctgcttagaaacattagtacatttatgggataactaatgactcactattatttcatgatggcttattgatagttcacgatggtcaatcgtgattagttaattaattaatgtgccaactaaaacctgataatggtgggttgtgggcacatggttttgatggtcgtgctcatgacaattaaggaccggttcacgagtttcggttgtgaaacatttatcgtgccaaccacaagccagcatgggcaacggctttatcttttgtatagcatggttcattgcggggcaccagactgagaagtggcggagataagcccacgggggtcgctggggagtccatgccttgtttataagggggtgattatgatccaggaaggtgcgctgcagtggattgtgttatgcgaggggtattgtcacaactcctttccgagataccgtggtggtattgaggcacatggtgacatgatgtggggttgtgtcttgtgggtacagtggtacacctctggccagagtaaaactattcgaatagccgtgcccgcggttatgggcgggtctaacaatgtctttcgtgattagtctcacacctctcatcattgtaaaagatgcttaaactggtaataatttgattagctcctggtttggaatgggacattcctggtttggagatagaactgtgcagccggggtggttgttcagaatggttgggcctatacaacagggtatgttgtatagcgttgtattaatattgtttaattattacttaactgttttgttaaattctcaaatgtttgctaaatgctgcttttgcaaatgaaaccctattatgccatcctttgttatcctgtgcacttgcatatttgctgcgtggcttgctgagtatgtcatatactcaccttgcaatcattcatcagaggaagagttctacaatgaggctgatggtgtggaggattaggtgtagccttggtcaagctgcctgtggagtggagccgtctgcgccgtttatttattttccgctgcttagaactttattgattgagaggaactatctacctctgtaatgacattttattcgcttattaattagagtaatatttgtactctattatcaatttgttattgtgtgcctcggctgattcctggacgagggttcacacacatgtaagcgtttggaattttggatagaaattgcgtgacactagatccgcccaccaaaaagaacgccgccgccacttctgctggatctgcccacgggagcaccgatgtcaccgccgctgccgcaggacaagcttgggcgtggagggtgaggaggaggtggtagagaatcgcccgccggatccgcctgccggaaacaccgccaccgccaccgtcaccggatccgccaatagtagccgccgactccaccgccactcccggatccggcccgcgggagcagctgaagccatcgctgccacctcctctgctaccggcaagggagagacgagagggagagagagggaccggtgggagaagagacgggggcggcggcgcggcgctctctctaactctcggctgttggcaaaggaggagagacggggattcgggagacggagaaagcgaccagagagaactgagaagcggaggtggaggatttcagagaaggagataaggttcgataggtgggcgggtccataccaattttttttctttaccgcgctccaacatgtatagggtgcaggggcggacacactaacgttacccatatttttaaaatgtagctacacaatgtagcacaatgtcgatgattctcaattggttagactgaaacatttgaccaatagttcatgagttcgattccatcgatctcttcgttttttccattttatccaattcctttcctaacctgatattttgctggttatcctctactgttcttttcccttttctctctaattttatccttttcctttaaaataaaaatgattattgcaagaacatacatgttatcctctactgttcttttcccttttctctccaattttatccttctcctttcctaacctgatattttgctggttatcctctactgttcttttcacttttctctccaattatatccttttcctttaaaataaaaatgattattgcaagaacatacatgtagaatagaatacgaggttaactaaaattcagaaaaaataaaataagctccaaaaaatagaaaaataaaaataagagttcacgtagaaataaaattttcaaataaaaaaggaatgaaaaaatacaaaattgtaaaacaatagtccattaaaaaaatacaataatagcaaatgataataaagagaagaggaacaacagacctataaagcaatagtgtggtgacggttaatgggacatctgatgaaaactattaacaaaaccgaaaagatgattaggttcgatttttagaatcccaacgatgattaagaagaggaactacgggcaagtcgttaagcaacactgtaatggcggttagtgggctagaaagtaaaaaataactaaaattcgaaattaaaatatgtaatattgaaagaaaagtccatgtaagaacatttttttcttttttcattgtcttttgctgtttgcatattggcctttttttcattgttattcacaggttgaatgaacgtcacaaattcacagatcgaatgaacatactcaaattcacatattgaacatcacatatcaaatggacaccgcaaattcacaaatacatctaaaaaatgttcatctaactatttttctattttcggaatttattttatttgttattcaaaattttaattgatctcgtcatgtgttttaaatggtctcttcttttaatagatttaattttttattatgaatttttaatttgtattcctaactaaactcttatttttctttttaaaatttcatattttattttatttttatttagaattttaattaatctcgttttgtgttctatatggattattcttttcatattccttatttatttttttcaattttagttgtttcaaaattatatcctacttgaactctcttttttatttttctaatttcagattttattttatttttagtacaaattttaattaatcacaatgtgtttttatatggacttttctttcaatattacttattttaaattcaaatttcagttatttttacattctagcccactaactgccattaccgtgttgcttaacgacttgcccgttgttcctccccttaatcgtcgttgggattctaaaaattgaacctaatcatcttttcggttttgttaatagttttcaccagatgtcccgttaaccgtcaccaccctattgctttataggtctgttgttcctcttctctttattgtcatttgctattattgtattttttaatggactgttcttttaaaattttgtatttttttcattccttttttttgttatttgaaaattttatttctatctgaactcttatttttatttttttattctttggaacttattttattttttctgaattttagttaattaacctcatattctattctacatctactgttctctcaataatcatttttattttaaatttctgttatttctaaattgtattcttactctaactctcatttctatttatctactttcagaatttattttaatttttattccaaatttcaattaatctcat

SEQ ID NO: 6364 - DNA, 2049 bp, Oryza sativa
gagctcccgcggcagcagcccgggggcgccgccgcgaagccgctccaccacgcgcaggcgctgatcgagctgctctgcccgccgctcacgctgcaggagatcctcgcgttcgtcgccacgggcccgcactgcggcgtcgtggacggcggcggcggcggcggggcgggcgcgctccttctccgcgtgagctcgccggggccggtggggagcgcgttcgcgctccgcctcgccgcgcgcgtcacggacagctccgtggtgaccgtgtccgtgggcggcgtcccgcgcctcgcgttcgggaccacgcaggcgtcgctcctctccgaggtgccgctcggggtgaccgcgtcgctctccgacgagggccacggcggcgggcgcgccgtcgagggcggggtggtgatcgaggagcggctgctcgagtcgctgctcgccatgaaccacgccgacggcgcgcacaccgacaaccccgtgccgcggaccgtgtccaacctcctcgtgcacgtcctgggaacgcacgtagaccacgtccacgacatcgtcacgcgcctcgagatggagctcgacagcatcgagctgcatctcgacaagggtaggtggaggttgctttcttgactagtaatcgcatataaacataaatcaaattattagggttctaagaacatctccattcgttagacaaagttggtgccctttttttcccttttctggtgatgttgttaggtaggacgaactagcttcttcgttacgtctgttgttcatgattatgcacgagagaaatttattgtgctttgctttgttctatgggctcattggattacactaaactggaagtctaaaaattgggaatttgtcgaaaattatcgattctgttgtgattgtccatccgcattggggcggcaacttgatgaaaaactcctatgattggaaggaggttgctgatgctattgaattgattcttgattgttactgttccatggagaagttccaattccatattcgtgcttaaattgattctgaagcggtgtatttccttttagaggtgatttcgggtgtgtttagttcccaccaaaattggaagtttggttgaaattggaacgatgtgacggaaaagttggaagtttgtatgtgtaggaaagttttgatgtgatggaaaagatggaagtttgaagaaaaactttggaactaaacccagccaataaattataaatttggggtgaagtaaggtcagagaagaaggaaaggtcatcaatttatagtttgttatgtatggtggaatgaaatttctgaatgtcatgttggcagcaaccgtatttcctgaaatgccatgattatattgctagctgtgattccagatgggattcatttcacatgatcagtatgtgcaacagaatattttctgagatggatttctcacgtagtctatggatatctgttctacttctacataggttaatgtcaatggaagtcaatgtgaagtctagtttatttactactagccaaacttatgctcaaatttgttatagcattctgcagatgttattctttctcttaatgggctttgaaggtatttatgatatttctgtgaatcttgcttgcaggtggtcactttatgaggaaacttttgttggatggaaggagattccccaaaatgcatcttgatctacagcgcctgcttcaggtattttctgagatttatctcaaattgctaaaatggagttcaatgtatgagtatgttattgttcactggatcgggaacgcataatagaagtcatgggctttaatgatttcttgcctaggttgtttctcatggtgaccaagtattcccccgtgtaaaggaaaaatgtgcgagcaagagttggtttgcgagtgaagatattgttgctcttgaagatctgataggccgtcttaggaggctgaaggaaaatcttggatttataacgaatagggtgactacacttcaagctagtctagatagctggcaatctgagcagataaacaaaagcttgtactatctttcatttttgtccataatattccttcctctatcca

SEQ ID NO: 6365 - DNA, 15681 bp, Oryza sativa
caaatccgcgcgtttgaacgtgagagagagaggggaaaatggggggaaagggagagggaatcacggggaataattcccccctattgattgcacgcggggaggacgggggcggcgggattcgcggcggcggcgctagggcgcgggcgaggcggcgggagcggcgggaggaaggggatgacgggtgggccccacccgtcagcgagggtggcgggcgggcccgcccgtcagtggcgcgcgcgcggggagaggccggatgggccgcggggagaggagagggagggggaaggggatgggccgagccggcccaagagggagagggagggaaaggggacttttcagagtttttctttttataaaatcattttaactttgtttatttcttaataattattatttgtgctctgaaaattccactaaaatttatttacgcattttaggcttttaggaaatatacaaaaatcctctaagccttatttgacttttaactttgcacattttaattgttggaggctttcacacggattttaattattctaggcaccatttagaggatatattttagggtcgttttgggacgtgacagtgtggagcaagccaagaaatgcaaaagctgccagcggcatggccgaagccagacagcaccccagtacgagctgtagcctatcgcagtagtctggccttacgccagatgggggttggacatcattggccctttcccggtggcacgaaatgggtacaagtttgcaattgtagcaattgaatacttctctcgttggatcgaagccgaatcgcttggtgcgatcacttcggcagctgtataaaaatttgtgtggaagaacatcgtttgccatttcggagtgccgaaagaattcatcactgacaatggcaagcagtttgattctgacaagtttagagagatgtgcgaaggcccagacctgcaaatcaagttcgcttctgtcgcacacccacaatcgaacggggcagtcgaatgagcaaatggcaagatccttgaggcgctcaagaagaggcttgaaggggcggtgaagggcaaatggccggacgaaatgttatctgttctttgggcccttcggacgacccccacaaggccaaccaagtttagcctgttcatgctcctttatggtgacgaagcaatgaccccaacagagttagaggctaactcaccaagggtaatgttttctgaaggagaagatgggcgcgaggtgttgctcgaactcctcgaaagggtgagagtcgaagcactagaacacatgcgcaaatatgccaagagcactttggcaccttacaacaaaaaggttcaaccgatagagctgctgcctggctaaggaagaaggcgaacccaatggcggttggaaagcttgaatcgaagtgggaagggccatacctcatcaagaacaggtccaggacgggctcttttcgcttggcgacgctggaaggcgaagagttcgaccactcctggaacgctgcttctcttaagcgtttctatgtctagaaggggtggcaccccattcgccaacttgtaaaaatgtacatactattatgtaggcccttcggcacaaaaatacaaaaaaagaggaaaataaaaaaaggaaaaaaactggatgtagggctattatccatcctggaggcccgaaccagtatataatccatgtgtctttcacctttttacttgtgtaaatgataattcgtggaaaaaccctaaggcaaacacctgataagcgaaagcgccaggggggcgaaatgaatcgaccgaagcatcgctcgctgaacattgaaaccgcaacatcttgtttcgggaaataaataaccgaacacagtcatattcgatctatgtgaaaaacacgagcatttctttagcgcggaatactacagatcgaaaacggaagtaggaagctgaaaagtcagcagacatatttcgctaatatacgcaagggggccgacatatttcgacctaacaaaatcatgaaaggtgactatgcgtacaatagcgaaaaggaaataaaacacatcttcattaacttcgaaaaaaaatataggccatacaacatggtacaggcgaaagaaggtaacgggctttacagcctaacttacaaaaaaattacatctccacccccaaaacaccctccacgccctaaggtatgatctggcgaacttggttcgtcatcactactaatattatacactaccctaagaggagaagggggcgagacataaactagaccgtaacggcgttgggcgatcgcttcctgacgatcagtcctccgatgatttcaccaaaagcgagccatgtcctcccgatgctccacatggacacggtcgtagtcgtccatggttcgcccggggtgtgcccgcatccagctggaaactttcaaaaccttgtaactattgccatttattatcatctcgcaacatgaatacttaaatttcagcaagccttcaactgtgatgaatttctcattctttttacgccaatctctgaaaggaagccgaacacacaatttctagtgaagaccctgctaaaacaacataaaaaggggcaaatgggaaagcacaaggttaagagagggcgaagctcataaagcgggcaaaaagtgtagcccctattcgtgtacaaaatgatgcaaccatacatatcaaagccctaaaaacgggataattggcgaaacttggttcatctattccatataaaaaaggccattttcggctacagtacaaaagggggaaacatcggccaaatttacatcgttcgccttccgtggccaacgcaaaaaatctaaaaatctaaagagcgggcggagggcctcacacctctgggtgattatggccgatgtctaccccagcgcccgcatctgccccacctccttcgcccgctgcctcctcgccttgatccgccgcctctgcctttgccaagtgctcgagcaggcgcgccttggcagtagatcagccgtccatttgccagaattgtttgcgccaagcacgaagtgcggccgaaagatcctgacaactgacttcccaatcccccttcaccaacttggggaactcggcgatatgctcgcacccattttgttgtagcaggcccatggtaaaggccgctaacacacgcgcgtagcaatcgccgtatgcagtggtgcaatcagagaccacaccactggcctattgagtccactccgagaagtcaaaggcagaagcatcttcgtcggggactcctcgcaccttcgcccacatgtcggtaagggcaaggcaaagcgtgcggcacacggtctttgcggacttagtggtcttcaccatctcccgcgcgaaccgttgtgcgtctctcttagcggctgcttctaccttgctgacctcctgacgaagagcctccatcttcggctcggtaaggttatagtaatcagtcaaggcggtggactaatctcgttcttttttaagctcagccttgaggcgctcgatctcggccttcgctcgctccccttctccagctcaacttggagctgcttattctcagtcttcgtctccttaagggtgttggctaggttttccatttctagccccttgcggcccagttcttcatccttagcccgaagacgacttttaaagctgtcaaggcgagccctcacggttcgctcggtcgaacaatgagctgcgggtatctaaaaaaaagggggggctaaaatgaagaaaattagcataagttgtggaaaagcaacatttaaagcgggcgaacgacatacccagacggctaagcttttgacagcggtacagccctcgttgaactcgttcaactcagtgaacaggctcggacttccagccggagaaacgagatgacttaccccctcgatgaagggggtaagatccacccgggtctcgaaatcccaagggacgaagcagggcgccgtgagcgaatactctgaagccgacgtctcaacggccgccttcttcccgttttggatggccagcggtgaagtaggtggactgtgcggagggctcccgaagagcctggcagcagccttcacaacccggtcagcagaacctgaagtaccagctgcagcgctccctcccgcttcgcccgtgtcggtcgcagcatcgggagcggtcgaaagatcttggctccacccagcggccgaagtagaggtctcatccgaagactcgtcatcactgaaaacacaggcgacatcgacgaaccccttttttttggaggttttcttaactggccctcccttcaccaccttgcccgccgcaatcgaaaccaatgcctttgccctatgcaaatccttccggcgaaggggggagctgttcgactccaccccagttacgacgtggtctgggcttggggttggggtgtagccgtgcgtctcggtgcggttgtcggcgggctcattcgcggccggttcgaccgcaactttcgcctcctcctcatcctccccctcctcttcatcgtactggtcatcgacagtgtcctcatcgtcggcatcagagtcagtggaggcaggggcctttcgcttctgaggggccgattttgcttgctcgcgtttgcgcttcttcgaggtcccttcatcaccatcggccttggagggcttctcccgagaggggagatcgccatcatgcacacgattcgctcggccagccgccttccgtgtaagcagctggctgtattctgtgatcgacacatcgccgaccatcttccgagcttcggtttcagcctgaacaagagttagcactgcaaaaatgaaacgtctcatcatactggccgcaaagcagggaaaaaagagcgaaatgcaactgcatgtgggaaagcaaaagcctacctttcgccccctttggcatgacgagcttcggtaggccatcgacctcctcgtcctggttcacctcgacttgccatgactaggagagaggaaagatccgaagcatgcaaaactcttccaccaggtcacggcagctaaggtggaggcagaccttgcgaagcagggcgaaatgggcttccatagctccatcagtggcaaccctgggtttcctgtttggcacgatcgccctgcaccgccatcggagagctttcgccgcgtcggacctggcctcgaaggggatggagtggtataatcacttcgacatccagtggcaatcccacttggacatagaagcgctgtaatgccctgatattcgtttgggattaaaaatcgtttaataatgcattttctagaaattaaataaaagttcaagcaaatttaatcaagtgaattattgggagaattaaaattttccctcaaaaatcattggccgagaatattttacaatattctttgcgccctaaaataccctccggattttttcgtgaatttttggagctcaagaaataattttaaagtcatgaagttcattaaaataatttaaataaaaagaaaacaaattaaaaacctcctctctccctttgggccgctcccggcccaatccccctttccctcccgcggcccgtgcccctctctcccttcctcggccggcctcccctctcctctcttgggccgttggcccgtttccccttctcctcgcgcaaagtctaaataaccccctgaatcccctccccctttcgccgacaggtgggcccgaagaccccacttgtcaggtccatccccttcctctcgccggccacaaccgccgccatggccatccgttgccgcccacgtcgccctcgatttcggcctctcccgctcgcaccctcgcgccataaccgagtgaaatcggtccccctccacgtcctccaccatctccacgactttcccccaaaaaaagggcgcctgtttgacctccccacgaactccacgtcaccgcccactccatcgcttcccgccggcgagcgctgcttcgcccggccacgtctctgctccatttcccccttccaccacgaaaaccccctcctcaccgtgccaccctagcgccgtcgtcgccctctaactccggcggtcgtgcgtcgacgttccgggcctccttaggcctcgggcccctcctcctcagctccgcaatctcaagggaaggcctggcatcccctcatcaaagctcttcgtcgccagcatccattccccgctgtgagaggtgagcttctcccctcgttgccggcttccggctgagttttcacgtcgcctcgcgcctcctcccttttccctaacccttccaccgcgctccccaggtcgccatcctccacctcgcgtccgcggtacgccgtcggaccgccaccgccgcccgttgccctcgccaccttggcgcatggtgagtgctccctcctcctacccttttccccctccgctgcctcccgtgtccggtgccgcgtcgcgccaccatcgtcagcggccgtctggctggcgagccagccagcctcccccctcccttgccgattgggggtgccgcccgtggaccgcccgtggtcctggtccacggcgcacccgaggccgcggtggacgcggtccaccgtgtgcctgccccttgacccgctgacgtgtggggcccgcctgtcggcgccggcctcttagatgacgtcagcgcttaatcttttcctttgagaaaataattaattattgcgcaataattcgataataattctagaaattcatttaaatggctcaaaacttctaaaattcatatctaattcatccgaactccgaattcggccattcaacttgcaattttcatctaaaattgagatctacatgtttgtttactttttatgtactgtttccatagtttttattagagtttttcctcgttttgcgtgccagcgtgtagaatccgtcgtttcggaagtccacagtcacaaggaaaagagtttggaagattgtttgaagaagcaaggcaagtaacacattccccttgagcatgttgatcccaatttataaatgttttgccgtttgcaaataaatatgcatgttttgctaattacatgggatcagggtttacctatctgcctgcttgtgccatgtttacttgatatctgttctttgtcaaccgtgggtgataattcgactagcttgtgttacttatgttaacctagctataactatattcttagccatgcttaattgtcactagctcagttgatgggataattatagttttagacctgttagtatcaagacgagctgcttgctcgagacatctggccatgtttcatggtcataattatccaactaaaatgcgactgaatggtgggctgtgggtgcatggttttgctagtcgcacccatggcaattaaggaccggttcacgggaaaccctggaagacttatagtgcttaccacaagcgagagtgggtaactgcttgatctaaagtataactcgaccctttcctaggcaccagtggcgagggtgggcatgatggagttgggtcggctggggtatccggttgtccagctgccggattcaccgcggcgcacgaggggactgcctacctccgggatagggggtgggggtgaaaccttagcgtggtgtggatggttaggggagggttatgcggagggtcttatcacaatcactcgacatggtgacgtatctgcgcggacgcggtgacatgccggtagattgtgtcttgtgggtacagttgtgcacctctggccagagtaaaactattcgaatagccgtgcccgcggttatgggcgattgaccagattcaccgtgattagtcttacacttaataaatcaacccaatgcactgtagttcatgtgggttggttgggcctgttcaacgtggtgtagtgttgatcagtggagatttaatattaccttaattattcaacagttttactgttttgctcaacaaaatgttttacaactgcctttatgcaaatagccacaaatcatccttgcgttccccttgcacgtctgcatcattggtgtggcttgctgagtacggtggttgtactcagccttgctattattcccccttttaagaagtgtatagcttctgagccgaagacgaagttagaagaccaaggctcagacaccagttgagttttgcctgtggagtggagctgaagccccgctagtatcgctttttccgctgctactgctttcttttcggtgtgaggactaagtgcctcttctataagtattttacgctttatttacatttggaactgtaaattacttgtcgttttgtgtaccctggctggtcctgtacagggatttaatacacaaaatagtctggaaatttgtgctaaatatctaggcgtgacaagcgttaaccggccagagatcggagcgctcgggacgaacattgaagtttgttaacagtgaaatttgttaatcgacaaagacgtcattggcttagaatcattatcggctgcagcatctgctcgggacgaacattgaagttctgttaatagtgaaatttggtaatcggcaaagacatcatcggctgcagcatctcggaatcagtcgatgagagttatcaagtcgccaatagtcgcattcctgctatattcggttaaggaaatcaatctactaaaggaagcttatctctaagtgaccgagtttaaagaggatgcggcatggcagtttatctattaattaggaatagtttgttagtttccttttatctttaggaaggtgtgtttagtgtccgataaggactttatgttttccttttacctttaggttagtttctttcttgtccgacaaggacttgtatcaacccatgggtataaatatgtacacccgggctctatgtaatctatcgtcacgatcaatacaattcggcgcatcgccaccttttatcttttctactttattttatcgtccggcgggacttgacacctgatgcggggctgcatcggtgttcgatctccggcgaaggggtaagtccaatgttccgtcgccccaggcaattgtatcgtttacgtcggcgtcgttcaaggctgcatcagtacattcgacctcttggattgctctagtttggatgatatatttgcctacctatttattatgtctctgttaatctagtcttagcatatcaatttagctctatcggctgtctctcgctttagggtttctgccggtatcggctaaatcgcgttgctagattagattagcctaggcatctaccaccctgaaaatcagtcaacggcttgattgtctagatattgtgtttcttttcatacctagtgctgcatcagttaagtttgatctactaagtcgtgcttagaaccataatctctagcctgcttcttgattgccaataagggtttcatcggggtttcagctggtgagttatttgaacgttgcatcggctcataaggattgcatatacatataagttggatttagccgatgacaataaaggtttcactgtttaatctaatcttgtggatttcatgacatcggaccaccagccgatgtgtgctttaactttcggatcaatacttgttctactatatcatattgttagccgattggtttctactggattatattgctatattacatcatcatcagccgattgcctttatatcattatctaaattggacatatagccgattgcttaaaccctatcgctatctgctggtatcagcatcgtctattatcggctatcggctagaactactctatcggcttgtcagccgatcggctgttttgatctactatttgcatatcttgtcagttgcaggatcaaactgactggcacgcccgcatctcatcatatttggacctgcactggagctaagcagatctcccaggccgatgtgttcgattttctcatcaacaagatcacgctcccgaaccctgttttcttcgtccctgctggggtgaccacagtctttgagtttacagtggcgtagaaaatggtgccgaaaagctcgacgctcgattcaaacccagtagttcggcacgcccagtcaatcatgctaccagcaacgattcaagccaaatacgtcaagtgtacttaggtgaagcctccatgacgaaggctacggaacgaagacgacgaaggccagaaagccgcgtgggtacctcgtaggaccagccatgtgaggcgaagggtgtagacttcaccttgacaagctcgataccgaggaggtccaataggtcatccggtgcacggcgaagggtatgggccgaaggaaggagtcttcgcctcgacgagctcggcatcaagcaagcccaatgggccatcctggcctcttaggcctattcaccaataagctaacattcgccagtcggctcatggaaggcccatgtatccaaattacactgtgtacccacataaatgtccctttcataagggcaaccgtgtaaattcccctgtaaaacctaaaccctaatgcgggaacctgtaataggattataaatagccccctagggccatgtaaagggggatcccaagaaaaattttaatcaattagtatatttactatttccaatactgttgagtaaccacgtccttcgacgtacgcggttgtcacttcgacaacattatttgtgtgccgagaagaaaatcaagccacaagaattaaattggtgggtagattaaaagaaaggatttgaatatttggatcaagaatcaaaggataggttaacaaataattccaataacatcggaattgcaagggtttggtttgaaggattttccttggaccacaatttataaaataaaaagggtttacaaactaaatttgaataaaatgaattttgccaaaagaaggttttaaattaaaaccaaatcaggaaatatcccaagataaattttaaaggagaaccacaaaagaaatacaagagattttatgcaagtcagtttttaggaggtctctctaattatattttcatatgtttagaaggttaataagaacgtaagaaccggcatgatgcataattagaaaatagctaatttttagtacgttacacccagccaacttggccgactcagtctccatccaaccgagccgctgcatgctgcgtgttgcacagaacgcactcatttctcaatttctcactccaatctccttcgtgaacaccggcacttacacgcacacctcgtgaagcccgttgtgaagatctctctcatacaatgtctatccaccgtgtgccatctgtatccaacttcgtcacccggtatccttgaccatctggacctcaactcttccctgagtctagtctcgatccccaccgttgaccgaagttgacctccaagaatcctgactctagtcaccttgtcacatggtatcccgaccgcactagacctcttctcctccctgagcatattcccggtcctcaccattgactaatgctgatctcaagtcacctgcacacaatcagacaaaacaactgttcctgggcacatatatcacaacctgacccacattaatcacacacactcacatcaacatccacacatcttttcattgattaaattattttacaaagccaattgttcatcacaaatattaattatgacaatgatttcacatttgggagatcaaccaatgaatagtataacaagatgatgaatagtgaaagaggaaaagggtgagcaagggtgatggatagagaatggataaataaggaatatttagaccaatggattttttttggggattttatacccttctggcttctggttgaaatacctagagtattcatagaaaaaacaaaatagagtcctaagaatccaataaatattccacactttgagtgatcgagagaatcaattgaggagcaaagcaaagttataattttgtgttacttaaaaaaaaccccaagttgttcttcatgaaaagttagggtgacttgagtcaagattgttccatttctcaattgctcaggatcgcatggtagacactacaaagacccacaagtacatgtatggctttgaataatttgtttgcataattattagtaaggaagtcataaccctattgtagagtccatagccttcactcgggacgagcaaaggttaagtgtgggggtgttgttgatggtccttaaatcataatatttgatcgtcaatacttacataaaataaaattaaattatggtatccaacttagtggtagggattattactaatcatttccactagtattggtgaaatatgtgtatgcaagtattttgagaagaaaaaacatccgtcaaatgacaaactgcacctccgcgcattcaggacacatttacacatattggaggccctataagtcaattaaacaactctaaatgggcccaaccatcatgccaatgggctgagggcctcaaaattagtgtccacgaggaaaaatgggctgaacagagccgtcccgggttcggccgaacccttttggtggccgttgatctccaaattttacatggacggccttgatcacattctaatggcggttccggggtagtttgctcatttcgcatacgctgtaaccgtcatacctgcctataaaagaaggagctcactttcatttccaacacacaactttgagctgaattataagaggctctattgtatcttttgtacattagaatagggtagagagtgaggggaaactctggagaagtgcccgaaagtttggtgctcatccgacttctacctcgacgagtgtagcttcctaggaggaattctagaagagtaccggagctatcggtacactctgttccgggtctggagaacttcttctataaagtaagcatttgtgttcctttcttatgttatttaattactttgcttaagtaagatagatttccatctttgtgggttcattgtttagtatttatactaagtgctctagtactaggactctggataaagaagcaagttcatgcgtaattattagagtagtaattaataacttaggcgtggtgtctaggttagagattacctttgtttgttgtgtatcccacggattcgtcagaggtagacggcaggtggtgacaatcctagtaatcctctgttgacggtcattatcgatcagtttcgactgtcaatattactaaaataggagagaactagtgatgcttgcaatgcataagtatgttagaataataatattccactagtattaggagaatcgacatcacctcagactataaatcaatcggacgatgtcgagaaccagacttgtgtgtgaataggccatgaactcagaactgacatgatgaattgggccaaaattcacaagtctgtggagtggagcaatagaggaggccaccagccgaaattgggctagattcggccgaaccaatcctggcgccgttggatccaggttttggaatagacgtccaagattgcatcccaatgacggttggagggcacttcggacaattccccttccacaaccgtcataactacctttatataaggagctcactctcttcacttcaacacacacctcaagcaagagctctctcattcctctcaagtttagtttagtagtatctagctggtggaatagaattagaataggaatcacgagtcctgaagtctcagaagagtttgggtatggctctagcagctttcctttcctcttttgtaagctttgtacttttattagaatactcttctatatagatttatggtattgaaatactttctgagtatatgagtacctactttacattatgttcatgttatactgaatatacggctagcttatctaggagatgctttggtgcgggtatagtgtttgttatgcaattactctatgtcatgacgatgatattagagtagtatctgatagtttagacttggtgtctagattacgggatatcatatttggggttatatattgcggatgagaggtgggccgctgatggtgacagctcagtatggtattcctccgcgcctatatataatcctaagttaatttcctgaggagcgtattcctccgtatttagccccggttgtatggtcatgacgggctatcgtaaggaactcggcagtcaggggtggcttctcgaagtaccaggagggcatcggatagagggtattagctagtataccagttaactagaatgtatgtatactatgtatattagaagtataggaatagatttccttcctcttttctttccacttagcctatatgatatattatgaggacgagtagttaatgcttgtgtgtcactctacccttagattatcttaacccctacttagaatatgattctcacaagtaatatataaattattagttgagttctctctacatgatcttctcacggaataaaataaatacgataccttgaaatactctcggtgaaatgctacaatggtatatccgtgcatttgcggatgaactctgtaaccataatataccagaagtatttctgcactattgctgggaattatatttctagtaatgtcgttaagaaataccaacaaaagacttatacttactgcacaaggtgatttagcaattaatggatgctatacttaccaagtattaaggaggtacttcctgactaatgagagagagatggtaggtgagaagaagctgaccacattgtgtgtatttatccctccatttaaatattctttcttttctcttttcttggtatccatggaatgtaatggaatgtagcatgcatgaccatttcagaaaacactatcattttgcaacgtcatttttttacatatctttgcaaaatgatattttcattgtgttacatttttggcatcaacaaacaatagtgaacatttttttctctgtagattataataaaattattttttggaatgtagcataaatatgtaaaataacaatcatgtgtttttatttaatatatgcctagtgatatatcattttttacaatgtcattttttggacaccaatattgcaaactgatacttctgaattgtcaacaaactgtagtccacattattttctctgtagattataacaagattatattttggaatgtagcatatatatgtaaaaataacagtcatgtgttttttatttcaatatatgccaagtcatatatcatttttacaatgtcatttttggacatcagttttgcgaaatgcatttttgaaattccattatttttgcaaatattgtattcgcatggtgagtggagaatcatcttgatatattatgtcccaataaaaccaaacttagattaaatttcaaaaaatacaaaacaagttgtttagattaactttaaaaaaatcaacatacctaatatctaatcgcgtggagtaatctgaatgttgccaatgaatctaactaagaaaagagtcagttcaccgctctccataggttacctagatacggggaaacggatacgtgatacgtggatatattatttttgaacaaataaggacacgtggatacgtctatatatataaaaaataaaaaaatacatattataaataagggcaaagttagtgtaaaagaatagaaaatcagcacaagttagagtatcgactgtggtggtaggttagtttgatgaagaaaatcaacagaacttaatggtcaaatagagctggaatttactttctgtcagaaaaaaaaaaactcacaggccaaagctgtctcctcgaacatctcacgaatatgcagtggcatgaattggagtgttcaatgcagcagtactactcatatcaacagtacctactatatgatgtgcctatatagcaacttcaccgggaggttcatctttgatggtcattactgacactatggaacacggttgcgaggtgcatatgaa

SEQ ID NO: 6366 - DNA, 2963 bp, Oryza sativa
tttcctaaacggagagctggaggaggagatctatatggatcaaccagacgggtatgtactagaaggtcaggagggaatggtgtgtaaactattgaaatccttgtatggcctcaagcaagcacctaagcaatggcatgagaagtttgacaccacgcttacatctgcaggctttgttgtgaacgaagctgacaaatgtgtatactatcgctatggtgggggagaaggggtgatcttgtgcttatatgtcgatgacatactgatctttgggaccagccttaatgtgattgaggaggtcaaagactatctgtccaagagttttgaaatgaaagatttgggagaggctgatgttattcttaacatcaaactacaaagaggagatgagggtgggattacacttgtgcaatcccactatgtggacaaggttttgagtcgctttggatatagtgactgcaagccagctcctactccttatgatcccagcgtgctattaaggaaaaaccgaagaatagcaagggatcagctgagatactctcaaatcattggttcattgatgtacttggctagcgcaacgaggcctgacatctcatttgctgtaagcaagctgagccggtttgtctcaaatccgggagatgatcattggcgggctctggaaagagtaatgcgctatctaaagggtactatgagctatggaattcactataccgggtatccaaaagtactagaagggtatagtgactcaaactggatatctgatgctgatgagataaaagccacaagtggatatgtgttcacacttggaggtggcgctgtttcctggaagtcttgcaagcagaccatcttaacgaggtcaacaatggaagcagaacttacagcactagatactgcgacagttgaggccgagtggcttcgtgaactcctgatggatttgccggtggttgaaaaaccagtgccagctatcctaatgaactgcgataatcaaatagtgattattaaagtgaacagttcaaaggacaacatgaagtcatctagacacatcaagagaagactgaaatctgtcagaaagcagaaaaactccggagtgatagcattggactatgtccaaacggctagaaatctggcagatcagtttaccaaggggctaccatgtaatgtgatagacagtgcatcgagggaaatgggcttgatacccacctaaggttgcataatagtggaaacctgtccattatgatcggagatcccgtgaatttggatggtgaaacaaactattgtgtgactgagagaagagacccttgaaaagggctcattttcatgatgtgcttctcttctttcctgcatggtaggatggcttatgtcttaatgtgatccgagtggcttttccaagcagagatgttgacctgcagaacatcttagaaggaacacacctatatgagttcgactgctagtcacagtctatgagatttgggtgatctctagatactcatgaaaggcctggagtatgacttataagctccaacccgagggaatactaatggttgcctagtatcagttatggaattgagtgaaacttaactgcacaagactgacaattcaaggcatagtccattgttcagttgtggtcaggtatagctccttttctaggtgaaagttcaacttaacagtcttcaccgaaacactggtatataaaagctgctatggaatagagagcattctcatgagccttgaaaatttggtggggattgttagatttaattgggtaattaatccatttaaatcaattaaatcaaataaattccaaggctcattatgctaggaattcatgtgaattcattcttctatgggatatcaatgggatgaagagttttgagaattaatccatttgattaaggaattggtaacttatatcaattagtcctaattgatggatggttgatggttgtgtagtggaggatggttcatggctagttgatgacatttagttgctctattcctcttcctattccattggtaacttacatcaattactcttaattgattgttggttgatggttgtgtagtgaaggatggttcatggctagttgatgacaattagttgctccattcctcttcctattccatgactcttactcttcatcttccattcctcttataaaatgggaatggatttgatctcccgcgagaaaaagaagacacactttcatccattttccaaagctgttgttgctacggtaatcccatcccgacgagtgtgtgcacacgcgttgggagagtaggcctccgaaaccacgcgttgctgcgacgtttgcacagacaggcgggcgatcatgtttttggggagcgcaaggcgcgactactcactgttcgtcaacatctacttcatcttcaccaacatgtcgaacactggagacaaggagaaggagactcccgtcaacaccaacggaggcaatactgcctcaaactccagcggaggaccattcttggggtataaccttattacattatttcaattagaagttttactgttaatgttcatcgcaatgtcaacattgtgtcattatgtgattgttgatgcttattcaacgttaagcatgctcatgttgattacattcaccactatcactggatcaaatcctattgtaaatatcatgtttattatcttgttattttggattaaaatatgccgaattatgaccaaatttccaacaagtccggcaactgcgagaagagcaacgacccggactgctgcgaggacggcaaggcgtacccgcagtaccggtgctcgccgccggtgacggcggccgccggcgccgtgctgacgctgaacagcttcgagaaggggaaggacggcggcgggccgtcggagtgctgtcgacggggtggttcgccggcatggcgcggtgcgggcaccgggtcatgatcacggcgagcggcggcagcgggaggtcggtggtggcgaaagtggtgga

SEQ ID NO: 6367 - DNA, 6619 bp, Oryza sativa
agaaaagcggaacaagcctccgctgtcataaccttttccaacaaaagtcccatatttagatacgacacatttattggactcaaacacaagtctaaaatcttctctacacaatagagagccgctaactagattcttctttattgaagggacatgctgcacattcttcagctgcacggtctttcccgaagtaaacttcagatcgaccgtaccaacaccatgaacagccgcaagcgacccgtttcccatcaacaaggaggaacctctcccgacctgataagaagaaaatagagaaatgtcagcacatacatgaatattagcaccagtgtccacccaccaatcaggtgaatgaaaaacagagagaactgtaggtaatattttaccgtaccccgatgttcctccgccctcactaatgatcatgttggcagacttcctgtctttgcgctcaggacagtccttggcccaatgcccagacttgccacacacaaagcagtctccctttgcctttcccttgcttttcttcttaaaattggttgcagccttgggtttgacatcaggcttgactttcttgttgttgtgggatgcatgagggttcttcttctgtaccatattggcactagaacctccctcaacctttttgccccggacgtcctttgccctcgccttctcctcaacacccaaagagccaatgagatcaggaacactgaactcttgtctcttgtgctttagagaagtggcaaagtccgaccaagaaggtggtagtttggcaataatgccacctgccacaaacttgtccggcaactcacagttgttgttctcaagttccttagccagcatctgaatctcatgagcttgttcaactacagaacggtcatcgaccatcttgtagtcatagaactgctccataacatacagctcactgccggcgtcagaaactccgaacttggcctcaagtgcatcccgcatgtccttcccagaaggcatgtgcatgtacacgtccactatgttgtcagcgagtacactgatcaatgctccacggaacaggcaatccgaagcctcgaacttagcctcttcctcaggagaaagaggtggttcacttcgtttgccccgtgaaacatagaagcactgcatcgctgtcaaccacaatagtgcacgtgttttccatctcttatagtttgaaccatcaaaggcatgtggtttcagtgcagcagcaaagccaactaccgaaaatgacctatcaggtttttggattgttggaaatttggtcataattcggcatattttaatccaaaataacaagataataaacatgatatttacaataggatttgatccagtgatagtggtgaatgtaatcaacatgagcatgcttaacgttgaataagcatcaacaatcacataatgacacaatgttgacattgcgatgaacattaacagtaaaacttctaattgaaataatgtaataaggttataccccaagaatggtcctccgctggagtttgaggcagtattgcctccgttggtgttgacgggagtctccttctccttgtctccagtgttcgacatgttggtgaagatgaagtagatgttgacgaacagtgagtagtcgcgccttgcgctccccaaaaacatgatcgcccgcccgtctgtgcaaacgtcgcagcaacgcgtggtttcggaggcctactctcccaacgcgtgtgcacacactcgtcgggatgggattaccgtagcaacaacagctttggaaaatggatgaaagtgtgtcttctttttctcgcgggagatcaaatccattcccattttataagaggaatggaagatgaagagtaagagtcatggaataggaagaggaatggagcaactaattgtcatcaactagccatgaaccatccttcactacacaaccatcaaccaacaatcaattaagagtaattgatgtaagttaccaatggaataggaagaggaatagagcaactaaatgtcatcaactagccatgaaccatcctccactacacaaccatcaaccatccatcaattaggactaattgatataagttaccaattccttaatcaaatggattaattctcaaaactcttcatcccattgatatcccatagaagaatgaattcacatgaattcctagcataatgagccttggaatttatttgatttaattgatttaaatggattaattacccaattaaatctaacaggacttccccgggaggtagccgctgggacggcacgcgccgccggcgacggcgccggggcggagggaggaggcgaggtgggtggtggagagcgcggccaggaggaagatcatcgccatggcggccactgctctggcactcgccatcttagctagttgttgcgctaccttgttgtcttcagttttcttgatgagtttgtgctttgatttgcttgatggaatgggattagagatgcatgaggttatatagctttgttgcttgcattagttaatcaattggttttctggcacggcaatccgttgctgtgtgtgttcagatgtagctacacgttcacggactcgcattatctctcgacgaactgacgtgccgttccaaacgattctccaataccttttttttttattatctgtacgttgtgaatctctttaatttcgtgtctaacatgcataaaattgattgttaataatcgtgcttaattaagctttagttcaactaactcgcatgttcaattgattggtaataatcgtgcttaagattcacctctttagggcaacaacaatgcttaaaatcttggtgaaaatttaggacccatcatacttatgtttatgaccacaatgtatatcataaaatcttatagctcatttttatggcatattgtggatgttcttagtgtctgtcaaggaggcacacgagtgttattttttttagtgtgtgcattttttgtaaagtatagttttgtgagtattgagaaataccaagaaatgacttatttgagcacacagtactacagctgccgtaaatcagtgtacccattcctataagaatccgtaattttttttgcgataaaaaaaaccgtctttttttttcgataaaaaaaaccgttgtatagcataaaaaccgtcaaattcattattctgtcgaccaaccgtcaagtaaaaaccgccgagtcgtaagggaatattcagttttgttggccgccgaaagggaatgacctctttagcgttcttcagacaagaccacacaacctcgaattctcccacgctcgcgttgagcccaagcttctcccacaccaccggcgacccgccgacggcgttgttccggcacggcggcgcgaacccgtcctcctcgcggcacccgttcacggagtcgcaatcgtccaccaccctggcgaccacggacgatcgtccgctcgccgcgccggcgacggcgaagacgcggatcctccggtggcagcggcggcggccgccgccgaggcgcagccacccggaggacagcgcgaccaccagctccgtgttccggtggaagcgcatgtcgcaggacgtggggacgcctccgtcgtcctcgccgtggtcgaacaccttcagcgtcaggatcgccggcgtcgtcctggccgatcgacaccggcggcgagcacctgaaccgcgggtagcgctcgccggcgacgcagcagtcatggctccccttgggacacctcgtctcgttgccgtggaggtagacgtagccgctggcatggcagctggccgctgcatcagagacgccatggatggtaggggaggtagacagcaagctcatggcctgcaagagagcaaacagaaatagtatagccttgtgttatccatgtctcctactactgatttcaaagtttcttcttcttcgttttctttttaacaatgattcaaagtttctttgatggaattcaaattcatgaattcaagttcatgttgaatggatggggttaattacatgcatgtgtggcatatatagggagctctatgtgggatgttccagcaattcgtatgctagtgttttgactggacatgtaacacaatgtgatttttcttggtttgtcgatcccaaggttattagtgttttgaccaagaaattttatgtgtttccatgtgcatgttagaagttgaatcatttgataatgttaagaccagtgtcgtgttgtgttgtgttgtgttgctcaatattagctttggtactagccagtgattcactgagcaacggagtagttaatagcattggtcattatctcaaaaaagtaaactgaaacttaattgagctggtcaaaattggcatccttgtgatcgctatgaaagattatgtttgtaccactgaaaaatcaggaagcatatatagcgcagtttccatgaatctatgttcatctaaaaaattcaatcccaaaatctcaaagcgcactgttattacttattaatactagtagcagcactgcagcaacactaatactaacaatgttattatctgaatatttcaggtactgtggtatatgcaattgaaaaagctgaatccaagtgtttttcttatctgtgacttttagtggaaaactgagattctttcttttgtttttgtcccagctcatttacatttctcttggactgctgtctgtacacatcacatatcctatataattttattgtacagttcatgtcttggagttgtcattttctaatagtttggactgatggataaaactcaaacatttctatcattggaaggattcaaaacatatttattgatgtggattagaacacttgattgtgttgtcatagagatcgaagatgcagtaaaggagtatcctatggcaaaagtaaacattacacataatgaaattcattgcattagtgtatcacatattgaacaagtgcctttatgtgctaacctcctttgctagttgtaaatttcagggtttcaacaattgcatagacatcaattaaaaaagaaaaaaattgaacaaaatgtctggcctattttcttctgaaatcttgtaattaatcatgatagctgtgccatcactaaagtactgaaatatataatgagtcatttttcccacaaaatgctagatctactagcactaaattattttagtgcaaataatactaaaacggcatcacattacaggactatatacacctcttataactctatttatgctgtatagctctgtagactgactactgttctacacctggatattgctatagagttacagttatgtaaggctgcatgcattttgtctgtcctgcttacagtttatcttacattttagagagcttttgtgttttcaatactagctgcatggatcaactgaagatacaggtcatttcacaactcacgagagaatacagggtcatacttaacatagcaacattctttatgaaagatagcagcacagtacacattcaacataagcattatgttgagtagaaaatttaatgtaacaacagaaacacacactgtaatgagcacttttggggaaatgacaaatgccagagtaacggcttattcgacgacaacttttacggggctctctactagtatacgacagtatacccgttgtaagtgcagggtaacgtatgtattaattaatgtgtatatatatatatgtgtgtgtgacgtggccatgacggcatggctggttcttcagacatcagaccaggtgaccttgaactcgccgacgccctcgtcgaggccgagcgccttccacaccgccggcgagccgtcgacgacgtcgttcgggcacggcggctcgaagttgtgctcggcgtcgcagccgttcaccgagtcgcactcgtcgacgaccctggccagcgcggaccggcccgttgcggcggcgacgcggatcatgcggttgcaccggctggcgccgtcgagccggagccagccgctggagagcgccaccaccatggcggtgtccgggtggaaccggccgtcgcaggacgacctcccgccgccgtcgccgccgcggggaagcttgttcagcgtcagcgtcgccggcgttggcctagccgaggacaccggcggcgagcacctgaactgcgggtaccggcggccggtgacgcagcagtcggagccgtgcgccctgttgcacttgccggcctttccgtgcaggaagccgctgatgtggcagccgccgtcgccgccgccgccgccgccgccttgcttcggcttcggctcgtgcttgccggtggccacggcggagacgccgccattgtcgccgccatggacgacggcgtgaagggacatcagctgcaagagagcgagcacgaccaataccttcacgttagccgccatggctggatcaaagtgagctcttcgctggcttaattttgatcttgtgagtgttgtggcaagtgtattatatagaaggacttgctcgaggagaagcagttaactgtggcattaatttggtttacctagcaagccatgtaaattcagccaaatttcattggttttgtaaccccagtaaaaacttgggtggtgaaaatatcacaagtttgtttgcacatgaagatggaatatcatatatatcgtgttacacataattaagctgggttaggacaacatagctagcgtaatctgaatccaagtgccgtttccgtaattg

SEQ ID NO: 6368 - DNA, 8661 bp, Oryza sativa
cgcaaccattgcaaggaagtcgttgtatgaagaagggcagacatgcagcttgctaaactgacacgtggtggacaacaatgaccggtctgtgactggtctgacgctggtcatgtcataggcagacaaccgcgcacccattttgcacctccttccagcggagtggaggtaggtatgacccatcccatcggagggtcattcggatagcagccattgcaaatctccgcccattaatgaaggaatgacagggtgatcccctatgtcagacgagtgaggacgctgggccacactcaaagacaagctatattttagcttccaagagaaggcgaacggggttttggtcaagagagggtgggtccccacccaaaagaagagtaggtagaagtggagcatgtggtatccccttgagttataaaaggaggaccttgcccaccaaagagagggacggagaagaaaaaaggggaaaggaggagcaaacgagttctagagtctaaacttgttctagctctcgaactctttgtagtttcttcatacacagatccaccagaacacaggagtagggtattacgcttctcagcggcccgaacctgtctacatcgcccgtgtctcgtgcattgcctctctcgcgaatattccacagaccgagggcttagaacctcacttagcgcccccggccgaaccggcaaaggggggcctgcgcggtctcccggtgaggagccccacgctccgtcagtactaataataatttgattgatataatagacaaaagaatccaacttcttcgcaatgtacactccctgcttcctttagtgtttagggaaaaaaagcatgcagaaaacatcaatttttctaagctttttaccattttaacgtaagttccttttcccctaagaactcatgtaaaaaatattttttgtctatactagaaaaagacgttttccagcggtacaacgactattaggagctataatgacattataattttacactaatttataatctacattggtcaaaaaataaatcacctaatagaaacatctaataaaaaatataaaatattttagagttggaccagggtttcacttatcgtgtgataatcgcatcacttatcacgcttatcgcgggggtacggtaggggaaaccggcgatatgatttggatgaattttgaccaaattcaaaattccggaaaaaatcgaaaaaaactgaaaaaattcatggatgtagcgcgataacatgccacctcatcgtccactagtaataattacaaggaaaaattggaaccatgccattataattttgcaaaatttaagatataccatcctgaaccacatgtcattgactcatatgagttctacatgtcattgagataccgatgacatatcttaaactttgcaaaattataatagcatgatttcaatttaccctaattacaaacaagcttatgcaagcatgcaacatatctataattcattgaattctacatatcaacatccaatcatttttcttcacattattttttcacaatatttttaacatatatatatatatatatatatatatatatccatcatttctatattacttaacatatattcatctatacaattaaagtgtagaatatcatatttcatctacaatctcatactaaatgtatttctctctaaacatactttgacaaaccaattttatttgttgttaataactaatataatttatacttttatacttttagctcgatcattaaaaaaatttagaagttacttggcaatttccgtagaaagcgtgggaaatcacctaatgtgtcccttcggtagacgtgcggacgcgttgtgtgcagtggaagaagggatagaaggacgactgcgctacaaaattccatgcatagaaaccttgagggttcatagcatgggtttgaacaacgtgtaaattgaattcctgccttttcttactccagtgttttcaaattcctacattcgaaagaaatcatgctttaacagagtactcccttcaacacagagctccctgcccattgcctcaaatcgtgtaaaaaaaataacttaaccttcagattaccatactcaaccgagcaaaagttcatcatgaacaaatgtctacaagaacaatactgacagcaataaaacgagctaacggattctgctgcaagtccttggacattgagcacaggaccattcatcagtagcaaatgctacagaaaaggaaatgtttgttgctcagctatcagcatacatctttggtcgatcaaggatgtaaataaaaaaaaatctgacaattaagcttgaacacttacaaagtatggatgttttccatgagcacattgtcaaaatatctctgaatatgaagttgcatgatcatacatgtattttacagaagacaacgcatacaaagacctccagcatgctttcagcttacatttttcttgaccagtagcaagaccttttttctcccatacgttgccattgatgcaagtttacaaggtggcccaaaggagttaatctgtgacatctcaaaagggaaggaaaagaaacaaacaaaaaataagtctttagtcaacaatgtgcatcattggcgatgtacaacaaaccagttttttttttcttcagagaagaaaataacaaggcacctgcattagtgtccatttccatgcgtctcatgttctgcttcctctgcatcctcaaaacgttggtcattgatctgaagctgcataaggacattatgaggtttttgttcgagttagctcatgagattggcaggggaaggaacaaaagagttttatcttagtatacagatcaaactgttcagaaagtaactgtttgatgtttataataattttgaaaggataatcaactgccaccctgaatcacacggtatatctgtatatgaattaactataccttaacatattatgtgacaaaaacagtaagaaatatacatatggtcgtagtttctaaataaaatgacgtgagaggatgccattaccaattcctataccatatgttgtagtaaatacagattatattcacaggagcccgaagaaaagaaaaaacctttacaaccaagcttataacacaagagttttatttcacttgcaatcgtttcacagaatcatataaagcataaaacataatggtagaacaaaccaacagcatacctcaactacagcatgagtaatatcatgttcatcagtttgacctatcgggttgacatctgaaaactcacattagcatcacttcctgaatgcaagataatacataaaagattatgcataacgtttggatgaacacaaaagagaaatgaacagggcgaattcttaccaccagtcatatcttcatcaccttcatctctatgagcccagccattctcttcatcactctctggtaattaaaaaggcatacatcaaacaaagaacattcttttattgtttattaactattaaaacttaccagcattaggatcggggttcaattcagcacaatgtgagaatgcttcaaagagtccatccactgaaacttctgtcaaggatccaagatataatgtgaatatataatagaagatacaaatgcttcaagaaatagtattagtcaattcttcaaataaatagcatttcaaactgctggaaataaaaaatatatctgccatgatgatctgcagtatgatactaattatgcaaggtagtttattcttgattagctattaatcccaacagagaaccatttgtaactgaataacataagacaagcaaatttttacttgtgaaggaacagaatgcacacattacattcttaaagtagtaccctctagagtgaagacctactcttcaagaataaacaaatctaatcatgactattagttgctacagtcatgagaataaattaaaaataaagagctaatgaaaaatgaacatagagcattagaaatgatagttatttcatgtaaacctgcactcatatcaaaatttagtatgcaagcatcagaggtagatttatacaaggaaaaccaataaatgctcctacatcagacaatttactgtaaaaaggatacactgacaaggatcagatggtatgatacgcatctcagtgactttcgatagctctgtttccacatttacttcggagtctgattcatcggactcctcatcagaaccatcttctgtctcaatctttgaaaattccaacaaagggaatagcaaacattagaatcagataataaaagataacaccgaaaatagacaaagaatcaattgtgatatgccaaattcactaaatacatcaacatcacatttcagaattcaaaatttagcagctacaagagctctaaacaaaaaccacgaagaactccgcacccacccagcatacaggacaaatgatatatccagactaggatcactcttgagttgaaaattatgtaccagctctatgaagattacaaaaaggctgcacgtgataaattacatccatacatttatctttcaactatttgctactatgctagtagcaaaaatcaccttcactggtgtttgctgcgtacaaactgaaatctactaatgctataagatcaaaaggataaaaccaaagagaataaacaatagcagtgtccatccgttagtacccggtgaaccaaaggagaaaatttctgccaatcctctcaaagaaaaggaaaataaactccaccttagtcaaatgggtcatagcctgtagtttgtcacggcggcaacatctgtagcagggagttcaaagcagaagccagcggcccagcctgtgaatcggcccagaagggagaagcagcccaactcccgtttccctgcgagtgtgtggacccagtagtgattggctgggccactgtcagtgagtgagagaggctgtgtagtgcgatgctatataagccggcaggattgagaggaaggggatcgaatcatgtaatcaaacatactcaaattcaattccatctctctcctgttcaattctgttctgttcttcttcttcttcttcctcaagccaactctctcaatctcttcccttctctactcgaccgaatctctcctacgagttcgagaccgtgacaatttggtatcagagcaatttcgatcctggagaagccacgatatacttcccgtttgcaacttcaagtcgaagcgatggagaagcagaacattgatttcggcaaggtgttgatggagatctaggagtccttggtgaggctgaatcgtgctcaaggcgaaactcaagcagcggtcgtcaagctagatcgcgaagtgagcagttggagacctcaagtagaagcagcagttcaggagttgcgtgaggaagtcggcgaccttcgtcagcaactggatctcgtcggcaaaatgaagcaggcttctccggcgacgtcttcccctccagcaccatggcgcgggcctcaagggcttcttcgcgccgccgggacgccgcctcggtcttcgccgcccgccgttcccgggcagcggcggcgtcaaggaccccccgggcggcgtcgagcttctttcctagctccgccgcctagctcccgtattggaggcggagatcgtcccgcgcctcgttcagcacggcggtggcaatgagggcagcctctcgcttctcctccacctccctggcaatctccgccagctccttccgacgggcctcgagctctcaggtgtgccggcttctttcctagctccgccgcctagctcccgtattggaggcggagatcgtcccgcgcctcgttcagcacggcggtggcaatgagggcagcctctcgcttctcctccacctccctggcaatctccgccagctccttccgacgggcctcgagctctcaggtgtgccggcggtgtgccttgcggcccgcctccaccatggcctccaccgagcattgcccctcttcgacacgcgctcacgccgcgtcgagctccgcccgctctgcctgcaggacctccatctgggcatttaacccatccaacaccgtggtgttcgcagtggccaaggcttgcagaaggggctccgcgctcagtggggcagcggaaggcatgggagagagccgcctcggtgagaatgccgcacggctcggcccgccgatcgacgtgccggactcggggacgtcccccgaacctggctcgtcctgagcgtcgcccgaggagtcgggcccgagcggtgcgcctgcggcctagtcgtgggtggcctcggaagtcatcgtcgcctcgggcggagtcgggtcgggggcttggcaggccgcctggcgtgcgcgtgccacctccgcctcccgggcggactcctcggcccggcggagcctggcctcctcccgagcggcttcctcagcctggcgagcccggacggcctcctgggcagcctcctcggcttcccgaaggcggtccgcggcttctcgccggtcagcttcccgcctccgggcctccgcggtcgccgtatcctcggcctcagaccggccggacttggaatggcgggaggggcgcgacgggatctcgctgaagcagaagaaaaaccagaagacaaaaagaaacaggtaagtgaaaactcgctttgaaagaatgaattcggccgtagtaggcgcggggacgaacctgcgaggaggtcggttaaacgaccaccttgggggggagatgaggtttccccggcttggctcggtcccccccatcttgcggagccgtttctttttccgctccccctcgggctgcggcgttggcgcggcaccttccgagcgcctgctgctagcacgcaccgccccgccccctcggggaggagatggggaaggggtaccctcctgcttcctcttcccccgggcgtcggcagggcggctgccccccgggcccccgtcgcggggcccagaagcacgaccccctcctggggtagattgttcccccctgcggctcccgcccgcgccatcgtggcctcgaggagcccgctcctccgacgccccgaccgccatcatgatggtcaagatgttggcgcgatctggatcgctgcagagggggaggactccttgggggatgagggacgcctccacggagctgagattcagcacccgttggaccaccatcttgaaatcctcaggggcccagtcccatctgcccccctggtgggtcctcatgtagtccttcgacccggtgtactcccaggcgccccgggcgcgccgctggagcggcgcgatccggcgacgaaggtagtcgtcgtacaccatggcccccgtgagcccctaggatcgcaggcccgccaggcggtcaaggacggtgtcgtagccgtctcccagatctaccggcacgcgccagctggaggcctgcgccgggggctggctcggaagtcggaggcgcgcttcgtcggcgaggggggtgtagaaccagtcgctcttccagtcgtcccacttcttgcgcaggacgcagggaatgtagcggctcagcaccggcccccgcggctggaagtagcagccaccgaccaccgacggcggcgacactggctgtacggtgaagaaccaccggaacagccgaagagatgggcgcaccccgataaacatctcgcacaggtgtgcgaagatggccaacgtcattaccgcgttgggggtgaggtgcgccatctggagatcataatgctccagaacatccatgaagaaagaagagaatggcgggactagccctgccattgcaaaagagaggaagaagacggaccgccccgggtaacgtggcgccgggcgtccctcgcccagcgcgaccatctcccggccggtggcagattccggcatgaagcggcgcggtagcccagcctgcctctcgctcacgatgcgggaaggcggcagcacgctaccatcgagcggtgcggagccccgtgccatgacgccggcagaggaggaacttgagaacgagcgagtgcggcgagggtagggcacaggaaacgaagagttagagcgcaagcggcgaaggcaaggggaataatggcgagaggaaggaaacgaatctcttcctcggcgtctttatacccttgccaacgctctgcccggctcctcgcttcccgcgcccactatctcgccccctcgtttcttgcgcccacgcctctgctaatcccactcgcccgtttgcggcgcacgaggccgtggcagtcgagatgggacatatcgtgcgcgcgttaacttcgctcgccgaccgaagcgccatcatcacgtctccaggcgaaacgaactgactcgtcccgattcgcgcgctgctcgagtgatgtggcagtctcgaagaggccgctcattattatcgatcagttttccctgccaatgcgtgcgacttgcgaccgctgagttcctacccgcctgtagagaccggccccacctgtcaccagatctaaagaatggcgtcacgcccgagcgcttccctcgaggggggcgatcgccctggcgtgacgccgggggctactgtcgatgacatggggccgagggtatcatgactagaggttagggtagccgcagtcacccacgtggcccgggtcgggcccgagggtgacgagacctccccgccttttgtctccccgaggggtcgggccgctcccgtttcggccccgagggcaggggcgccccgaccccctgtggttttgacgccacgtgtatggtttaggtgagcacagcagggctcacctaaccgcatttattgcggtttg

SEQ ID NO: 6369 - DNA, 11089 bp, Oryza sativa
gcccaacggcttagggaggggtttctttgaactttttcaaataaaacaatttgtgaaatgttgtttcaattaataaaaatacttcccttgctcaaataattcccagaaaaatctagaaaatagaggagcaagtatagtatttaataaaattttatgtagctcatttttatattgaaaattttcctagaaaattagggtttagcttgtaggcttttaaaataatttctaaaaatgatttaaaatatgcatttttaatttagttgatttttagggcgtgacaaacctaccccccttaaacggaatctcgtccttgagattcagaagaactggcgaacagatgaggatgagctgacttcaattcatcttctcgttcccaagtggcttcttcttctgaatgattactccactgaaccttgcagaaccgtataacgcgattcctggtattcctctcgcttacttccaaaattctgactggcttctcaacataagttaaatcttcttgaagctctatacgatctggatctgcttcctccgtaggtacacataaacatttcttcaactgtgacacgtggaacacgtcgtgtattcccgccattgacggagacaactctaactgataagctacttcacctcttcgactcacaatcttaaaaggtcccacaaaacgcggtgccaatttccctcacaatcttaaaaggtcccacaaaacgcggtgccaatttccctttggtttggaaacgatgaacacctcgtaacggcgtaacccgaaggtatacataatctccttcttcaaaagccaaatctctacgacgattgtcggcatagctcttctgtcgtgactgagcaacgtgcaacctttattggataatcttcactttttcttctgcctgtcgcaatatgtctgtcccgaagacttgacgttcaccggtttgatcccaaaggagcggcgtacggcactttcgaccatataatgcttcatacggagccatttgcaaactagcttgataactattgttatatgagaattccgcgtacggcaaattcttatcccaacttccaccaaaatctagaacacaggctctcaacatatcttctaaaatttggtttactctttccgtctgaccatctgtttgagggtgataagcagtactgaaattcaaacgggtacccaattctaattgtaatttctgccagaacttcgaagtaaactggctacctctatctgacactatcttcttaggaacaccatgcaaacataccactctggccatgtataactctgcaagcttattccccgtataggttgttttgaccggtatgaagtgagcgacttttgtcaaccgatcaaccactacccaaatagaatcatgtcctgccgacgttctaggtagaccggttataaaatccattcctatttcttcccacttccactctggaatcttcaacggttgtaacagaccagctggtttctgatgttctgccttgacccgctgacatacatcacatagtgccacatattctgctatctcacgtcgcatactggcccaccagaattgttgctttaagtcttggtacatcttagtgcttctagggtgaatggaatacaaagtttcatgagcttctttcatgatagtatccttcaactccttattttctgggacgcaaattctttctcctaaccacacagttccttgctcatcttctacaaaaccgatggcttttcctcttctcatgttctttttaatttcttgtatatcaggatcattcacttgagcttctctcacttgatcaaacagagtaggttgagcttccaaagcggccacaaaacctttgctgactattcccaaattcaacctttcaaattcttggcataactcccaaggtaaatgtcgaccttctgacatattacagtagcttttcctgctaagggcatcggctacaacatttgctttccccgggtgatagtggatttccatatcataatctttaatcaactctaaccatcttcgctgacgcatgttcaaatcaggttgagtgaaaatgtacttcaaacttttatgatccgtatacatctctgtacggttaccgaaaagataatgacgccaaatcttcaatgcatgcaccacagctgccaattctaggtcatgcgttgggtagttattctcatgaggacgtaattgcctagatgcataggcaaccacctttccttcttgcatcaacacacaacccaaaccgagtcgggatgcatcacaatacacttggaaacctttcctcgaatcaggcaaaattaacacaggcgcagtcactagccttttcttcagttcttggaaacttcgttcacaatcctctgtccacttgtacttcacttccttctgaagcagacgagtcattggtctggcgatctttgaaaagttctcaataaacctgcagtaatacccagcaagtccaaggaaactacgaatttctgaaaccgtcttgggttgcttccaacttaatactgactccacattgcttggatctactgccactcctccacacgagatgacatgaccaagaaacttcacttcggacaaccaaaattcacatttactgaacttggcataaagctaatgctcacgtagtttctctaaagctagacgaagatgctcttcatgttcttccttcgtcttagagtaaataagaatgtcatcaataaacaccacgacaaacttatccagatattccatgaacaccttgttcatcagattcatgaaaaaggctggggcattagtgagtccaaacgacataacggtacattcgaacaaaccataccgagttgtgaaggcggtctttggtatatcttcctcacggattcgaagttgatgatatccggaacggagatctatcttggagaaaactgtagcaccttccagttgatcgaacaggtcatcaattctgggtagaggatacttattcttgatagtgacctcattcaacgctcgataatccacgcacattctctgagtatgatctttcttctccacaaagatgactggtgctccccatggcgaagtactgggtctgatgtatcctttctgaagcaaatcatccacctgtctcttcacctcagctaactcattagctgccattctgtatggtctcttatggatagggttggttccaggtaccaagtctatccgaaactctatgtccctcttaggtggcatacctggcaaatcctcgggaaacacgtcggggtagtcttgtactatgggaatctcttgtagagcaacttggtttaagatcacaccatgatatttaggagaggacacaaagaaagaaacggtttccccattgctactggttaaggtcaccttacggttggcacaatctataactcctctgtgacgagataaccagtccatccctaagataacatctagatctttggattctagcaagataagcgaggatgggaaaggaacttcttctatttctatggtagcggaaggacaatactgggtcgaaaatacttggttgcctggggtattaactagtaaaggtctcccaagactaataacttccatcccatgattgctcgcaaaacttttagacaaaaatgaatgtgtagcaccggaatcaaaaagcacagttgcgggtatagagttaacaggaaacgtacccaaaaccacatctggtgcattctgagcttctgctgctgcaacatgattaacacgtgccttcggtgctggaacattagagttgttcggggttggggcattcttcacacgccgaggcttaggacacttatcagcataatgtcctggatcaccacaattgaagcatatcactggcttgcttccctgttccttcctaacgggctggttctgagctggagttgctgcaggacgagcaaccgtgttacggttgtcattgccacgattaccagtattgttgttgtagaactggcgttgggggcagacaactgatgaagatcctccttgagggtacggtggagcttgaggtccagtaacgagacgcggcctctggttactgccctgttgtgccttgaattgggcagccctgtgcttcttctgctccatccggttatacttgtcttcctgacgaatcgccttgtccaccaactgctggaaatcccggaaatccgtagacatcaaggcatacgacaactcatcattcagtccctccaagaacttctcctgacgttcctcatcggtacgaacatcctctggagcatagcgagctaaacggttgaaatcatggaggtactcggtgaccgaacgagatccctggttgagtgctctaaattctctcttctttagagctacaacacccgttggtatgtgtgtcttcttgaaagcggccatgaattcctgccacgtaataggctctccttcagccctgccttggcgaaaatgatcccaccattcagcagcaggtctatgcagttgatgcgaagcaaaagaaactttctcctgctcagtacactggatcaaatccaaattcttctccaccgcatgcagccaatctcctgcttctactggattggtggtgcttgaaaaggtagggggtctcacacgtaagaaatctgccagcttgttttggggaggtggggtggattctgattctgattgtttgcctgctgattctgtgcctgctgcactaacagattgatcagttgtgtttgttgggccagaatctgagctagcgtgggatctcctccattgttagtagctccacttccacttccggtgcgcgtgttcaccatctgacgataagcagagacaacaggaaagaacgacagagagacacccttagaacggagttatttaattaatttaaattctatattgctattaactgtgtatgattacatttaagttgcattaacactatctcaccaactatcttacactctgacaagcaaaagaactagactcatgctgttacatcccacccatgatgtaagcaacaactaaaacccacacactcacaagcaaacttaaacaagcaatctaacacagcgaactacggcaacgttctaactaagcgactaatcccgccttgcgtcggaacgaagcgatgaatcttcttcctctggagtagctggctctctttcttcaggatcttcctcctcttcctcatcacttatgatgtcgatgacaggttcagcacgatcgggcacagcttcacccatcacatgaatcttcgaagctaactggagacgaggtggcggacagattctctttcttggagtgaggcgaagcttgggtgttggcggcggcgtttctcctttaagttcagctaattccttctgtagacggtacaccttgctctccaacttgcaaatcttgcctcgattccagttttccctgtcatgagctgctttgtctcgttccacacttactgcatccatagcactaagcatatgcaccgcatgcatcagagtggcactctcttcaccatcaggacaggtatagattccatagtcttgaccatgaggcttgtgaggatgatactggaaagctgatgaatccaactcttcttcaaagtgttcacgcaactctccaatggccaccaacgctgcttcttgacaagcatggcagtatgatcttcctccagcttcgaacttaaaagacggaaggtcttcactatcactagccaacgtcacacgaacacgacacttctcctcgtcggggtcatgggaaatttggcgatactcgggagcaacttcatagcctacctcaaaagccatcaacctcagctccctgacgaatcctaacaccttgatcaaatttctcagtgaatggggcggcatctaaagaaacatagaagagaagaattaatgcatatttttctaagttagctgcaccaactagacttaactgatttttgaccaaaaaggaagaaaagaaaagacacatacaaagctattttataaatatttttagaatttaacttttttggacagagacaaaaaaatttttttttttgacaaataacaaaaataaactaaaatacttatgatctattataagcacggtacagtgtcaccataggaaagatgagtagtactagtgctatcatgattgtatcgataccataatggatgtacagtgccgacaaatcaataagacttggtaaagagagaaagaaacattttgagaaggacgaatttttgcttttaaaagaaaagaaattgaattaaataaatttttgtgcataaccttgcatgtgctgccaacttaattaatttataagagactagagaagagcagttctatttttttcaaaatattttgaaggctacttaaggtttaccatttggcttatcctaaggtcaaggtggctctgataccaacttgtcatgccgggaatttctatccaaaattccaagcgcttacatgtgtgttaaaccctcgtccaggaatcaaccgaggcacacaatgacaatttgataatagagtacaaataaataactatcgaataatcgcaaataataaattattacagaggtggatagttcctctcaaagaaaaacattctacgcatcggaaaaaaaaaactataacaaactacggaacagctatggcgactccactccacaggcatcttaaccgagaacaagcctaatccaccagatcatcaccttcactgagatactcctcttctgatgaatgaatattgcaagaatgagcatatgacatactcaacaagtcacacagcaaatatgcaagtgcacaggataacaaaggatggcataatatagctcatttgcagaaacagcatttaataaatatttaagagaatagtaaaacggttgtataattaatcaatattaaataaacaccacacaacacacccatgttgcataggcccaaccacatttgaacaaccaaccccagttgaacaaattaaacctcctaaccaggaattatccattccaaactaggaattaaattaattaccacattattaccattaatgagtagtgtgagactaatcacgaaaaacattgctcaactcacccataaccgcgggtacggctattcgaatagtttaaactctgaccagaggtgtaccactgtacccacaagacacaaccccacatcatgtcaccatgtgcctcaataccaccacggtacctcggaaaggagttgtgacaataccccttgcacaacataacccattacagcgcacctttcctggatcataatcacccccttataaacaaggtatggactccccagcgacccccatggacttctcgccacttctcagtctggcgcactataatgaatcacgctatacaaaagataaagccgttgcccacgctggcttgtggttggcacgataaatgtatcacaacagtagctcgcgaaccggtccttaattgtcatgagcacaaccatcaaaaccatatgctcacaacccaccttagccaggttttaattatcaattaattaacatcacacgatttaccatcgtgagctaccattgaatataaccctaattaataataaaataatttagatttaacccctttagttagctaatgtttctaagcatggctaagcaaacatacatatatagcatttagctgaaccaatccaatatataaggttcatgctaatcatattataacccataggaaaataaagtcatcttcggccattaattaactgggaaaggttcaccacccgatgacattcgaaaacaatgcatagttgaaataaaataatagctttaaacgggttcaacatgctcaaagggttgtttaggatctgtgtgacttgccttgggcttccgcaaacgcttcggaaccttcctcaacggaaacgctctcctccggaacgtcggaaactaaagcaaataaacaaaatcaacaaaacagtacaaaaacaagcataaacagtacatgtggatatttttaacatgtagatcttgattttagaagaatttagcaacttgaaccacctaaaacggatctacggttatttagttatgattttccgaagttttaatctattagaaaattggaaaaaagaaaagaaaaaggagatgatgacgtcatgctgacgtcagcaatggcggccggttagggtttgcgagctcgccggagctagggcggtcgaccgggggattggaggacacctacgcgtagaggacatcgagacgaacccgatggtactcaccacgacgacaaacgatgcacgacgacggccggcgacgagagggcaacggcggcggctcggcttgcgcggcgacggcgggctacggcggtcggcggcaaagaaggatgggcggccgagcttctcctcaccacggcgctcctatcagcggcggcggcaagcggcggcgacggcggaggcggcgcagcgacgacgccgaagacggccggcggcggcggcgagcttggcgcgcgtggcggcggcgctatggggcacgggagaggacgggaaagggggcaaacgggagaggacgacgaggggatgctttataaagcattagattgaagagattggactccaaacgagaggaatcgactcgggaaaaaattcaaactcggttttagggataaaatcaaaacgaactcgattcggatcaaatcctcaacgattcgctccgattcttgggggaaaagaaagaggagaacgagaggaacaaaacccctcaaaaacccggaggaatcggggtcggattgaggcggatttggaggtagaaggcggcggcaaagcggcggctcgggcggctcggccggaggttgaagacgagcccgacatgtgggccccacatgtcggtgactcgagagagaggagggcgggcggcggctgggccggcgtgggccgcgcggaagagagaggatgttgggccgaattcggcccaacggcttagggaggggtttctttgaactttttcaaataaaacaatttgtgaaatgttgtttcaattaataaaaatacttcccttgctcaaataattcccagaaaaatctagaaaatagaggagcaagtatagtatttaataaaattttatctagctcatttttatattgaaaattttcctagaaaattagggtttagcttgtaggcttttaaaataatttctaaaaatgatttaaaatatgcatttttaatttagttgatttttagggcgtgacaatccccttacaaaaacagtttgaaaattttcagaaaaatttctctgaggccgatctgaccgaaggtgtacagccggtctgaccaagggtcggtctgaccactgctgtaccgttggtctgactggtgctcagtctgaccgaagcacagccgccggattgactggtcgccggtctgaccgcgggacccattgcggtctgaccggtttcctcgagaaaacaccagatttttgccactttgattttgcaaaagcaatttctctctgctttttctatctatgagctaatctaaaacaaaaaccaacaagatgtccatctttaccacaaaaagaacaagcatcctttttctttagaagaagatggttttgaaatatttgtttttgtttattttagtgttgtagaaagagagggcataactccagcagacttgaaaactgttttcttagcactaggtttggtcaaaatttagccatgttcagtcacactcaaaacattgggttgattttttattgaaaaagtcatgaacatcaaaacgaacacccctattgtagctagtcactttagattgatccaaaataatgttaagttgtttcttaccatcagaaaatctttgcaaagaacttttcaaataagaaacctatttttccaaattagcacaattttcacaatctaccatgacacttttgctttttcgacatttggggcaagaaagcacttcattggttttcacaacatcttccatgtactcaacacgacctaaagcatgttttagtttcatcttgtttagtgtgcatattgagcaatcaaaaacactttgttgttgttgttttaactttttagcacaaaccatgttaaacatcaaactagcatgaaaagatatttgatatttttttcaacaactttttagttaaaaacaactcatccaaagtacgtgtgtgcaagacaaaaccaagagcaagacaagatctatttttcaaatgatgtgcaacgttgacatctctaatttttgaaatttcatgcattaaaacctcacaatttttgcaaccatcatcattaggaataagagattttaatctataaattttagaattaagggattcaataataaattcctgttttctatacatcttctcacacttcttattttttgtacttaaaataagaatagcttcctcaaaagaactcacatcattgtcttcacactctgaatctgattcaccatgtgccatgaagcaaacaccggagatgttctttcccttatcttcatcttcactttctccatctacatcgcttagtggctcaaaagcggcatagactttctcaaacatcttcttgagattctccttggtcttcttccccttgaatgtgctcttagactttgttctccttagtcttctctccaccattgtcttcctttttgcctctcctaagcttaggacaatgcgaacgattgagatcaagagcaccacattcaaagcaacgatcgatttggaccacttcttttcctgtacctaacattattcatagctcgagaaaacttattaatgaccaaaaccatgtcctcctcctcgaactattcgagttgctcattcgacatggcattaattaaagcaagaatagtagtaattcgatgaagaagcaccaacatccaaagaagtcaaggaagaaaccaaatcactagacttagagtcaactttacaagaaataatattcatctcatgtgttttgagttttgtgtaaagcgaatccaaagtcaaagtaaacatatcaacagactcctgaattgatgtaactttcatctcccaaatagacatgtcaagaccattcaaaaagtgacgagaaacctcagattgtgtgtaatttatatcataagaagaatcaacagatttaagatcactaaaaattttttgaacctagaaagatagtcattca

SEQ ID NO: 6370 - DNA, 4295 bp, Oryza sativa
atttgcctgttataacagaaggctttcttttcagttctttctgattctcattacttggtgaatattccatagtgaattcactgcattctgaccagatgaactgttctttgcaggaaaacaatcctgccatttgctttgctgatgtagacaaaaccaaagaagtcgacccagcagaatcccaggaaaagatagcttctttacaactcacattcgacatagtctgcgatatttctcggtctaccaagaattcacttattacaaaacaggaactttttcacaatattcttgctaacaacttggagatagaagagacaggtatagcatggatctaacaattccaaccattttgtacttattgtctcatgctatactgaatgatttccctccttttatggactatcacttgacaggggagatagaagaacagctgcatattttggaggacctgtctcctgattggatatctaagaaggtgatacctggtggagatattctttacaggttagttttacatgacttgtatagggcatctgctaatatgtgttttgtgttcatttctaaataccatagtatctacaatcactatacaattctttttagtggacatgtaatttagagatattttacgggtgtcattaagtataaacgcctttgtttcccatgttgcagcattaaagaaatagcagatcagaaatcagttcgtgcaagactcgtagaagtcatatgagatactactgatgctttcaaggccgaagaatcaacaatgtgatgtgactactgatgttgtaggacttgatcagctggattgctgaaatcccaacttaccatcatgaaatcctctggattgctccttaatttcttcgtctacttccaaacattagcagaaacaaacgcagattactcaacatgttcttttactggcactcgacatttgagtaatcctctggatctctttagtgctgacatggtttggaattcacaccaccatataataggattgaaccatgctatctgtgagactctgaacagccttgttagattgcacgagagcacaagtgctgtggttgttcccacgagaatgcgatgttgcaaattcgatcggtttgtgtatgaatacgatgtaatgtaggtatgtagcacatgctcgtatggttctctgagtgtactatgttagtcatgagcgaagtgagggaattccttcagattggatcccttaggagagagagagagaaggtattatgaaatgtaatcagatctttgacgatccagtattagctagcaagtatatggactcagactttgatgattacctagtgtatgtattagcttcaccctttgaacatctcatttactctctctagctctcgattttactaataggaatgccaagtacataggtcgatgaaagttgacatctattttatcttacgccacttactttagcttgatttcgtgggagacacccaattgaatgatctcaagtgggttctattaccatgtgtttctggagctgatttcattcgagtagtttcttttttgtcttcaatccctttcctattcctctccacttggtgatgtgtggtgataatggtgcactagtgatgctggttgtatgatcctagtggtcacttgataatgctactgtaatcccaattgcagtactgtatttcctagaattattatgtaagcattcatctatgcattcatggcatatagacatcattcagcaaaccaagtcaattgacctagaacccttaaaaagattcttctattattataagtgtggtgatctttcaaatcaatatatcggtgtgatggtgtcaactgttaaccccaaataaattttctcaaccgcactgctctcaagtataactgttgcactttctacaaggcacattaacaatgaaatcatatagtcatacaagacaataatcaatttgcagaaagttgcagtcccaaggtcgtgtggatatatacgaatggatatgtacttacgttcctttcatgattctggtagcaaagctggattatataagctttgacgggttcatatttttctggattacaaactttgacgggttcgtttttcgtgatttgcttcacacacgctctctgacgagagcaactcctcgcccattcgatatgcgggtatacgcttctgttctgggcgaacttagagcatctccaacagttagccatctcatctcactcttcaagttaaaaaatatcaaacatagcaagaaaatgtgatccaacagcctctctatttagatggctaagccatctcactggccaaatgaccagctcggatggccaaatctagccagtcagtttggctggccaaacacagcatcaacggctagaagctgcaatctctcatctgcctctccccatcgacgccgagttcctcctccggccgcccgcgagccggccgccgcctcccctccagccgtcgtcgccctggccagccgccgcctcctctccagccgccgtcgcccctgccggccgccgcctacccttcgagtgccgtcgacggcaagagagggagggctcgacggcgacgagggagagcaagggaggccgccgaggagcagctccacgcgccagtcgccgtcgcctcactcgcccgccgccgttgccatcctcatcccaagctccgccaccgccccccatgccgatgtcgccttccccatcgcgagctccgccgccccccatgccgatgtcgccttccccatcctgagctccgccgccgcccctcccaagccgatgtcgccgtcgcttgctgctttcccgtgctgcctcccacgccatcagcatctgcggtcgacgggaaggaaggaaaggggaaaagaagaaaagaaaagagaaggaagaggaaggagagagagagagaggggaagaagaggagtagagactgtgatgtgtgtctatttgttattttagagaggattaatagagagtctgttggagtgagtatctagtttaactaggcaaattagatgaagagttggctatatgggtgtttagagactccgatttgaagaagctgttggaaatgctcttataattcatcttgttcatcagactacttccacaatagagtagataatttacgataaatatagtctattaagatgtattaaaaattttagtggaaaatttattattaatttagaaacaccaatagatatgaaatttcatacgtaagacgatttgaattttttaaagtaaaacttacagttttatagaaaagagatagcaatatttttaatgtttgatttaatgaaaactaacttagtattattgatgttggtaaatttttttataaatttaatcaaagttaaacaaaatttaattagagaaagaaaccaagcatcttagggtctgtttagatccatttaaaatagcaaatgacaaatggcaaaaattttggtatagcaaaagtattagttggtgtttagatgcatcctaaacttttgccattctagcactaaagtgagagagagaaagagagagggagtggtccaaagcactttttggcacaatttgctactatagactagcaaatgccaaatgacaaattgccaagttttactactagtgtttagatctaaaatagcaaaaagtgcttcaaaatggcaaaactggaggatctaaacagggccttatatcattaagcagagggggactagtaaaaatgttgtaatttttttaacctctgaacaacgttaaagaaaacggaaaatcagttgttttacggtttggaggattaggctgcttgctcggttgggaaccattcccttcgcatgaaaaatggagcggtatattaacacgtgattaattaagtattagctatttttcttttaaaaatagatcaatatgattttttaagcaacttttgtataggaactttttgtaaaaaaaaaagcaccgtttagcagtttgaaaaacgtacgcgtgaaaaagatgaatatgagttgagaaaacggggaaaagaacacaaccttagtcaggaaagcatccaacattaggcttgggattctgcacagcgcagtctcaaaccttagctttagcaatgttttaaatagcggggtaagacatttagcagtcagtttcaaccagttttagcggataaattatacatgagaaagagctagaatccttctcaaacaaccgtaaggggaagatattcctctagtcaatggtcaactgtacgcgcgcgttcatctccttatatcttcaagctgtcaatgctgcatcaacatcacactagcacagcgcaagaaaatggcggg

SEQ ID NO: 6371 - DNA, 2876 bp, Oryza sativa
  unsure (1)..(2876): unsure at all n locations
ccattgccaagaaatggtcaagaatcttgtggacacaatccacatcatagagcgtttcaacagactcagagatgtttggaatcagaagatcttccagggtagccttatcaagctgcatacctatccgtctctccaagtttgacacgcaagaagggctggcttttaggatgattgctgtccgcagaagaccaaataacagcttgcaagatgtgacccccctttggaaaggtaacagtctatcaatttcctcaagtaggtacttttgttcctcttcagaagggattgatgttaaagatgatattgaaaggcaactgctgacatcactgatgcttttacgccgattcaggccaggtaaacgccttttggcatagtggttcaaggatccaacaataatatcctgattgattcctcggtattccatagctgagattacttttttgtataatggaaggcttaagcatgaaacatcatcataccaccaatcagggctgctatgtcttggccttgctccggtgctaatgccattccacaagacgcttcctcctggactctgcatggggcctccgtactggacaactggccacccaaataaatcaggatcagtacatgatctagttgcaactgagtcgatgcacctctttacgatttgcaatttttcagcaagatcaatgatgtcatcacaggtatggagggccttgattgaatctttccaactcctaaggactgtttgggtaaggaagttctctgtctgcgcaatcaaattcccctcagcaatctcttcagtcatctcgagatattcagcagcacagcgaagatgcacaacattggaggcagtcatttcgaacttaacaccatagcagaacttagcagttagttcaaaagcctttgctcccccaggaatatccgataggtcaatgacacaactgttgtctccattctcaatcttctctcggatacaacgctccaaaaggccactctttgataatagaggaaactgcaaaatagaaaaagaacttgctttttacaaagtaattatcttcacaagattgtatctatttttccctccctaatacaaattatctactccccccgtcccaaatataagcatttttaggctctgacactgtcttcgagatgctactttgaccaacaatatctataaaagtaagatgttttaaataaaaatagttgcatattatgatggtttgtttaatgataaatctagtaatatgaatatcaattttacatgattgatcttttttgtttttttgctattaatagtcaaagttaaaaatgtttgacttctcactatactaaaaatgcttatattttgggacagagggagtagtatgttttggtacaaaggtttcccaggctgaaagcaaagcgtaagccagttgcataaatgctaaaagaaacatattgcaaaagaaaggaactcttgaatgaactagtgatgaaaatcttaccttgtgaagatgaaaagattgctccccaactgtgacggttatatcactaggaagaccggttgtgcaatacctatataatgaacatgctcgtcatcaatacttttcagtttggacaatatttttccagcaaaaaattcatatgtaaaaagctagaagtttagggactggaatagacacaagagccactctacaagtgtggggcacctaaccagatccttctaggtttctgccaccccacggtcaattgctatagatgatactccctccgtttcgaaatgtttgacgccgttgactttttagcacatgtttgactgttcntnttattcnnaaaatttaagtaattattaattttttttcaatcatttgatttattgttaaatatacttttatgtatacatatagttttacacatttcactaaagtttttgaattaagacaaacgatcaaacatgtttaaaaaagtcaacggcgtcaaacatttagggaaggagggagtatataggagtatattgccacatgtatacacacacataaagttgcatatgcatgcctgcttacctggttgttgagatatatgcatgatatatataggctgtgatggctttgggagttgaacaccacgtagcaattcttatccccaatgttatccgtcttcattcccatcactcattcacaagctagctagcaaacctgcagatatatcactactagctagtagtatccggcaaactacctgatcgatcaataggattactactatgccttaatggaaagacatccttgtaaatatgcaattatcacttttttatttgactggaaattaatatataggatacacacatatgtagttactccgctcattaatatataaaattcttacactaaaactagtaacaccatggagggactaacaatctatatactaggtgaaaccccgcgtgttactacggaagttcagtatgatgacaatagctaaacaacatgaacttacataagttaatatggtttatgataatttaaatttaaatagtatataaaatgatgattcaaatgtaaaagtaagatgatgcggttttatgagaaaggaaagggagtgagatactttggaccatagattaatcatctaaggttaaagtaattgatgtgatatgatttaatgggagaagagagaaatagcactaagtgaggatgaatcatataggtatatatgatattataaaaaatgatgaagaaatatattgaaatattatgtgaattatgtgggatgatgatttaacatgtttatattgaaaaactctaaaatttaacaaattataaaattgttagtggatgatgatgtggcatcttgttaatgcatgatgatgtgtcatctttacatgttgagctttaaaatttagtgtgttataa

SEQ ID NO: 6372 - DNA, 3113 bp, Oryza sativa
ttatagttttggccattgtctaatggaagtggcctgcgggagaagaccaattagcttacaggacacccaaaacaattgcctcttccgactggtggaatgggtgtgggatctgtacggccaaggagccgttctcaaggcagccgacgagcggctcaacaatgaatacgacacaactagcatggagtgtgtcatggccgttggactttggtgtgcacatccagaccgatgtgcacgtccgtctatcagagctgtcatggcagttctccaatccaatggaccactacccgtgttaccagctaagatgcccgtgccaacatatgcaccgccgatggcctcagcggaggggcagccctcatcatcgacacgaatgtcgtcctcaagtttgacactaacatccatcacacctcgctaggtttgcaagttttctcactcataggatttatatagcgagacaattattgtcatatatagatttttatccatacccacaagttggtttgaaggactcatcttcgttaattgctccatacaggagtattagtcatgtttagttcattttacttgttctacatttacaaattgacgcttgaatgggatatgtacagctcgtgaggcaattggtttgctctttagagagctgcctaattggcaatgtgagcaatgtgtttagtttacatgacgctttcagttttccaagcatttatttattttgtccagaaaacttttcctacacctctccaacaatccaatcaaacagtccatatctctaactgatatttgttacatacttttcttgttttcagtcgatatcctagtccttatagagggcctggaattgttggagttgtaagaaactcagaaatattaacaaaacagaaatgatcgaaggcaccaacagaagagacctcttgcatgacatgtgttcattgttgatagatctcatatgatattcagctaatgctgtccaatgactgcatagattactactgaaacattgttttgtcctaattcatccccatctctggctgagatctagaatggttagttcagtctagaagatctaaatgtgtataacatgatcacaataatcatataagtatactaaaattcagaacaatagatctcaatttgcagaatactttggatacattgctgctatgctctcgttttgtcaagcaaccagcgtaacaaagataggtgaatttgaactttcagtgcagtttcgaactggtccccttctccaatcttcattaccccgtggaagaacaaagtcttaaagtgtagttcaaagcaaaaaaggaaaggtacaagaaagcgactaggttctctacacctagtaggtgtcatgacacccaacatttacatgtgacttaaatagttattatagaaaaaattaaaaaaatttagtaacatcaattatgatgatataagtctatacacaaacatgcaagtttctatctaatctacaagtaaaaaaataaaaataataaaatttgttaattttgtttcttcatgtgtctgctggggaactcatctttagtcctggtttacaacccctttaatcacaggttacaacccgggactaaagatgcccatcattagtcccgcttgaaataacccgggactaaaaattgtagcactaccatctttagtcccggttggtgttaccaaccgggactaaagttttttttcttttttttcagtgttttttgctgtttgcatattggccttttttttcattgttttttcacagatttaatgaacatcacaaatttatagatcgaatgaacatactcaaattcacatagtgaacatcacagatcaaatggacaccacaaattcacaaaaacatctgaaaaaatgttcatctaattatttttctattttcgaaatttattttatttgttattcgaaattttaattgatcccgtcatgtgttctaaatggtcttttcttttaatagttttaattttttattatgaatttttaaattgttttcctaactgaactcttatttttcttttttttaattaaatattttattttattttttatttagaattttaattcatctcggttggtgttaccggactaaaaattgcagcgctatcccggttggtgttaccaaccgggactaaagttttttttcttttttttcattgttttttgctgtttgcatattggcctttttttcattagttttcacagattgaatgaacatcacagatcaaatggacatcacaaattcacaaaaacatctgaaaaaaatgttcatctaattatttttctattttcggaatttattttatttgttattcgaaattttaattgatctcgtcatgtgttctaaatggtctcttcttttaatagttttaattttttattactatttttaaattgtattcctaactgaactcttatttttctttttctaatttcatattttattttattttctatttagaattttaattaatctcgttttgtgttctatatggactattattttcatattccttatttatttttttcaattttagttgtttcaaaattatatcctacttgaactctcttttttatttttctaatttcagattttattttatttttagtacaaattttaattaatcacaatgtgtttttatatggacttttctttcaatattacttattttaaattcaaatttcagttatttttacattctagcccactaactgccattaccgtgttgcttaacgacttgcccgttgttcctccccttaatcgtcgttgggattctaaaaattgaacctaatcatcttttcggttttgttaatagttttcaccagatgtcccgttaaccgtcaccaccctattgctttataggtctgttgttcctcttctctttattgtcatttgctattattgtattttttaatggactgttcttttaaaattttgtatttttttcattccttttttttgttatttgaaaattttatttctatctgaactcttatttttatttttttattctttggaacttattttattttttctgaattttagttaattaacctcatattctattctacatctactgttctctcaataatcatttttattttaaatt

SEQ ID NO: 6373 - DNA, 7641 bp, Oryza sativa
ggcccccttgccgccctgggggagggcgatttttgcctcccccctataaagcccagtcccccctctctgaaatttcattatattcactaaaaatccaaaaaaaacgaaagagagagaggggagggcagcagaaggggagcggcgaagccctgctggttcgctcacttcatcacaggtttgctctcatacatcttttgcatttgtactaatatgttatgtttgagtatatatgttgcgttttagttttagttctatatattttagcatatctgtagcacacagcacatatgtgtagatccagagcatagaatataatagtatgaattgagacatagacagtagtgttaattgtaagatgtagtttagtttgatctggagaatgtaacctacttttagaattttggagaacaatattgtagagaatgtaacttagggcgtagtacagaaatgcgaggttaacgcagttattgttttcatcaggcacaatgtcaaataaggtcacatttcagatagttcacggtgaaggaaatattagatttggtccagatggtgttgatctgtcagattttgtaataacatctaagggcatcgataggcctgcggagagaacatttcagtcaatttatagttggttgttgagaggatttagaatagaccaagaagtctacacaatgtcagtatcagttgtagtgagtcatgcaacagaaggttatttttgggaactaatgccgatggacagcactgctgcttggtgacggtatgtggaaatggcttttgaacggtcatggcccctcgttatatttgtgtcggtacaagagaaagatataaatgtttcaatgcaaaccgaagatgtagagggtcctatcaaggcaggggatgttgttggaccatcgatgcaaaatgaggaaaatcaaccaagggaggagcaggccatgggcatggcggatgagggggagagagtcggtataattgttgatgaaatggagagggaagattcggataatgaggaagcggacgacgacgcatcatccgatgaggaaggtgatgtaatggccactgattgggcaaatgaggacttttctggacttgttacatcagagggtgatcatgtaccctgggagtataaggagaacgaggtaattgacggtgcaaggtatgctcataaggatgagatgaaggaggtggtgaagcattgggcagtttccttgtagagagagtttagggtggtcaagtcaacaaattatgtgtatgaagtgaggtgcatgaaggaagattgtccgtggcgtgtccatgcatataagggtaaatggaatgattattggaaagttaccattgtgaccgagcacaagtgctacttacaaggggtggagaagtatcaccgaaacatcacttcagctttcgtggcaagtgagatgtacaacagtgttgttggtaacattggctttgaaccaaaatcaattattaggcacatcgagaacaaattcaagtacaccataagctatgcaaaggcctggagagccaaacaaaagattattgagatgaggtatggcacatttgaagcttcttatgataatttgcctcgtttgttagccaccattgcccagaggaataataatacttactatgacctacatacatttacatcggttgatgatcgaacaaagagtgtgttgcaaagagcctttttctcattgggtgcttgcatcaatgcttttgtgcattgtcgacctgttctatgcatagatggaacttttatgacaggtaaataccgaggtcagatattgacagcaattgggtgtgatgggaacaaccaggttgtacctatggcttttgcatttgtagagagtgagaacactgaaagctggtactggttcctagagagagtgcacattgcagtggtgcgtatgaggcccaacgtttgccttatacatgatcgtcatgcgggtatgttgcgggctattgactacttgcagaacggttgggatgagaagggacttccagctaagtggcctgatgttcggagtcggtggtgcatgcgtcacatgggtgcaaatttctacaagcaattcaagaacaagcatcttatggagctctttaagaggctctgtgcacagaaccaagagaagaaatttaatgagttgtgggacaagttggatgagttgacaacgaagcaaacagatgagcaatctcgcagaccacaagttgaaggtgacgagcctcccatacctcttggtgcattacatgatgacccaccaacaatgagaaggaggtcagggtcgtccatcagaaatttcactcagtggattgagaatgagcctaaggagaagtggtctctattgttcgacaccgatggatctcggtatggtataatgacaaccaatttggcagaggtgtacaactgggtaatgcgaggagttcgggtacttccattggttgctattgttgaattcatccttcacggcacgcaagcgtactttagggatcgatacaagaaaattggtccgtccatggccgataacaacatagtgtttggcaacgtagtgacaaagtacatggaagataaaatcaaaaaggcacggagacatagagttgttgctcaaggcacacaagtgcatcggtatgaaataatgtgtgttgataggagcaggcgtggtatctatcgcaagcaagccgtgcaggaatgtgtcttgaaggcggatggtggatgtacctgcagttgtatgaagccgaagcttcatcaccttccttgctcacacgttcttgctgctgccggtgattgtggcatatctcccaatgtgtacgtctcaaattatttcaggaaagaagcaatctttcatacatggagtgaggagatatatgggttcgggatctcaggatcttacacaacgctgagtgcccaagttttttacattccagatccatctaagttaagggtgaaaaagggtcgacgccaaactagacgcatcagaaatgatatggatgagtcagaagcaggtgggaggactttacgctgcagcaagtgtgatctgcgcggccatacttacaagaaatgcccgaagaatgcagaagttccaagcggcgcagatgctagtccatctggacaggcaagtgatggtaggcgaccacctggtgaaggaacaacaagcaggcgcgcaaggccaaggcgtcgtcgcgcagcaggcgattccatggtgtaacaatgctatcgatttaggaaataaaatgctgttgtgatgtgatgagtgttcggactaaatacttctatcgtgtaatttcaattgaatgttgttgtaatgagtacctccgactattgttgtactagtagtattgcgaactattcggtgttgtatcataatgttattgtgatgagtgttcggactaagtactcatatcgtgtaactgcagttattgttgtaattagaaatattccgtatggtgacacttttgtttgtttgtactcttgtttaatatgtgttagtaattcgcttatgaacatttattacttatgttgaactaattatttatatgtttctgatcaatctatttgatgcaggtatggcgtacgacacaccggcgctgttgaaccgtgggattgacaggaaccaccgctcgttcctgtcagcagtcgagggtgcacagctcggcaccttccgtccacgcacgtcgcgcgagtggttgcgtgtcgacccccgtcacgttccttggtacgcgtatgttcacatttcaactcaactttgctttgtgttgtacttatgtttgaagtttgctctatacaggttgcgtgcggcaggccttctaccactttgtaggcttgttgaggcggcggcggacgaccgtgacccagcgaagcggtgggatgcagaccggtcactccttgccgctctggtagaccgctggagacctgagacgcacacgttccaccttccctgtggggagatggctccgacactgcaggacgtgtcgtacctgctcgggctaccgctggcgggagcaccagttggtcccgtggacggtgtttttgggtggaaggaggatatcactgcgcgcttcgagcaggtgatgcgccttccacacctaggaccggccaacacccttcctccgtactctacagtcgggcctagcaaggcttggttgctccagttcactgtaagtaaataagttgttattatcatacatgcttatttgcgatcaacagagtgttttgtactaacatttcattcttaattgtaggcggaccttctgcaccctgacgctgatgataactcggtccgacgctcccttgaggcgtacctgttgtggttgttcgggtgggtgatgttcactagcacccacgggtacgctgtggacttccggctggtccactacgcacggtccatcgcggatgctcagccacaggacgtgccgcagtggagctggggttatgccgtgctagcagccacgtaccgtgccctctgtgaggcgtgcacgaagactgacgcgggagcgatcatcgctggctgccctatgttgcttcagctttgggcagccgagaggtttgccataggtcgaccagtggtggacagcgcaccctacggggttggtcgcagcgcgcagtgaccagaggacggtcccacgatggggacttactggtgtcgacgtggggttagtgcaacttcgctgcgttataagtttatcagtcgtcttctttttttatttcacataacatgtctaattccgatcatgtttattgcagcgtcgttacgctcacgtccaggtgagacgaggttacccagacttcgtgttcgagtttgaccgtctccagccgagcgacgtcatctgggagccgtacacagaagaggccgtcgctgcgagagcaccgctaggactttcgtcgttgtgcacacgcgaccaggcttactggctcaccatcctaccgatggtgttcgacattttcgttgagcctcactgcccgcagcgtgtgatgagacagttcggacttaggcaggtgtttccgggcaacgtgcagccgaccgtcctccctgccgaccactcgtgagttcggattgttcatttctaaatttttatgataattacttcatcgagccatataatttacctctcttcacaggttgactcgacggggacagctagcaggcgcactttgggctccacgtgtacagcagtacgttgacgactgggtgttagctacagaggaggtgatcaacgagctcttcccacacacggaggagaactaccgtgactaccttcgctggtaccttcctcgcactcgtgcgcgtgtgaccttcactccagacgccctagagccgcacgttgccgctgtgacggacgcgtatcccacgcaccgtgaccgagactacttcgtgggggtacgtcggatttgtattagttcttacaattatttcatttatcttgcataatataggacaactactgaatttttttatttccatcttgcataggctgatgccgcacgggatatcagtgccgatatcaccgcagtccaagtgaggttgaacagaggtttgcacttgactgacgttgagcagagggtgaccttcgaccggatgcaggagaagatgcgtgcggtcatgcgcgtcttctcctgtcgcagcgccgtggacgtcgtacctccagctggtccggtacaaccacggcctcgcacacctaccgtcggagcaggacctcgacctacggtacctgtttcgcacggtactgctcagcccagaggtttcttaagttttgtttctgtttttgtacgaaaacatcaccccgtcataacttgatgttccatcctcgcaggacctcgtttgccttcgagcacccctggcttcggagcagtgcgacctacagcaccggtttcgcacagtacagttcagcccagagattagttcatttttgtttcagcttttgcacgaatatgtcaccatgttttaacggcacgtttcctcatcgcaggacctcgtctgccttcgagcgcgttcgcaggcacgaccggcgtttccgcgagctccgcaggggcgttcgccacctcttcgggcgcgttcgccagctcttcctctcacggagcgtcgatccctcgcccacacggtactttactttttattaatactattaaatacctgtatgaaactgatggtccttgtccagcaggatttgcagccgggatcttcggtactggggcctcttcgtctcacgccggtaggactggtcctactagccagttctacgacgacgacttgcacggtgcacaccaccacgacgtactaggctcctctcagcttggaggagctccagaggagcacactcaggagcagccagagatcacacctgtacaggcaggacgggttggccgtgccgtacccccggaccgactcacgtactcccaggggcacattagggcgcagggtaggagggataggggtaagaggcctcgtcagtagtgttctacctcttcattccttatgtgaccgtttcttttagcttacaaacttgtaaagcagtactacttttgctattactactgcagtactacttgtgtttgtctcgtctacatagttcttttcattcatatggtgctagaacaacttatgctcacgacaacacactttcggcgcttcacggtagtgtcagatccagtagcgcgcacagtccacaacagcacacatgaaaagcggcagctcgagttgtcactatcaactttcggcgctgcctgttgacataaagtgaatcacgcccacgcgtgattgtcttgtcacatctaatgaataatgtatctcattgagttcacatatattgcagtgaaaacgacgctatataattgacaatctgaaggcaacctcttcatatcttctttcccactagcacacaacacacgaaaatggaagcgccattccttgagcgtctcaactggcgaagcgatccttttgctggttggtttccaccatggtgtgaccgtcctttgtgcgattgtggggatggatgcatactcaagtcttccctcatgatacaaactcggggcaggagattcttccaatgcgcgaactttgatcaggtatgcttcatctattcgaagttcaaatggataaaaaaactaacttcttcgtacacaattgtaacatcttacgcagacatatcgtccaatgtgcaacttcatcgagtgggtagacatggagaacccacaaaatgacggaacccgtgcttacccacgtagtgaaacaagatcggactacctaaggcggaaggatgagcatgaatgtcgaattgctgctgaggctttagaatggcacgtaaatcccctaggactccccacgtggcgtgagcgtccggagtgtcgttgtggtgaccgttgtcaggtcataaggtccgtaaggcaccgaactcgaggacaaaggtgtttcgtgtgtccaaacattgtcgacgatgatttcgtggtaattacaactattcttttcatcactcctcagtactatcattaacttaactatcccaaaatggatgtacataggaggatgtaaggaaatgtcaattcgtacaatggattgacacagtcagagttacttcaagtggcgggccgataacgcaacctgaatcgaccatacagttcattcatgcttggatggagtacgaacgtcgggtggaaat

SEQ ID NO: 6374 - DNA, 6413 bp, Oryza sativa
atatatataatcatcaaaaataaaccatcaaggtcaggtgaattaatgagcatatatactgcctatgttttactaaaatataagcatttctaagctttttaatgaaattaagaataagtgaaaaggacttctagatgctgtgcatttaaattatgttcggagaatgagagatagttaggggtaaaattagatgtaaattaaataagcagttgttcggtggggaagtaactgtattttggcataaatttttaaacacggatcatatagctactccatccatttcaaaatacaaggtacaatatttttttccgatgtttcataatataagtctcatacaattaattagcacattactatctcctaaatttgtttctttaatcaccactcccaagatctttaattccattaattgaatacatcatcacatgtattgtattattaaggtatcaaacaaagatgtgataattagtatttgtgttagtgatggttatatcttatcttttgtgatagagggtagaacggagtgagcattcctgattgtacatggagcttcaaatatcagtagatattttctgtacgggatatatatggccatagctaccagagaagtcgatcaagttggaattgacgatgacatagtttatctaatttatatccttctcattgtgataatgaagtgtgttaagttaagcctatcttatcataaggagtatgatgaattttaggagtaaatttcacataaacccataaactgggacactttgttagatgatgataattttgagaaaactttaaaaatcttaggtgatgatcaaactgggatagaggaactatatcacaaaactatagatttattgataaatttatcacaaaattacaaatttaattaaggccaagtatcacaaaattacatatttaatattgaaattatcacaaaactacagattatagagtttaaatccctagcaccgcggttatgttggagctataaacgttgcagttttatgattaaattggcactaaaacatttagttttgtgataaatttgctattaatatttatttttgtgacacgtcattttaaatatatatagtttcatgagaaattccatgctaaatctgcagttttgtgatacaacacacactataaatatattttatagttttgcgatagtttgatcgagtatctatagttttgtgaaattttatttatttttaatttaagttgcaaacaagctcctttaccagcacgttggacttggacgtttggcttgccacttccccctcttgtcttgatgagcacagatcgatttatattttattcagcacagatttggatcacgcttcccctgcaaatcttcaatccgatctctgcaagactgctactgcaatacggagtagacctcctgacagttacaggtacaaaacgtacggcttataaccgaaaaccaccaccccaaaaaaggccaagctcagctcaacaaacgtatcaccctgcatgcatgcaaacacgactgattaagcaaagctactccttctaatccgcagctgcagcaaaaaactaacaaacttgccttgagaattgagctcagaatcgaatcaaattaacttgcacttctctagtattaatctttcgcaagcagccgcaaagaaagctgtgagaattattggcgcgtaggaaagaaagaaagaagagaaaagattctgtcgttggagaggagaggagagtaattcgcccatatccgaaaggcatcatctctccatccatccatccacccatccatggtgatgatgatgatgctgatgattcatccatccatccaccatcgtcgtcgtcgccgcgagcgagcgagcgaacgattgatttctttgcagattccgagaatttatcccaaacgaatccggccatcatccccctctccctttaaatccacctccctcccagcttcgtctcctgccaccgtggagcactcgatctccaagctcatctagctcttcttgcttcagcttcttcctctctctcacagttcatcacacttggctttttgagtcaggtgcttgttcttcctgctgttcttgccttggtaatgctcttgatctcttcttagatgtaatcttgggttagctagcatgcagttcttggggtttatctcatctttctgtagtttagtgtgtcaggtttagtagtaattgttcgtcgagaaaacaaaatgatatatgggttggatgaatggagaagaatgtggttcagttcagtgtgatcatcttcttgttgtggctctgaatcgaatgagctgtgaatttggtgaatttgcaggcatatgcaggaccagctgatctgcagcggctgcaggcgcgtcgtccagtacaggagaggggtcgccggcgtctgctgcccgggctgcaacacgctcaccgccgtcaacccgtcagcggtggccgacatgtcggagctcatctgcagcggctgccccacgctgctgttctacaaccgcggcgcctccaacatccgctgccccagctgcaacaggctcaactccaccagatcaggtgaatgatcatatttttgcacatactatatctttctctgaaaagatcatatttgcagctgattcagagctgcaaattgggatgaaattaatctactgaaatctgagctgatcatggatggttttatttggtggttcagccaaccagattgcacacctgacatgcgggcagtgccggacgactctgatgcacccacctggagcctcaactgtgcagtgtgcaacctgcagatatgttaaccatgtcagggtatgttctcatctctgaatgtttctaccctctatatttctcgcatcgcgcattcgctctccggtttcgctctctggtagtaatcatcgtcggctcatcggctcggtgataaccagggttggaaattccgaaacgaaatttccgaaatttcggacattttagacctctctgatatgatattatttcggccaaatttttttatttttttaattttttcgtgaactttggtaatatttgttcaaattcaactaaattttattcaaaatttcggaaatttcagaccgaaatttcaaaaaatttggcatttccatgaggaccgatcaaatcggctaaaccgaaaggtttaaccctggtgataaatagttagtgtgttcttgaatgatctttccacaactgaacagcaacctgagttgatcaactggaaagatggaataaccttttaactttgcctagaatatcagtagtcggcacaggtttttctgaagctgaaaatatggaattttcaattagattttctcatttctgtgaacaaaatttcatgggaccattgactgaacaaaccagcacttgcttttatctttaattttgcatcaactaggggatgcatatggttctcctcttcttaaaaaagatgacaactttggtaggttcagcttgctccatggtttttcatggaatcagttctcaaagtaggcatgtacctatgattagccagcagaactcgatgcctcggccaagatttttatcttccaattccgttatcaggacaatgaaactaaatgatgatggtccattgggacaaatgaaacaatctgaatcttatgtgatgtcaaatgttccatgatgacgatgctagctttgttctctgaatttccttttctttctcctacttgcaggatgctcggcctcaaactgtccttgtagagaatcctaagacactggatgataagggcaagctggtaagcctcatctctaggctatatatctctactatctactactttaaaagacgcagtcctcccatcccaccctaccgcacgcagcacgagaaaatcttgtaataaaccgaaccggcccacccaccgcaccctccttcccgcaccgcgtgagagaaaaaaaaagtgcacgtccgacttccatgtcgtcttctcgctagaaaaaccgagtttcagtatcagacaaaaatatgatagttgtttttatgggtccattgcaacgcctagacatttaactagtagtaccctaaaaccaaaatttccttctgaatttttttcttggaatagcagaaagtttcacttctgaaatgatagctgaagagtacatgtatttcagctctgaaatgtccagttgattgactgttctgttttgttatggtataggtgagcaatgtggttgttggtgtcacctcatggaaaagatgatgaacaggggctcatctagggtttaatcccaagggtctatggatgattgatacccttggtggatttgtatcattactacaaagctattgttaaatcaagtgtgttttgaagcttgatataaacaagagaaaaacaatagggcaaaaaatgaagaaaaaaatatatccgaaatgtgccatgtttgtgcttcttttgtgagaaaaaaaaatgtaaatatgctggctatggtgctagcctatgtgctttttagcaaaaaggaatggaaatgagatgagcagcattgtgtcctggaatttttatcctcatcctctttttatttctgccttggacaagctgagtcaacattgcacttgctctctgggagtttttgattcttcatgcagttgaaaaaaaaacttgaaaccactgttgagaaaaaagatagtgatggccacaggagatgaggaatcatgccttgttcttttactgtggatagacagattgatctttccaggcaaaataagcttcttcagaaagacttcttaataagatttgactgtttaggattatccagtttaagctctagagaaaagggtatataaagacatggcatgggttgctttcatggagctgataaaatatgccttttctatattgaaaaatcaaatattagtatttatgaaaaaataatttaaggacattttgattcgtagttttttctcatagaaaaaatgcaggaataagtcttttgtagcagtaaacacttttaagaaatatcataatgttttttttaaaaaataaggactaaaagaaatacacaaagcaaattttctggaccttgtaaattaagaaatccccaaccagcttggtcaaaaacagtacgagatgctagcaaaggttggagtataagatggcacttgtttgaccttacatgtccatatcaatattttttttcattgacagattaagtagtattgtccacatcagtttaaattttcgttgatatattaggcaccattttccgtaccagttttatttttcggtcataaattaagtgccatagtccatatcattttatttttcattgacaaattaagcactataggtgacatcatatcgccttcatgcgaagcttccatactgaaacaacaagattagaaccttcatatacccatgtctgatgtgattggcttcatgtatcatcagtcctcgttccaaggattgaccaaaactaaaactacttaacgtgcgtaaaacaaatgtaagaatgagtcatgaatacgtgtaaaattcaaggacttatcttaattcaggaagggaaaaagaacatagctcagaagacgcacacatacacgcacaagcagaagaatatacttcataaatcctcatcctatgctccaagagacgaaagcgtaaatcccttaattcatctgtcccaaaatatagctacctaatataggatgtgacattacctagtactacgaatctggacagcctacacatacatgcacaagaagaagagtataccctataaatcctcatcctacgctccaagagacgaaagcgtaaatctcttaattcctctgtcctaaaatgtagctaatgtgacattaccaagtactacgaatctggacctagtacaggaggctgtccagattcgtagtactaggtaatgtctcatcatgtactagttagctatattttgggacggggaagtatcttataacgtaatcgagtgtgcttaatatttatgtgtaccaacaaattgtaaaagtaggatgtgtatgtgtggtgtgctttggtgtatgcatgtgcgcatattctattcaattaaatgaaaatacacatatatggagcaccgatcgaaggcaaaacccatgttcatatataggaatttaaaataaaaatacagcaaaacaaatcctcgatcttagccccaataaaaaataaaaaatcagctcgtgatctattatagctcaaactacaaggtaataaaaaaacctattaaaccgacaaattttaatcaaacctgatgaacaaatcaaggcaaaacgaattaaactaacattatataacacctacacatcgtgagatccatgcatcatcagagagagattcccaaattagtcaaccccaatgccaagattaccaccctcattatcctccgcattataatcacctgaccaaccttaattaattaagctaaatttcacgc

SEQ ID NO: 6375 - DNA, 26963 bp, Oryza sativa
cgtggactggggaatggggacggaggggataaggattggaatggttagggttacacaattgctttatatactctatgctttgggcctggtttttatgggccatatgggccaaatacacaggatattactacacacatacttttatatcgggcctccacggagggcggggacgggggacggggaaccaaacccgcccccgccagacccgacggagaatactttctctccatttgattccccatggagacacaattaataccatcaccatcacctaatgggagaattctccacgggggaccggggaccgggtacccattgccatctctaggccggttgttatatgccgatgtattaaaaaacgacgttgatgatattttatgtgttagtagttttttttaaaaaaaaactcgcacatgtattacaaatacatacattgtatccaaaaagagctggattcatctttaaagccagtcccctctaatcctctctctcttccctggaattcctcacctcctctccttgcttctctccccactacaattcttttaggcaaaatttgttacaagacactgaaagattacggtctttgctgtgagacacccgaagatcgtgtatttgctcgtggacactataaaaaagtggtaattagctgctggacactcatcccattattttattatttccggtcaaaatggagagagaagagttgcgtaagtaccaaaatacccctgtacagtgttcttcctctcacttcttttcttttccccatcttcttcttcgcagtggagcagagggcgacggcaaccggcccgagccgggacggctcggccacggcggggcggcagcggcggcgcatcgcccacgcgctgccggcgacgccctccgcgtcggcgcgatgcgcggcggcggcggcgggctcaacttcttcggtcgcgctcccatgccgcccgcctagtcgacctcatcacctcgccgtggcccacccgcgtcgtcacgtccaagcacaccgccccctcgtcgcatgctccgcggtgagctcccgaggaagccgcgcagccgtgtctgtgaggcactggcaacgtcgtcgaggccgtccgccacgagtgctccatcatgggtgaaatccgcgcgctccacaacatggacgacgacgaggtcttcgcctacgccaaccgcatcgccgcgccctacgacctcgtcatgcagaccaagcagctgggccgcctccccgtcgtgcagttcgcgaccggcaacgtcgccacccccgccgacgccgccctcatgatgcagcccggctgcgacggcgtcttcgtcagctcgggcatcttcaagagcggcgaccccgcacgccgcgcccacgccatcgtgcaggccgtcacccactgcaggtcatcgcgtccaagcacgccgccgcctcgtcgtcctcgctggcacaccttcgccgtggagctctgcccggtgtgccgcgacagagaaagagaggaagagatgaacggagagaaagagaggaagaagaacagagaaagagagattgacaagtgggcccatagacaaatttgcctttaaccaaagtttctctctccattttgaccggaaataataaaataatggaaggagtgttcagcagctaattaccacttttttacagtatccacgagcaaataaacgatctttgggtgtctcacagcaaagatcacaatctttcggtgttctgtagcaaattttgccattgaatgtgaggaccgatgactatgagtgctaatctgtctgtctatcagtaaagagtacggggcatgacgctctttcccacctcctgttcatcaattgggattcatttatcgatcagatgcatttcggggaataaacttttccagactagtactatgccaaattggagagagagtatgccgatatacatagttaataaaaacccgtagcgccccattactttctgtttttatatctttttatatttttttcttctcggagaatttaatgtgtattggactactttggaaaagtttctcgtgtatatgcagaattttaaacagaagctcccacaagctgacagcttgtgtttgtttcgaagaacccctcaaccttgaagaaaagtataaaaagacgcggaaaaatttttgcttctaagaatatataacgctctaaacatattagtagaagggtgttttcacataagagctatccctcaacccaacacacaccaaaccatccacttcttggatagttcgcctactttcagttcatggaaaaattatttatttattcagcttaacctttggtttgccctacgtctcagctctgcccttaatatgattgtgatgttcatatggagctctcgatggtctgagttgattgaggttaacaaactaaagttacttaatcgtggatcagttctaatttatatagatattcctttatattagagcatcatttttttcaaatgatacactacttaaaaagaacctcataggaagcactatcataggtattggtacataaaaaacgacacatatgagattttcccttttttcataggtctataaataaaaactggtataatgacttacatatgttggtttataaaaaaaggcaccaataatccctcaactcatatgtatcggttcttataggtagccgttcttgtaataaaccggtagctatgagtgcatcgtaacaggtgtcgatttttattggaaatcggcacatatggtcatcatttatctgccgaccgttgaaaattaaaagcggcacctacgttggcgctgctaatatatgtgtgttttgcacataacttttttatataaaatcggatgaagataaattttatatcaaatttctagagcacggtaagttctgcatctttgtagttgatgatatttttatttgagatcatttggaagtctgaaatatgtgaatttattttggataagtgaatttctaaaagttcctagatctatttggataagtgaatttctaaattttctaaacgatctccgatggaggcagaatctatatgaaagttatatatctaaatgagatctataattttgtagttgaaaatattttcatttcagctcatttatagtattaaatagtagtaaaaagactttgagtggagattgaggttgtgggctcgaaccgttctaactccatgcgcttgaaaataatgaaaaaatattgtgagttgtccaaaccaaagtgtgaccatgtataaatgactagtaaaatacaaaatattttttgggttttttttcgagcatgtaaaaataaaatagaggtgcaccttatagggaaatattcatttggtttattttgagccaataaaaataaaaaaaatcatctttataagtgtcgattctaaattatatccggtaaatcttgtgagtaggaaccaaagtatgaccatggatatgtagtaaaatacaaaatattttttttgtttttttagccctaaaaataaaaaaacgggtatacccctatatttgtcgattccaattagaacgggtaccaaactaccaataaggatatcattggtgcccctcgttagtaccatctgacgggtgttggttggggagtcaacactatgtagggtttatgtaataatgacatgctacccataatttgttttttctttacacctagtacctcatgtcgcaccactagctgtgtgacgtggcactgcgatccctctatcaggaacatcagtttatatatattatcatgtgttgttcaagctcgggtctcgcattaggcacatagcctgtcttatgttggtgactgtttttggtcgcagtcatttgtagtttcttaagcatggtacatatttgtttacatccactcgaacacgtatggatcattagttcgacacttcaagtattcaagtcattctgtatgaactcaaagtgacaacggaggagtttcaagcacttttttacgtccattacaacttgtgtgaatcatttcgtaacgaatggagtgcacatagagttcacatcaaattgagttaaatcatgccttgtacactcaaaatgacaatcgaggacttcaagcgcttttctacatcccctacaacgcgtgtgaatcaattcattcacaataaattaatggagtgaatattgagttcagaacaaatagagaccaatcattctatatggattaaaagtgttattatattagaggagattcaagtatttttcctgcatccactgcaacgcgtgtgactcgtcggtccgcaactgaagtaatgaaaattgagtttatacctgcatggatcaaaagttacattataggagtttcaagtgctttcttatatacattcccatgcgaatcattggttcgcaacaaatgggaagaatcattctgtatgtacttaacttgacattagaggagtttcaagtatttcttttaacatccattataactcgtttgaatcattcatttgcaatgaacggagtgaaaattgagtttggatgggagggttttttcctccgtaatttttgtatcttcttaatgaaatgactcacaatactaattatcttgcatgttcgagaaaatatgtggttcaagctatagggttacaggtggtactttttgttgccctgtgcaatctttgggtgattcggaatgatgtacatcatatcgatgttccagagtctcctaacgttgtcatggagaggatcgctttttggttggaagaatgggcaaatctgaatagtggtaaatcaccagctgttcactacccggcgaaatggtggcaaacgccttctagcggctggttcaaggtgaacatagatggagcattcatggcgtctgaacttaaggggtctgggagctgctagctagagtagttctgaggaataacaagggtaagattttgggggcagcatatattagcatgccaaggggctctgagtctggctataaaaatgggagttgcagagttgattctgaaaacggatatgttacatgtggtgaatatgctatctgaagaagagttcaatcattcaaagtataggacagttatccaagagttgaaatgtaagctcaggtacttccacatgttttaatgcaagattgttaatttgttattctcgccacaagaataagggcatttagcgaccctttcccatgacccacggatgaaagagtcaccagaatgtatgcctctattattttgcgactcttcttggttgtgagattatgatagctggtgacacattggatgacttttgcagaagactcaaggttcacaaatctagtgataagagcaaccgcaatgtatactaccaaagtggataataatgtgggcccagggttcaggtggtaacagttattacaaatctcacaatgtgctatgcctattctgcaaattaaggtggggtccaccttaaaaagaatcattgtaaaactatctcctatagccatgctagtacaaaaagattcccatatctacagaaaatattgtttattctcttgttaccggcagtagcacagtggcccggtagtagttattgtctctacccacaatgcttcttacctggttataagtctatattaattacttgttacctgctttttgttcaacattgtggttgcccttaccagctggtgacacattggatggctgtctgtagaagagtcaaagtttttaagtcttggtgaccccttacaagtgccatgtgttgtttgtttaattgtagaaacacttatgtttaattttctagggaacggtttacgaactggtcctcggttcccctatgttccttatgtcttactcccttcgtcctaaaatataaagaattttaggtaaatatgacacatacatcctagtacaatcattctaaatagactccatgtctagaattattgtactaaaatatatcacatccaccaaaatacttgagacggagggagtatcttgatgatggctatgaagagcccagtatgtttgaataaagtgtctttaggctgtgctgtttagggcactcacagtgcgtagccaacactgccacctagactaagaactttgtatgcaacaacctccacagtgcacgtggtcttctttttccttcacagtggtcccacccttctctctcctcactttttacctcctctcctatctctccctgccttccccaaccaggccacaaaactgctccctcctctagtgcgccgccggcgcctcccacacaccgccgtcgcccctctccccctccgccggcgtccctctccccctccggatctggcggcccgccggcggcgacacggcgcgggagccgaaggcggacgaccctgaggcgatctcggcgaagggcgctagcggcggatgaccccgaggcgggctcagcggagcgcgccggcggcaacggggcggagacggcggcgcggtcggcgacggtgccgaggcggccaccctctcctcccctgaagcggcggcggcgccaccgcgctgcttcggcttcgccttgggcttcttcgacgaggaggaggacgccgcggcgccgcccttcggcctccccatggcgcgggcgcgtctctctctctccttccgggcagcgcttgctgacgagacggcggcggcaggcggctagatccagctcgggcggagaggcggcgccgggagttggtttggtttgcttcttctctacttcaacggttggtcgacttcaatgcaagaaagcatcggcagcaattgctcctcccgtttagttaatgtcgtccatggcctccaacgaaggtattcttctcttctttctcaaatattctgtttctcgcatatatgtttgctccttttttttttccttctgctcgcttctctcttcttctgttcgtcttggtgatgacgaaactgaaggagtatttggtgattgaatctgcagaggccggattcccttctctcctgtgggatgaactcaacgacgacgcggggcaggatgaactcgacgacgacgcgagcgcgggagaacgacgaaacgaggtcacgacctccacaatgcgcgcaagtgcctgttcctcacgccgctcgccctggatttggccgaggaacgcgtgaccaaagttggacgcgcggacttgagaaaagtgtgccagaagctaacgtggcaaggaatctatgcgctggcgcagtgaggctgaacgccatctcaccgcattgtaaatggccttagtgtgagttctagctagcttctaaaaatacaataaccagatttgtggcacacggatgttggacagttggagtgctgttttaggagtctctgaaaagtgaccaagaatctggcccttgggttaatgacaaatttgattcaacgataatacatgaatttaattgaatatacacatgattttacaccactgactgtagtgacaaaaaaaatatttcagctctatagatgcaatcaaatcgtaaatgcgttaattttaaaactacctgtctatctgaagaaacaaaatagcaaggtcagctgtaatagatagatgccagaacaactaacaagtcggtcagaagaagcccgatagcatcaaatacgtattttggggcaaataaaccccagacctgcaaagtttgacattgcatagtgtcacataaagtccaccataattaattagcaaaagcaggaatactcgtggtattcttatgtggcgctggggtaaaaattaccatcaagtgacgccgttgaatggtaacacaaatgattgtaagcgttgttgtgattgatgtaattaaaccatacatcaaaagcacctaagtgaaacaaaacagacaaggggccccatcgatcagtaagcaaacaaacagaaaacataatttggtctccaaatggagttccataatgcatgcaagatcagtactccctccggttccatgattcttaacattttggatagggttgaggtcaaacttttgtaactttgaacatcaataactttaaatatatttagtttaaaggaagtagaacaacataaaaaataaatatatttagtttaaaggaagtagaacaacataaaaaagtaaacacgcatttatttattgtatatatatattataatagaaaaacaaagtcaaagatgtattttgaaggccgtgtcattgtccaaaacgtcaagaattatgaaacgagagggagtactacgctttgtcctattgtttatattctgggagctccaaattattttttgtatccaatattttagtgcctaactacttgcagtatatttgaatttggcatagataccttgaagttagtattttaggctgctgctttgtaacgttaaactggtccagaaaaaaataaaactactccatatttctaactaattacctgtattaatctggtgacagtggcatcattcaccttgctgttcttggatgcagaattgtaccagcatatggcaataaacggaagactaagaacaggcagtatgtgagaaacgccaaaagtatcaatggaaagaagaaggccttgtcggataatatggaaatgatcaaacctgtaaaattaattgttgtgataagtaaaccgtgtgcatcatgagagatgcctttcagcatttatatttggaacatgattacactcacccaatgaatgcagcaccataacggaggccatcaaaggtacacctgaaacataatttttgatcaacaatgtattttcaacaactccatctaaaaatatgaattaaatcacatcagatacagaaaatacaaattgtacatgcattttattccagactaggaaacaaattgcatactaaaaatgcattattaacagaaagataaattctaactaaaagataaaggtcagtaacatccacacagcaaagaaattaccaatgacccgtcagataaaatagacaaactgccagaaagctccattgtgttactgaaacagagtcagcagcatgtattcctttgtcaagtttcagctctctctgatttttctgctgtaactttattatacaccatgctgcaaaatgaaaaagaaaatcacatgccatgctcttaattaggacataacaggaaaagaatctcaaatagtgcccaaagtagtaattgccatgttctgagaagcaaccatatgtctaggaatagagctcacagtacctatagtcatacaaattagagccacaaagggaccttgtcttcccaacaagatcaagatagtaggactccaggagcacagcatgacagctgacaaactagttatcctttcattcatcttcaaatgatcagttgacccaaacaaccgataaaatgcagatattgctaatgataaacctccaatagtgtatacaaggcgaggagctaaacttattccagtctctctagtagctttagtatgagagagcaaagtactttcagaagcccaatgaattgctataaatatataactcaagatgcttccagacataacagagtacttcaagaatctatgactgatcgcataggatatgcacttcaaaattatataggccactaaggtaagagatatgatggggaatatttccatgagatcactgcaaaaacttgaaccaaacaggccacaaataatgctgactgggtggtcatttgaaattattgacccagaaatttgttttgacatcccaaactcaatcccaaatcgtatgaaaatattaaggaggagaaaaacaaactcctgcgaataaatagagtaaaagtagatcagaagttgactatacataataatagaataaaactgaggtcaacacagggaaattgggagcattaattgtgataagaatattaacttctatgatgaattttccttttgtggctgagtgccacacactggcaatgcaactcgtggccaaaagaaagtttgcaactctaccttctgccactgcatcacaagaaatagatgcatgaataagcaggtgcaccaaataaatttataatatttgatgaggttggtatatctgacaaactcacatatatagctattggataggaaacttgctgcccgaattgcaaccaatgcaaaagcaaagaaatttttcggaatgaaacttgaacttgctctttccttttctgaaatttgatcaatattcaacttcacaagcatacatgcctgagtactaactgacagtatcataactgaaagaccaatgcccatcagccataaatcaaactcagtccatgcagagcgagcaagctttgcaaagctctccaagaagtcagagtatgcatcaatttgcaaccgcagagctgaacttgtgcattccttatttgcgcactcctttaattcatcctgactgcttgtttccactggacatgtagacctcaggacagaggaccaatttgcctgagcttttgaatacagatctgcaacatggttcaggtcttctgctcgaaatccaataacagaagtggcagaatatcgatcaatgtacctctttacctatgagggttaactgaaaatcagcgtagagcttcagcaatccacccaaccaaacaaatacaaatgaactttcatattacctgccaacaatttatacagagagcttcagcatatctccgcatccatgcttctagatcattctgctgtgtacaatcattggcaccgatctgttgattatcccatgttccagcactcagagcatacaattctgggtttacacgtccaatgctagatatggcacaatagaacacatttcgtaaatatactgaattaagtactacaactatggaaggatgtagggacaatagcaattgaaaaataaaatcaagtcgaatcagtatatataatgaaaaaaaaaagcaactagatagtgtctctagtcaaaccagatagtagcacacactgcaaacaacagaaacaagcaagtaccaagtaaagcgtacacaccttccaaaaggaaaaggtataccaagtagcgctgctatagttactgcaaaatcaagctaagaacaaggagaaaaattaagcaatattgatcatataagccatcaacataaaagaatgcagttagcactgacctgctgcatagtgctgacgcacacctctttaccatgctagaaaagaaataaacgtgtgattagtaggcacattactacagtcacaaataaaagcaagcaaaatctggctaaacaaaatgtactacgattaacatgtatcttggccaaaaactgtattacatcaatcactgcttatttcaaatttacattcctaaaatctacaggccctcattcccactcttttcattaaaaaacgctgcatgcagtacttcatagccatgcataacacagtcagagtagagtttaaaatagtcaatcactttgccctacggttttagatgtcaaaccaaatatacaacagtaaggcattcaatatggaagcaagggattagaaaaatatcttctgtacgcaattctagtttaagtgttctagacaaaaaaaatgtaactcaggttataatatggccaatgaatattaattataattgtttgaaaacttagtcctgatcataacattatcgccatacatggcaagatagctcaaatcataattagttagcagaacatataggataagaaaatgtaccagatcagcgttgcataaatttttaccaagaacagacaagacagcatttggtggggtcttcggactccatgcaaagagcgatgtttcaacctataatagtaacagcattagttatgtagacatgattaccatttagtgttcctcttcagcatttagcaacaaaacataagatagatcacctcttcagcagttcctccaccatgatcaccatttagtgtttggccatgatcccccattacaagaagtaaagtattctcatggggaccacccgatgttgatagacttttcaatgtgtcaattacatcctgtatgagttaaatatagcagcatttgattatcatagttaatatggccatcatatgggaataaagaacataatgaggtcaaatttaaaagaatgataagcaggtaagcataaagccacattatatatttgtgcatgaggtgactgacctctaggatccgattgtattgctccaacttctggatcattggggtagagtcaacaccgaatatatgccctgcatggtcctaaaggaagttgatctcacatgttctttattcaaaacggacaggataaaaggattaaatttttaagctaaggcataagagaatgcacaataacttaccacgccaaggaaatgtgcaataagaacgtcccaatcatttttgtgtaatgatggaagcaagtgctcaataacaccattgtctacctgatatatacgataaatacaattactggtaatttcatggaaaatttatgggaggaaaaaaactcgcactgcagaacaaggaaaagaatggtacaaaagatatgacatactgtgtcaagatctttaacgttaaaagaagggtaaggatatgacttgttgaaatgttcagggtataactggatccaagtatcgtctcccatcatgacgaccctctttccatttttggcaaactgattgagtacaaagaaacaataggcaacacatacttccacggttagttatccagaataaactgagtaagtttactgacaccatatttgtaatgttagatgcaagatgagattgtgacaagaacctgatgcattatgttgttcttttactattgctggagctccaaagctattccccacatcaataaatgtaggcagaccacctgtcgtcagagcctgagtatagaattttacagcaaggatgttaaagcctgggggtgaagaacacacaaagttacaaccatttgattgcactgaatcgtgcagagcatatcaggtcaactcaattcatgaatgcatataatgcgataatcttatactgcactgaattgaggaaaggacaacaatttttcagggtaactctgttgatgaatgaatgaatatctggattaacaacaacagaaacagagttgatcaccttaagacgttgaaggctagtcgtcggtggatcagcaagcgctttgaatatcctagcagaggtcttctcatcagcagccaatctttgcagaacctgcagtttgtccatccatggttgcctctctgcagcgaatcatggcctcatctcagagttacaaatcacattctcacatgttacacgttgagcattatagtaatacataaaaggagtaaatcaccttgaaagaatgtacttggtgccacaaaatcgaacctgcaggacagtgcattgcacaactgtgtcagctccaaacttatcctactttctcggtaacccaacactgagtataatcgcagtagccaacaagagatttaatttctctcttggggaatctaagattcgaggggtggtgattttacctgagggcgtcgaggacgacgatgacgaggcggtcgacggcgggcgggggccaggaggagcagcccggggagatgccgatgcggtcgtcgcggtggctgtggacgtcgagctcggtgcgggtgaggaggaagccgcgggtgaagaggtagatggcgagcgagtggaacatgaggacggcgaggaacagcagcggccacgcgcggcggcgggtgtggctccccggcgccgccatggatcccgtcagcgaaccgcggcgagatctggcggggggcgggtggggatggtggaggcgtgcgccgtagcgcggcgagcggcgtggcttgtggcggcgtcggacggcgtgttggatgggcctaattagtgggcctacggctttttgggcttactggcccatcaacgctcatgtcttctactgggctggatgcaacatgctgtagttgggctatttaggcatagtaaaatggaataagtgcacttaccatccctcatctttccgtctggtttaattagcatacttattaaacctcgatatcattaaatggttttgcggttttaaaaagatttaggtgaagatgtctgatattgaggtttaaacataatggacagaaagatgagggatgacaaatggacttattcctagtaaaatgcgtgaccatagcccgtcaaaatgttccactgctgatcagacggttaaactgctaatggtggacagttctaatcgagaggctgccctacagtaggaatgcaggatatgctttgacgatatttcttcagtggttcagtggatcaagtgtgtagcgctgcgtcccaaaatataagctactccctccattaaaaaaaaatcaatttagaaagagatgtgtccggagagagtaaaacgaatgtgacattttttttaaggacggagagagtaaaacgaatgtgacatttttcttaaggacggagagagtaaaacggatgtgacattttctagcccttttgtccagattcgtattctctatagattcgtaagaatgtttgaaatgagcgagacaagcagtagagagtatttcatgatcaaataccctcctgtaacaatcaccggattcgacggaatcccacgacagaaggggccgaacaaacaaaaattgaatccaataccaaatttcatgtggttgaagcaaaactggcgagttacacacctcttacatgagaaagatccatagcatccgcgcacatataaaagacccagatacactaaaccagttggatgtccgttacacgcatggcaatcggaaccgagattctaagcagcagagaaacaagacaggtaggtctaaggtagtgctagtttggcagcattacacatcagcgatcgtcacctcgacctcgacaccaggctcgatggtgatggaggtgatctgcttcacaacatctgggagctgatgagatcgatcacccgcttgtggatgcggaactcgaaacgatcccatgtgtttgttcctggtcagaaaagaacgcaaaatagtcctgaattagcacaagaaaacccaaccaatgtgaagttaagccaacaagatgtcagcaaatttccctagcttaagcaactagcatccaaagtggtttcatctaacaaagagcgtccagtttaactgttgcaagcataaactgacctgaagatatattgatgaaagataagcatgaaagtaaaaaaactgtcaatcatcagaacaatatgctacaactacatgagcataggtaaacaggggtacaggatgattggcacacaaaaaggatatacattacaagttaaacatatcatgtactttgtccaattaacaaatcaatgaattcacataataataaatcccatgaaacaaactcacatgtccacttaaatgggcgtaaagtttgatcctttagtttagtgatgtctttttgcaaccaagtctcttgcgcaatgcaggcttcgagcctatggttgctataatagtgggaagagcactaatcttgtttatcaatggattccttctctaatactacctccatttataaatatatgacaccgttgacttttaaatctacgtttgaccactcgtcttactcaaaaaagttatacaggtatcattaattttgccatgacttgttttatcatcaaatataccttaagcctcacttatatttttatatttgctcgattttttgaataagacgaattgtcaacatatatctaaaagtcaacagcgtcatacatttaaaaacagagggagtacaatactacatccatcccaaggtgtaactatatctagctatgaatctagacaagttcatatccagattcaaagccaaagagagctacattttgggcaggaggttttactacactgcgacctttgtaggttaggagccaaaaagataaatagtaaccagaggagtaacaaactatgatactccctccgtcccaaaataaacaaacctagtacaggactaggaagtgccacatccccgtactagctttgtttattttgggacagagggagtacctagcaagctacgagactagccagtagtttcttgtgccactggtactcgatcccataacagttatcactagtccataacaaaccttaaatttaaaagtagcattgctattattaccaatcatactaaactatcaggatacaagagggccagcccacaaacccacttataggccatttaagtgcaccaacctatggtttacccacttgaatagcccataaatgggttcaaaagccagcccacttgcattccaatagaataccaacatatgtgccttccaaatccctgctaaacaaaatcttactaaaccttcttgacttcagaacttggcttggctatctttaaaattatgacatgtggagaataataacactaaaattgaagaaacgtctgtatattctgcccccttaatatgagactgtgggggtaacggcaagttttctgagcttgcctctagatcattcccttatctagaagtgaataacataggaatatcctagtttgttgtagcttgacagtgtccatcgcttgctatcccgctgcccatccatctccatgcatgaaatggttgggtgatgaaatggttgggtcgacaaagaacaggtaaaccaaacttattcaccacaaacctccaatagtaacccttctactcaacttgctataccatgtgctttcactcgaaaacttaaacattcatccttcattacattttggtggcaacttgttgctggtagtctttattgcagattttagatagccgaaagtcactataagaacatggccatacaacaataacacttagtgaagtactctaactaaggcaaatttcaacaaagagattgcctgaaaaatcaaatagttttgactaaatgattccaatggtcacacaatccacactagtcaccaaccaagagcactaatttagaccaggatctagcttaaccaagcatctatacactggcatctatacagtggcatctgtctccaccaatccatttcctaaccacctaaaccaaagctatacccatgagtcgaaacataccacaaaaacaaatggattcaaacccaatcaagcattgcaattagaggtggctgcaactggtcaataccttcaccgcacggcgacttgcgggtggtgatgtggagcaccttggtggggatcctgacggggcccttgacgcgcagctgcttgtccttggcgcccttcaccagatcagcgcaaactgcaaccataaacacacgaatcagcttcgcgctctcagcaaaaaaaaatccgatctaatctaatcctctctgaacgacaacgaactgaaactatagaagaaaaagagaaagaatggattacccttctcgaggttcttgacgttcttggaggagagggtgatgcggatgcggttgagctgcagctcccgcgcctcctccatgccgagcttcccgcccttcatcgcgccgccggcgccgtacaccgcagccgccgccatgtttgcttcgcctcgcctcgcgttctccgctccgctcgctcggggggtggggttggtggtgctcggggatggcggcgcgggtggcgttagggtttcggagggggcggaggttcgctcggaagggccatttatataggagatgatatgggctcggcccaactctaactaacctctgaatgggctgtctctcagactctcactctctcttcttttggctgtctgaaattggaaaagtgtatggtttttttagggtaatatatgatatatatttttttgaggtgcaacataatcaaagattcaaagtggccatcttttatgcttttgtaggattttattagtttattgtcaggttattctctaggaatatttgtttataaaggatatagaacaagaatagattaataaaagggattttagattagtagtacgcaatgctagaaagtcttataacctgaaacaaaggtagtacttgtcgatgacatggggccgagggtatcatgactagaggtttgggtagccgcggtcacccttgggtcgggcctgagggtgacgagacctccccgccttttatctccccgaggggtcgggccgctcccgtttcggccccgagggcaggggcgccccgaccccctgtggttttgacgccacgtgtatggtttaggtgagcacagcagggctcacctaaccgcatttattgcggtttggacgagcgcgccacgccgcatttaatgcagcgcagcgctcatccggtccgtgaccggtcgcagtgtgtgaccggtcacagaccggtcagatcgcgggttaggtggcaacaggcggcctgacacacgcctcgccccgtcccgtcggattgatgagagcctccaggcactcgtccctagccggagccggcgtgctacctcctggagttggcacgtcagtcccgcccagatatattccaggcttcatcgcaaccattgcaaggaagtcgttgtatgaagaagggcagacatgcagcttgctaaactgacacgtggtggacaacaatgaccggtctgtgactggtctgacgctggtcatgtcataggcagacaaccgcgcacccattttgcacctccttccagcggagtggaggtaggtatgacccatcccatcggagggtcattcggatagcagccattgcaaatctccgcccattaatgaaggaatgacagggtgatcccctatgtcagacgagtgaggacgctgggccacactcaaagacaagctatattttagcttccaagagaaggcgaacggggttttggtcaagagagggtgggtccccacccaaaagaagagtaggtagaagtggagcatgtggtatccccttgagttataaaaggaggaccttgcccaccaaagagagggacggagaagaaaaaaggggaaaggaggagcaaacgagttctagagtctaaacttgttctagctctcgaactctttgtagtttcttcatacacagatccaccagaacacaggagtagggtattacgcttctcagcggcccgaacctgtctacatcgcccatgtctcgtgcattgcctctctcgcgaatattccacagaccgagggcttagaacctcacttagcgccccccgccgaaccggcaaaggggggcctgcgcggtctctcggtgaggagccccacgctccgtcatctggcgcgccatgtagggggcgcgtgtgtttttctaagctctcatcctctttcgtgtgcgccaagcttctcccgttcaacccaatggccgaacgagcaaaagcgcacaacctctctctgagtgctagcggtgacgacggggagcagaacccgcgccgtcgagctcgtactccaccgcccccctctcgccgaagtcttaggcgggaggaggcgctcgagggggtcgaaagatccgcaactttgccgcccacgagcgatggagaaggacggcgagacggagagcgtcgcctcctcgtctacggcgatggcagcacgccccagggcgtgctccaagctgcgggcgcgctcttgcgtcacccgcccgtcgtccccgatccagagactctagcccgacgttggttggatgacgtggccgacttggtcatgacggcgcagcagcgcctaggtgccggtgggcggtcttccgccaccaaggcctctggcgctgctaccgccggctccgtgtcgtcgaggtggagggcgcggcgagcggcggctgttacccgccgttcgtctgccattctctcgtcaacgcctccgacccaggaagatgtgcgtggggggccggatgcccgcctcggtttcgagcgtcggcgcaatggtcgtcgtgctgcccacgcaacggagggcgcctcctcgtccggagcgccacttcagtacgggcgcgggggccagccctccgtgcccccggttggtggtgttggctgtagagcctttgtggcgagccttcgaaacgtccgttggcccccaaggttccggcccaccatcgccgaaaaatatgacggaagcgtcaaccccgccgagtttctccaggtctacacgaccgggatcgaggacgccgggggtgacgacagggtcatggcgaatttctttcccatggccctgaagggacaggcgcggggttggctaatgaacttgccacccgcgtcggtccactcttgggaggatttgtgccagcagttcaccatgaacttccaaggcacatatcagcgcccaggtgaagaagcggacttgcacgcggtacagcgaagggatgatgagtcacttcgctcgtacattcagcggttctgtcaagtccgcaacaccataccatgcatccctgcacacgtggtgatctacgcgttcaggggggcgtgcggcacaaccgcatgctcgaaaagatcgcctccaaggagccccagactaccgcggagctttttcagctcgcggaccgagtggctcgcaaggaggaggcctggacctggaactcctccggttccggtgtggcagcttcggccgcccccgggtccgctgctcggtcagggcggcgggacaggaggaggaagaagaggtcggcccattccgacgacgagggtcatgtcctcgccgtcgagggtgcttcgcgggccacccgaaaggggaggcctgcgagcgacaaaaagaaggaggccggcgctcccagcagggagcgcccgactggcaagtggtgcaccgtgcacaacacctccctccacgacctcgcggactgccgcgcggtcaaaagtttggctgagcggacgaggaagtgggaagaggagaggaggcaggagcgccgtgagggcaaggccccggcggctccctccggcaaccggcgaagtgaggccaagcaaaagggacccaccgaggacatcgacgatggcgacctggggccaccatcgccaccgtcgatgggggagcgtgcactcacgcttctcgccggagcctcaaggccatgaagcgagagcttttggccgctgcccctacccatgaggcgacgcggcgggcacgatggtcggaggttaccctcaccttcgaccagaccgaccacccgccgtgcgttgcccggggagggcagatcgcgatggtggtttcccccaccatttgcaatgtgaagttggggcgagtcctcatagatgggggcgcagccctcaatatcctttcccccgcggccttcgacgccatcaaggtcccggggatggtgctccgaccgtcccagccgatcatcggtgtgacgccggggcacacttggccgctaggtcatatcgacctcccggtcactttcggtggttccgccaacttccgcacggagcgggtgagcttcgatgtggcggacctcagtctgccctacaacgcggtcctggggaggcccgcgttggtgaagttcatggtggcggtccactatgcctacctccagatgaagatgccgggccccggtggccccatcaccgtccatggcgacctcaaagtcgcgcttgcttgtatggagcagcgcgcggaccacctcgccgcggcgtccaagcccgcgggcagcgacgagaggcttagaccctccgtcccagccgccccgaggcagcggatgatcacgtacgacaaggtcccggtcaaggaggttgccctgggcgacggcccgtccaagaccactcgaatcggtgatcttctggacgacaaataggaagacgcgctcgtctccttcctgcgggcaaacgccgacgtcttcgcatggagaccggcggacatgcccggggtccccagggaggtgattgagcaccgtctcgccgtgcggccggacgcaaggccggttcggcagaaagtgcggcggcaggccccggaacgtcaagccttcatctgcgaggaggtggcgcgacttctggaggccggatttatccgagaggtcatccatccggagtggctggcgaacccggtcgtcgttcccaagtcgaacggcaagcttcggatgtgcatcgactacactgaccttaacaagacatgtcctaaggacccttacccccttccacgcatagatcagattgtcgactccactgcggggtgcgaccttttgtgttttctagatgcatactctggttatcatcagattcgcatggctagggaggatgaggaaaaaactgcattcattacccccataggaacttattgttatacgacaatgcctttcgggttaaagaatgcaggtcctacttttcaacgtactactcgaatttctttgggtagccaaataggacgtaatgttgaggcctatgttgatgacttggttgtgaagacgcacaaccaagagaccttactcttggatttagcggaaactttcgaaagtctccgctccgctcgcataaagctgaaccccgacaaatgcgtgttcggcgtgcctgcgggtaagcttctcgggttcttggtctctgcccgaggcatcgaggccaacctcgagaagatacgagctatagagcggatgcgccccccagccagcttagggatgtgcaatgcatcaccggctgcatggccgccctaagtcggttcatatcgaggctgggagagaaggcgctactcctatttaagctcctcaaacgctccaggccgtttacctggacagaggaggctgagcgggccttcactcagttgaaggattacctcagttctcccccgatcctggtcgccccggagccagatgagccgctgctactctacctcgcggcaaccccgcaggtggtcagcgcagcgttggtcgtggagcgcgacgaggacaaccctcacttcgcgcgtccccaccctgtgtcgactcgacccgggagagagcagggaggagaggcccccgagtcgaacggcggcccgaggcccccgacggccggagctggccctccgcccgcttgtccgacggtgccaggcgcccccgacccccaggatggcctcggggccactgcgggaaggccgcgcctgtcgccctctgaccccgaggtcatcggcgcagaagccaagtgcgccccgtgcggcctctcggacgaagagcgccctggagatgcggcccttagcgaagaggatcggccccgccgaaaggtgcagcggcccgtctacttcgttagcgaggccctccgggacgccaagacccgataccctcaggcccagaagatgctttacgctattctaatgacttcgaggaagttgcgccattattttcaggcgcatcgggtctcggtggttacgtcttaccccctcggccaaatcttgcataaccgagagggtactggacgggtggtgaaatgggcaatcgaactctctgaatttgatttgcactttgaaccatgccacgcgatcaagagccaggccctcaccgactttgtggcagagtggaccccagctctcgagcccgtctccgccctcgaggccagcttgggcccctcacagctgcctcacaccgcctgctgggtgatgtagttcgacggctccctgtctcttcagggcgccggtgcgggggtcacgttgacctcgccgagtggagacgtcctcagatacctggttcgcctcgactttagggcaaccaacaatatggcggactacgagggactccttgcaggactcagggtggcagctggactggggatccgccgcctccttgtgttaggcgactcccagctggtcgtaaaccaggtctgtaaggagtaccggtgctctgacccggagatggacgcttacgtacgccaggtgcggcgtatggagcgccatttcgacgggatagagcttcggcacgtgcccagacgggataacgcggtcgccgacgaactctcaaggcttgcttcctcgcgagcccagaccccaccgggcagctttgaagaaaggcttgcccagccgtcggcgcgacccgaccccctaggggagacggacgcgcctgaacggcccccgaggcccgtcggagtccaagcctcgggacccgaggggagcgctcccagctcccttagattgattgcttggaatcgctcagatccaggcgtacctcgcagataagactctacccgaggaccgcgaagggagtgaacgcgtccagcgcatctccaagcgctacgtgctggtggaagagaccctctatcggcgcgcggctaacggagtcctcctgaagtgcattcctcgggaataaggcgtcgagcttcttgccgatatccatgaaggcgagtgcggagcccactccgcctcacgcaccttggttggcaaggcctttcgccagggtttctattggccgacggctctcaacgatgcggtcgacctggtccggcagtgcaaggcgtgccaattccacgccaagcagactcatcagctggcccaggccctgcagaccatacctctttcatggccatttgctgtctgggggctcgatatcctaggtccgttcaggcgggccccgggcgggttcgagtatctgtatgtcgctgtcgacaagttcactaagtggcccgaggcttatccggtcgtcaagatcgataagcactccgcgcttaaattcatcaagggcatcactgctcggtttggggtgcctaaccgtatcattacggataacagcacccagttcactagtgaactcttcggtgactattgtgaagacatgggcatcaagctctgcttcgcctcccccgcccaccccagaagcaatagccaagtggagcgcgccaacgcggaaatcctcaagggccttaaaaccaagaccttcaacatcctcaagaagcacggcgactcgtggatcgaggagttgccagcggtgctctgggcgaaccgaaccacgccaagccgagcaaccggggaaacgcctttcttccttgtctacggcgcggaggcggttctcccatccgagctcaccctgaggtcccctcgggccaccatgtactgcgaggctgatcaagatcagcttcgcagagatgacctcgactacttggaagaacgaaggcggcgcgcggccctccgagccgcgcgctaccagcagagcctgcagcgctaccatcagcgccacgtccgggcccgatcactctgcgtcgacgacctcgtcctacgccgcgtccaaacgcgtgctggattgagcaagctctcaccaatgtgggagggtccgtatcgagtgattggcgtcccccggccgggctccgttcggctggccacaggcgacggcacggagctgcctaacccgtggaacatcgaacaccttcgtcgcttctacccctaatgggagttggatgtcaggtctcgggctcgggccaaccccgcacccccctcgggcgtgcagggttggccgggggctaccacacatgcatattcttatcttttttcttccgtatttcaataaaagcattttcgatttcccaaggactgcgtctgtgcctttgtttccttttgaaaaatcttggcttgaattagcacgctcgtgctcgatcctgcccttggtggcccgggccggctaaaatcgccaaaaggggcccagaaccgagccgtgccccggggcgtggtgaactcccggggggggaatcggcaaaggcccacaatcgggtcatccataaccctcggtcaccacgttcccggcctggccagtctcgacacgtgaatctccccaggcactagccccgacccgcgccatttgaggctgggacctgggcacgagcccttgttcaagctaagacacagaaggaccgtggcacagaccatcctcgtctcatacacacaacaaaagaaattgacacagaaatttcctctttatttaattgcagattaagttagtctatacaagaagggggcccgaaggcctcggaaaaagaaggaaaaaactatttaaagattggcggaggcctgggggctcactccgacgcacccgggtcgccggcctcgtcaccgccgtcaccgccctcctcgtcggagtcgagggcgaacgcgagccgaggggccgtaccctcgaagttgtggacgatgtggtcggcggcgtcccggacctgcgcgcgcgcaccgtcctcggtcccgggagggaactcgtccagcgctgcccatggggagaagtcagggtccctggcctggtagctcgccagtacgagctccaccgctcctcgggcgaggtccctcgaggatgacttaattgtctcctcgagctcctcggggagccgctggagggtcccggccatctcggagaggcgctgggcgaggcccccctggttggcggcgtacttcacagtccgcccgccccagagacccacctaccgcccggcgcggtctagacgggagacgccgtcgcgaagcatgctgggccctatctcgcctgccaagcggagggcctcgacctcccccgtggacgagttcagcgcgccctgcagatccgcgatggtgtgttcagcagctgcgaggcgggctgctaagtccccgtcgcccgcggccgccccgccgctgcgtgccctcgcatccagctcccttgcccgcgcctcgagctcagcggtccgctgatccagtgcggccctctcggcgcgggcaccttccagattgcggcgcgcttgttcctcccgcgccgcctcgcggagggacaggctgtccgccagcctttgcgccgcggcctcggcctcctcgagagctctctcccgctcggtgagcgcatcctcgcggaggcggagtgtggactcctcttcggcacagccggcctcgtgcgccgccagtgttgtctcccggatggcgacggcggcctcgcggtccgccaggtccctctccttcgcgcgggcgcgctcttccagcaccatggcgcgggcctcaagggcttcttcgcgccgccgggacgccgcctcggtcttcgccgcccgccgttcccgggcagcggcggcgtcaaggaccccccgggcggcgtcgagcttctttcctagctccgccgcctagctcccgtattggaggcggagatcgtcccgcgcctcgttcagcacggcggtggcaatgagggcagcctctcgcttctcctccacctccctggcaatctccgccagctccttccgacgggcctcgagctctcaggtgtgccggcttctttcctagctccgccgcctagctcccgtattggaggcggagatcgtcccgcgcctcgttca

SEQ ID NO: 6376 - DNA, 21652 bp, Oryza sativa
cttcttcccactcctgcaccgccgtctcccgccgtctctcgcatctcccgcggcgacaagctcggcgccatcgtctccggtggtgcacggcggtgactcccccgccccatcctctccctccccacacccatctcgtccccaaccggcggctccctccccctctccccttcccccaccaaccccccttcaagtcctcaactcactggcggtgttgaactcagtcgccttcgacatttccccagtccccctacctcagcggcgaacttcgccgccattggtttctctactcctgtcacgagatccaccgctgccagcacctctcccatcccagaaacaacaaaaagctcacggtggcagccgtccggcgcctcaccacaccgctcgagcccaacacgaggaaaccatccatgcccggaactggcctcaagctcggcggccatggatggatctagctataggaggcgagggccggtgagattagttatcggggatggccaaggtcgctaccgatagggagctcggcgtcgagctcgacagcatcttgtggggggcgtccgtggcgacggaggcagttgacggtcgaggatgcttgcgacggttgcatggtcctcgacggcagtgagcaagccgagtggggcttccccaacccctccgccagctttccctcccccttcggcgacaaccgccgaaacaagttccgtttcctccatctctcttctctcctccgtcccccttctctctctctctcccttcgcaggcgatgcgggtgtgtgggccggccctgacaaatattgacgaggaacccatggctcaagtatgctccgcggtcctcactttgtaacgagagatgtttgatgtggtgcggaatctcctacgtagaagggaccacctatacatttgtcgacaaattttctcctaaaaatttgactgatgtaattacagtacaatcgtagtgtaattactgtaacttgcatgtagagatggcaacggggaattccccgtcggaggttactccaccatacccgcctccgcggtggggaattttccccatcaccatcaccgtgaaatgcaacggggcaacatctttccccatcaccgcctccgtgcgggtaatttatccccgtggagcctccatccccgctatcaacttactcaacagtcaacatgtatgcatttctcatatcaaacaataaaagattaacactcaaaatagcaattccagccatcaatttcagcacatgaacaacaactacaagaacacaagttcacagattcagatcacaaattcgcaaatgcacatcatcagttcacaaatgcacatcatcaattcatcacttacaacagcagtgcagcaacaagcagtgcaacaaaagtgtgcccaagaatacaatatccatcatattcccagattaagcaacaacacaataatacatgatcattcatcattcatcagtcatcactcattagttatcaccacattgcagcaacaacacatgttgtccaggcatacgtaaaaccatagttcggagtaggtcttttgtgccaaatatccaaaagcattgccatggtttacaagtttatcatgacacataacaggggttacaaacatccaaaatcattgcaagaacagtgcatgtccatacattcatgtcttcaaacaagagcaagtccctaaattaaagaagtagcaaaagatattcaattagtcaagtattttataaggatataacaaataatggcaataggagtttgattgctaatttcaagttgttgaaagaatacctcaatccgatcttggatatcttgaaggcaactccaaaagcttgctgcttcttcattatcagctacaagataacaattataacaattattttgcatccattgcattgtaaaatctatgctaagcatgatgtatgaataaaacatcatatgtacctcgatacttgtttcgcagccaatcttgtgagcacattaaggcctccaagagttctggagtaagccggctacgatgctcactaagaacccttccacttgtgctaaatgcagattcagatgcaacagtgctaacaggaatagcaaatatatctcgtgctaccttcctcaatgtaggaaagcttgtcccagccactttccaccaatcaagaatcttaaagttttctgtattaattgaaaccaactcatcctctaagtacctgtctagctctgatttaacacgtattgctgctggtctcctactagtaacacgtgctgtgattgaagacaataaatcagaattgacaagtggaggagctgaagattccgtgttatcctcatcatcttccacttcatactccttcatcaaatcatatagagtgtctttcacctcagcaactttcgttgcacactcttcacttgactgaccagtgatggtttcaatgaacccaaggaggtagtcaatcttaaacctaggatcaagaatggtggccaaccccattggcccttgaatatctttccagtacttatcaaacttttgaatcatttcaactgacatttcctctatagtagaatcaccacaaacagcccacttcctaatttgctctttagcctcacagattttaagtagttgaatattggaagtcacataatttgtgccagaaaatactgcagtgatgtcattaaacaacttgagcctatcaactacctcactagcaaaagcccattcttcttcactaggagcacaatcaaatagcttctcaacccgtattgcacggtcaaaagcacgtgcacaaggtaaagcaatactgagcatcctataggtagaattccacctagttttgcaatcaaggcctaacttgttttccatcttaactttcacatgctttgcaatttcctcaaacttttctactcttttaggtgtggctgtccaaaaggcaacactttcacgaacctttgcaattgaatcttttatcacatctaaaccatccctcacaatcaagttaagaatatgggcagcacaacgcatatgcaaaagtttcccctctagcataagcttacgcttgccgatctttttgatgagttcagaaatcaccttatcatttgtggtgcagttatcaagagtcaaagttgatatcttctcatcaagattccattcaaccaacgcttcataaagatgttcacaaataacttctgctgtgtgtggagcgggcacatatatgaatctacaaatggaatattgcagcaagattaaaatgttgaatttaagatggtgacaagaggataatcatttgtgaatcatgtacctcatgataatgcttctaagtgtccatgaatcatcgatgaaatgggctgtgatagccatgtagcctcttttttgattatcagaggtccacaagtcagtagtaatacccactctagacttagctccagccatatatgctaatgcccttttcttttcttcctcatatgtatccataatgtccttcctatattcaaacattaatcaataaactcactaactaatcaaatttcagaaatgcaaaaccagcaaataaataatagatgaactgaaattacctaatagtgttccgagtcaccatcttgaataatggctgaagtgcactaacaaatcttcgaaagccaatatggtcaacaatagataaaggatactcatgtaatattatcatggcagcaagctctctcctagccactgctggatcaaatgtgtatgtgtccacagaaactttccctccctctatggaattgaacctcaatgaagattgtgcaagtgtctttggccccatcttgatctttctcaatgtgcaaattttcaaatggtcatgtagatgtgaagtcccattgctgctcttccctccaagccgcttgtggcaatgaaggcattcagccttgacatcaccacagactttgactttcttgaaatccttccaaacaacagaagtaagcttcctctttgtgccaaaattctcagaatcatcttctggctcatcatcttcaacttgtattggctcagaatcattaacagactctgcttgtggtggaagtgactgcgattcttgctggctgctactcccacaaccagtaccagcagttgaattcgtggtaaatctgacaaatgacaaataaatatagatcaatatatctttcagcctatagaataatcttggcaaacttgaaatgaagaatctctacacataaatcatactgaaatctgctacagcctatagaataataaatttcttatgatctacactacacagaatcggattcctttaatttcaaaaacttaagttcataacatatttataacttaacaacattcaatgtacaaccatacaatatacatgtaaagatatctaattttctacagatactctaaatacaacattcaatatctaagaaaatcaagcaagctgcaaattaataaattgcacatgctaaattgttaggaacttaggattacgaaagtgaagctacaatgtataaagggttagcgtgaaatcgaaccccatggatttgaataagcgcaggccgttggcggaagatgaagcttctggagttcttggagcagaaggagctcctgccttagtcgaagcagaaggtgctcctgcaatcgcaagacggctttttgacctagtggtggtcctttttataggtggttgcggcggccgacagcaggcctttgcaccggagttggaggaaccagatctgcccacatgaacaatggcagatccagcaacaggcacgacagcgggtgtggctgcagctgcagctgcagcgcttatagcatgcgatggctggtccaactccgcattggcgtcccttattgtggaccgccgaacgtgagttagtgactcaacgagacaatgatgcagccatggaagaggaatttagtggagggggagggggatatggtactataggtaggcgtctagggaggggtactgagttgggagtaggacagctagatgtgctcaccttgcatcgtcgtcggagcttagcggtggtgaaggcgaagccatggcggactcgagcggctggtcgtcgtgtggactcgtcgttttcccctttcttgccaccgaagccttcacctgcatccaccatgagcaaaacaaataagcctacatgacggatcagatattgacggagggtggacgaggaggccgacgtccggtggccggtgccgagtccacggcgtcctcggacctgggaggctgggagtgaagggaacgggacggcgctggggcggacgccggcacggcgggcgcggcggcccggcactggcgcggacgccggcacggcgggcgcggcggccctgagcgcacggacgcctgcacgcgcgggcgcggcggccctgagcgcacggacgcctgcacgcgcgggcgcggacgccgacacggcgggcgcggcggccctgagcgcacggacgcctgcacgcgcgggcgcgggcgcgagatcgggagccggcgccgctcagtcactgtggccgacggacggcggcgtggactagggaatggggacggaggggataaggattggaatgggtagggttacacaattgctttatatactctatgctttgggcctggtttttatgggccatatgggtcaaatacacaggatattactacacacatacttttatatcgggccctccacagagggcggggacgggggacggggaaccaaacccgcccccgccagacccgacggagaatactttctctccatttgattccccatggagacacaattaataccatcaccatcacctaatgggagaattctccacgggggaccggggaccggggaccgggtacccattgccatctctacttgcatgtaactacagtgtaacttgtatgtaagtttcacgtaattttaaattattagatctattataaagatttgttttggtgagaaagaaaaaaaatcacagtacacacatatctgaaaaaaaattgttcccacaacctttattttaccaaaataatatattatggagagatttttgaaagttacatacaagttatattatagttacagtgtaattacatgcaagttacagtgtaattacattacggttgtactgtaattacatctgtcaaatttttaggggaaaatttatcgacaaatatatagcaaaattgacgtagaattatatggctaaatgacacgtaagtgcactatgaaagccccaaggtagggtcatgagcatgcaggcccacaaacgactcaaccttggtgcacacggagtataactgaacgtaattgctatacatttgtcgaaagattttttgggtgtggatttgtcgtttttcctgccgttggattagcttttgcgattcgtgcggatggatggatagtcttgcttgtggtcaacgtgggccccaccttttgtttttttctcaaattttggattccgcgcctgtccttacctgctttttctctctctcattctttcccctcttctcgtttcttctcggtttctctggcgagagagagaacgagagaactcgccgacgatttcgttgtcgcggtgagatttcttcatttttcttcggtgaaattgatctctcttgcttgtagatttaggtggaggtggaggtctctctctcattctttcccctcttctcgttttttctcagtttctccggcgagagagagggagagctcgtcgacgattttgtcgttgcgttgagatttcttcatttttctccggtgaaattgatctctcttgcttgtagatttaggtggaggtggaggtttcttaaatcgttggcttgtgtgtgtaatttttttggtttttggttcataggttgctcttttgctgttgatttttctgttgtttctgaagtgttcgaactagatctcttacattttgtttgttctcgtttgggatttttggtgtatggatgtgtttgttgatccgattcggtgtagttgttctctcgtcaagcatgagctctttttgaaacctattttgattgagttttctcttggtggtcttcgaatctgttaggaagttaggtattatgtgatgttcgtgaactagatctgtgtgaagtagatctcggtagttttctctcgttagattagcaagttagtgtatatatgtgagctatttgaacaaaatttggtgtgcttgtgttttattatgctttagatctggggatgtttgtgaggtgttcgaattagttgcagttgtgtactgttcagggtagtattttgatggctggcgcgcatgtgttctattatgctttagatcttgggatgtttgtgaggtgttcgaattagttgtagttgtgtacttttcagggtagtattgatggcttgtgaggtagaattgataacttgacagctagttagtttctaaaattttgtgatgtctgaacttagtttgttgtatttttgtttttgttattattattactgtaattatttttgaattttgtatattgtagtagattaaactttttacagatttttagttgtaagcatgattctactttccatgtcccttggatagttgtaagcatttcctaattttttacttccaagttattcttgtgtaattgacagctactagtgcttcaaaatctactgattgttgtttgtcagtttttttttaattcctatcaactgtaccctgttttcttcatcttcattaacttgctgtgcctgttgattccattcagcttgttgttatgttatttttctgccaccttctccttggtatagcttgtgtgcagctgctatacttctttagtgaaatcttctgcttgttcttttgtttccatcagctgtgtcatgttgttggagtcttgtttccttgtgcactctccatgataaagcatctttagctgtgcactcctatttttttttgtttttcttctaattatagttgtaaagccaagttcatggtctgcatgatttgcctttttcattgttgtttgtcttattaagaaagtgatttagatatttgttttatattttttgtttagatggctcctgctgctaagagaaatttgggtaaagcacctattgtagatgattctgatgaatctgattgtgtaagttatagtcttttattaatgttttttttatgaaatactatgttatatgaatttagtttgtagtttactaatatctatttcgaaatatatgaattataggatggagagctttctcgtcgtgaacttgatgatattatatatgaaatttttagaaaggaggtagtattactttcttgactgtatttataatttgttattgttttttatttttttaatgtatattttttctatttttattataggttgttaaagatgttaagaaagaaatattgaatcgaaaatcttgttctcatgcttttcgttatgcgaaggtatgttgttatttactaagttcttttactgttatttttatatttgtaagtacattcctgaattttataggcagtaatttatttttctgatttaggtgaactacacatttgattttaatttttatattgcttgttgttatgtaagttacccatttcttttcctacatatgttctattttattgtactttagatattttttctgtttacttgtctcagattgtcttaagatcttgcatttgtttagaaattgttctttacttagagtttaagcagtattgttcttctactttacttagtgtttatttttttctactgttttctttcaattttgttttctgatgattctctatttagtagttgtttgtttacttgtctaagagcaccaatagtgaagaaactcttctcaccatcatatgcgaaatttttttttgcctgatcacttgaattagtttgctcacttgaaaagagctttttcattattgttgctcttccacaacatgaacattggtacctgttttatgttcgctgcgtattgcaaatggtttgccaatacacataataggtatatatcttacattttgttgtgctttacatatttgttctgtttacttttgtattatatatctattttttatttattttgcaatttttttgttatttaataaggataataagctaaaggaggctgcaaagattgattcatcatttacaaggttttccaccaagtatttctgtcgagttatatctgcactttctccacatcagaaaactattattcagggtgctggttttcagaatttgcttgagttcaacagcaattatgttccaaataaatttgctacttggattgcaaaacatgtggattttaagacctcacaaataattttaagagacaaagtaatttcagttacaaagcagactgtttgtgacatttttggtttaccttctggtggcttggagtttggaaaggattttgaagctggaaaggaatacattctttcgatgtatgggcttagttgtttgccttcagtgaggttctttggagaccagttcattaaaaaggaacctttgacaaatgagaaagtgattacttcatttcttattgttgctttggcttgttttctttgcccgaattcttctatattgccaagcaccaagtacctcaccatttttcaagatgttaataatctgaggaattatgattggtccaaattcatatatgattggtcaatgaactacatgaagaagtttgtgaagactaacagcttgggaggatgtttgtacatgtgggctgtaagtatttgacatatttgttatttttaatttttttctcttttcagtattaacttattattaatttgttctttttatatttttttggtaggtggtgtaccttgacaatgttgaatttggtgataacaatgtttcaaatgaaattccacgtatttgtgtttggaaaagtgacatgatccatgcttattctgagtttgataaaattgatgatgacacttttggtcttaggcctctaagggattttaaatctacttgctatttccaggttaatactatttttaaaaataaaaatgaatttctttattatttttccttataatgcatattgtattaatgttcttttttttcattgtagcctcaaccttgtgatgaaagaaggatttcttttcagcagaaacttgactgtgctcttcagaatatgttgccagtttacatgaaagagaaaatatgttctatgtttgatagtcattgcacttcacttcatactattgatgattcatcttgtggagatcttttgatttctgttcttgctatgattggtgaagctagctgtaatgaatcagatcaaaatgttgtaattgaggaaaatgtaattgagaatgttggcacttctaaagctgatgatgacattggtatttcttctgctggtattagtgctcgtaagtcatatttttataatacttttggtgttttgagtttttcctcttgctgtttctatttttttattttgtattcagtttattttgttaatgcgttcgttttatatgcagaagttcatgtgcctaatgataatgtgttacctcattctcctattcataatgcttttcatgtaagttttttttgtcatatattgcataatttatttgcaagttttatttatattatttgttttttgagttcttgaattgaaaattttatagggaaatgaagatgcttttgtttctaaatctgctgttgaacttaatgattcaagacaatgtgatgatggtaattttgtaccaaatttgttatgttaaattatactgttaattgttttaatcatgcattaatatttttttaatttcttcctgttagatctgaattttgttacccctcaagttggtaatgctaatcattccaaacagtctgttgatgatcttttggatggtcagttaccttaagctttttttcttttcggttactgatttttttacttgtgaaaagttttttcaaatttatctgtttcaacttattcacttcggaatgttttctcaaatttagctttctataaatttttgtaggttctggaattgctgctgcagctgctgctattcatcgtgttgcaaaaaaatttagatcaagatttaatgattatgggaatgtggaaaatatctttaatcagtcaaggcccttatttagtttgctagattctgaagatgatgttagtgattatgaacatgttttctcagttcagaatgaagatgaaggctctgaaaatgtttccccttcttcaacccaagtaagaatttttatgttctttttttgcattgtactgttttgtgaagcaagttttatataaacatatatgttttcaggcagcatttgtattttcattggatatttttacattatttaatctttcttctctgttatatttgaaattgcagccttttatttcttttcaatcactccctgaaactccagacaatgatacttgcaacactgtcattaatgaaaaccctggaactagtgcagcacataattctcagaattcgaacaagaggctttttaaagatgttacagtaagttatacttttttttaatgttcttacttatgtttctcgtaacttcaaaattttctttattatgttttttgatctgatttttttttcaatttttcatttctttcacagaattctcctgatgttgtttgtttgggtgaaaataaaatttgtgattcatcaaaaagaatgtgtgttaaagctgaacagttatataattcaacaaatcaactgaacaagtacattcgtggaatgagttcttctggcggaaagcttcctatacatggtccaagaagggttttagttcctgctaggcatgcttctgatccttttgtcttttctccaaggcgtcgttttacagtttctgatcaagagaatagatattatattgcaatttgtcgtctttcagatagttcaaagtggcagaggtactaaatggctaatcttttaactgtttatttttatttgatttgattttagctttttatgctttatattttatttttgtagttactatgcagttgatattgacaatgtcaaagcaaagttctacagttttggtcattccctcaagaagaattgtattgtgtcaccttatgtcatttcagtcttctgccgtgttttgtttcaagatagtcatccatcaaagtctaaaagaaactacttttttctatcaattggtgtaagtatatatttttatatcttcagttttattttttttgccaaaatattatgcatatgttgattagctgtattgcatttgataggctgaattgattaatgatataagtgataaaggactggaaaaggttaagaagtcattcgaaggagctaccaatgctagaaaattgcatctttgtgacatggtattttgttagtagtattttttttcctcttattatttcaaccatcttttttttacttatatgtacttttgtcatatgtatttttgcagttatattttcctattctacatcttcagcattggtttctattcattgtggatttaaaggatagaatgcttgtcatactagattgtgtatatcatgaaggagatgatttctatgaacctattatgactcaattggtaagttgcacttttatgattttagttttattattttgatttgcatttttttattttatatttaattgttattttgatctgttttattttcagataaataatctccagactttttgggacaaatttgaatgctctccaatgaattttagcaatttcaaattgaagtttccatctgttctagcccatatttctaggttagcttattttattttctctgatttgtttgtagttttttgttctgttttgatgttagcttatttttttcttttttgtttcatagtgcggattctgggatttttgttatgaaaagcatggaattgtggtctccaagagttattctgcaaaatgaattctcaaatgacaatatcagtaacattcgagttcagtatgcaaatagaattttcttccatcctagcaacaagcttttaagtactgaagttgaagatgtagttctcaattggtttgaccctgtaagttaaagttttctatcttctatatatttttttcattttaattaataattttctttgtaggctaagtttccacgtgttgatactcctggtgctgcttgataattgtttcagtctaaaagctatttggtttgaccttgtaagttaagttttaatacctgttctatattttatttactttgttttgttttgacttttttaaaaaaatttcctttgtaggtaaagtttcttcacgttgatcgtactgctgctgctttgaccagtgtttcagtatacatttcacagtttttcttgaaatgagttgtgtgacaaaaatttgtatgacgaggatatttgttctactggcagtacattagatacatataatgtagcactctagcagtatattacatacttgtaatgtagtatgagaaaaacaattatacaacatttgtagtgtttacagtctgaatgctattacatagaagaaagatctcttttttttttcttccattactgatggtattcaatttgtcctttcatttccaatgtctttggtcagcttgtctttgcatgcaacttctctttaggagtttcctcttgagtattgtttttctttcctgcaaaaaagaagtatgcattaggttttcattatatatagtttcatttttgtatatgtattataattgatttgtttattacttctttttgtagtttttgatgttttcatctcttcttgcttgttccctatattggttatctcacttgttcctgcaaaaaaaacttgttatttctacaatttatagttatatgtggattcttgatcttgctacacttacttgtttctgttgtgtgttgctcatctttacttttcctttttgaagtttctatcatcttctccactattcttctatatctttttggttttcttcctttagtattggccaaatctgggtcttctatttccacttcttctattatctcttcttctgcatgctgcacagtatcattttgtactgtgttgctttcatcttgtgacaggtgtgtttcggcctcctgttcaatcatcaattgcacattcatttctaatttctcaagttcctccatcatgaactgatatgttctttttctttttgatgcttttgatgctatgtcagcacctttccttgatagaacattaaacatcagaacagagttgtctgttgcatctgtatgtatgctgcctttcactttctccttcttttctttttttctccatctatcaataatgtatttttctggaatttttctcacattgagttccaacatcactttcaggatatgtgaacatagcattccatccttagagaacttcccacaaatgcaaccgaagttttcatttggtaagtcaatgatcactatatgtttcctttgtctatattcttgctggatgctattaggtgacacaaacacttcatacactttgccctgttgtatcacagatacttgcaaccttaaagtatcctttaattcattttggaattttctgaatatgtctagattatatagttccgatgcctgctcttcaatgagatagttgaaccatagtgtttttggcatttttgtccttgattggaaatctttgctgtactcagtatcaaagatagtatcatttatgttctcatattccttcataaaactcatcacactgtgttgtggtccaactcctcttttgaatctgctatttgttccctcactcagcgctgtgctttgtataaaagggcagaaatcatatttgaagtagacaggcacaaactgagctctattcttccacattagttgcaagtattttatattttgcaaactgaacttttcaatcatctgaggccaaagcacttcaaattcttcttctgttaggcaattgtttagtatgtcatcatattcctcatacaggtttctatttgcttttgcagagaacatgcttcctatcttttctctgcaatttttcttgatgtgaaatagacagtttctgtgctttgtgttttgaaaaacctgtgcaattgctgatctcatggcattatcttgatctgtaattatagtcttgggatgtttccctcccattgctgttataaatgtttcaaaaacccacttgaatgtctctgccgtttcatctcctaaaaatgcacaaccaaacaagcaagttgacccatgtcctgtaacaccaacaaacggtgcaaatggcatattgtatctgtttgttctatacgttgtgtcaaaactgatacagtcaccatattcctcatatagctgagtcgatctaccatcagtccaaaacatgcttgtcaccttgttttcttcatctagcttgaatttgtagtacattccagggtcatcttgttcctttttcttgagataattcaacacttgcttcatgtcattgtttcttgtctctgaatttattgctgtcccaacattacttacatccttcttggtgtagggtagtgctgccaagccacctcggagaaatgataatatcacaatcatgctcctagttggtatgttgcactcttttaatgtccttattagtctcttttcttcctctgtcatatccttatgagacctcagaaatttagcttctcttcttgggcaaagtgcatggttatgattcagatcaagccttgatatttgccaaaactgtccaacttcttttgctaccattgtacatttgcaatttgttttgactaggactactgtttccctctgctgttcagtaacttgttcattgctcttcttcttgtttgctggttcatttttgccttgcaagttgcatttgtatgtgtactttgtaatttcaccttgtcttttcttgcttgttgtcttgtagtggtgcgcaatcacaacagaaaaaccggctaggtatgcatagaagttgaagaagcctctagcttctgtatgtgatttgaacttcattcctagcttaggtatgtgtttatcatctattggtaaactgctctcctcttcattttgtaagaaattgtcaatgtcttcctcacttaattcctccccgttgttagtagctgaatttaaattatcattcatttcagcctctgtttgctgctgttgtatccctgaaatttctgttgcttcaggtcttgtttgttgctcttcaatatcttgctcatgaaagttttcattgtatggctgaaaacaaggattaatagtagtaaatcaaatttttttgcaaagctaatttacaattctagttaaagaaaacagaaataactttggaatcttcttagtgatctatatgtttattttttacaaacctaatcactttcaaagtcctcttgatctctgttctgagtggcccagcttgtaggaattccctgcagatatctcttacaataaatttttgatatgtagcctatatcattttaacatgattaaattattaattaatgaaagtacctgtgatttcaaatgtgtgttttgtaatttgtacaattcctccatagttttgtcaactggaatctgtatattttgatgaaatgttagcatactactcatacaaatttaaaaatgattataatttatttttgtaattgcaatttttacctctggtgtgatccttgcactgttgtagatttcatcaaattcttggtaactgtaatgtttgcttgggattaataggtcattgtttctgtcttccagcagcatgtcttgttcacaaactctgctcgtagttagtatcattgaattctgcagtgtggaaattttaaaaaatattacatacaattaacaagagtatttctgcaaaatcgattagtagctgtgtatataaattaagtttaaaataaacttacattatatgctgatggtgtttgaagcatacttgtgaaactttctagtcctcttcctccctgcatcatttttatattttgttagtgaagcatatgctgttgtacaataatattaatattacgaatctatatccttaccatatttggttctatgttaatccttggactatttattacttggtgcattagacttgtgtacgacaactgtgctacctgcatttcaatttgttagtatcaaataaagtgttgtgacatgcatttttctatgttacttgtttattcaaattaccggtgtagtatgtgacttaagcatggttaactcatcatgtagtaatgctgggctttgtggcgattgggttgtgccgattcctgtgaattgaaaagcatgatggatcagctagttgaattttcaaattgaattcatttggcgtaaattacatatggttaaagagtatcatttttttctgacctgtaatttgtgtgatactagaacttgtttcttcagtatgctttgtatctattttgtttctctctgattcttttaaacttctttctccatcttgtagttgatgaatatttgtacctgcaagaagtgtcaattttattggtaagtttgatatgtttcttttcttttttgtacaagtattggcatgtcagatttttatgatctagcacagtggatttgtatgtttactaacctgactgtattgttttgttgttaccctctttgcttccttgggttatactcttgctattctcatttggttcagcatatggcattatccttattcctacaaaatataacacaaaatagtgataccataataattcatgtttatacagatcatctaagaataatactaagttacataacaaattaaatgtatgtatatatgtaatttttgcttctgattcactgtacaaatcctggtgttttaattattttgatgcttgcttaatgcttgttaagtctattttctgctttatgcttatatctcatacctgcattttgtttcatatggttttgtttatttccctgtgtctcgaagctaactttctgtttatgttctgaaattgagttcaattctgcacaaaagaaaatcaaacagttaaatgaaagaatcctagaatatatgaagttatactctaattatattgcaaatcaactatacttacatgtgtaactttagttatttgtacatgtaaatatagatgaaatttaatttgaatgacacaaattttccatgttttatgagtattaaaaattatataagatcatgcatatttatatattttttttgctattttgcatcttggtctcgaatagtctacttttttttttaccttttttctccaggggtccaatgcgaactggttcggtaaatttcattcctgcaaaattcatagaataaattagtatatttgactgctgaaaccatcttacaagaatgctaagtagtagatatttattttcaaagcatatgcagcaaaattaaaatgaacttatatgcaagacaaattgtttttataaatgttaatttatctaattactaatgtaatttatcaaatatatgaagtgatgtaaatctgaaactttattgggtttcgatatagttatatagtcaagtataactgaaatcaagttagttacaatatgatttgactgtttttacactgcagttacatgtcagtataactaaagttacaactgtaacttcacatatttcataatgtaactttctatagttctttttatactgctgtttttcttgcaaaatttgccaaagttttgcttgttagtgttggatgtgtgtaatacctatgaactatactagaaatggacaaatatatttgctgtgtgcctttatggtggacattttgtattaatttcatgaatgattcttgctacttaacataaattggatttggagagaatgcttaatgtaggtgtttattttatatctgattgcatatttatttgttaattagagatatttttcatatttatctgatggcaaggactgtaactttatattatcagatttatttcatgtcatattttttctctgaattttctgactttttgcggattggcagtgtgcttgccatgtcctgtttactattttattgtttctccctgttctttccagtgaagttgctgcttgtttggaatgatatcctagagccattgagtgattaactcattgcatgtagctttattaactcattgatagctaactttgacctttaattgctgcacaaattccacttgactgattaactcattgcttgtagctttattacaaaattggttttttattttggacttctgatttggcatttgttacatatgttttcaaaagtggttaatttgcactgctgattattctacgtgcacatttgctgattgtgactgtcttgttctattgcaatactccagttggactagcatgtcaatccctcatatttgtccaactgatcccatgtgcatattaaattgaaatgtacatttttagtgatcaagtatttttgtttaaagaagtttgtccaacttgttttaatgtggtttgttgtatagtcagtggttaatgaaatgatattatctaatggagttcatgatctgatcagatttatatcttcagatgatatgtcagtttctaaacattattgtatatgaagtttttgaatgttggtttttttttaccaaattgatgtttttgttctctgaaaaattagtgttagctttcatttcatttgtatggcgctacaaatagatttgtatgaagttacaggataaaataatggaaattacagttgtagttacattggaaatatatatgaattacaaatgtaattttaggtctgtggtgatgtaagttgttcttcaagtcaagtataattaaagtcaagttagttacaatatgatttgactgtttttacactgcagttacatgtcagtataactgaagttacaattgtaacttcacatatttcataatgtaactttctatagttctttttatactactgtttttcttgcaaaaatttccaaagttttgcttcttagtgttgcatgtgtgcactagctatgaactgtactagaaatgggcaaatatatttgctgtgtgcctttatggtggacctttttgtagtaatttcatgaatgattcttgctacttaacagaaattggatttggagagaatgcttattgtaggaatatgtgataacttagtgtgttttttttatatatggcatgtgcattttgtatggcaatagatttgtatgaagttgcaggataaaacaatggaaattacagttgtagttacattggaaatatatatgaattacaaatgtaatttaaggtctgtggtgatgtaagttttgatattgttccaattgttcttcaagtcaagtataactgaagtcaagttagttacattatgatttgactgtttttacactgcagttacatgtcagtataactgaagttacatctgtaactttacatatttcataatgtaactttttataattctttttatactgttgtttttcttgcaaaaatttgcaaagttctgcttcttagtgttgcatgtgtgcactagctatgaactgtactagaaatgtgtaaatatattgttgtgtgcttgtatggtgcaaatttttcagttcaacatgtgtatgtacagtgtaattttctgtatttactatatgattgtttcttgttaattaactgaccttgtttggatcttgatgttttgattttttcttcagatttgatcttggattttggttcttcttcttctcttttcttctttgcctttttcttttcgctctccatgtctatcttcttcgatctgactttggatctgttttggatgggagaagcgttgattcgctggatgtgtgctttgatcacgtgatgtatgtgctgtccttttctccagctttcttgattgccaagttgattgattttgggctataatcataaaattatttgttgtgtttttggcccaatatgattttatcggcccattattatatttacacgttgcaattttggcccaatttaggccttttattttttttctatttgtttccttctttatttttgctgccgttggatgctaatccaagggatcagaaatctgacaaatttggggcctgaaaatttgtcgaatgatgtgtagagagaccctaactgaaataaaaataggacggagatgttgtaagttgtaaccgaacgcaacaaataccatatcaaatttacagcccaatgggctaaaagtgcataagacaacggcctcctatatgaccacacaagctagatatagatagatgacggcaattcgacatggcaacatgtaccagcagttgaacatagtcgaaccctccagcccatgaatgccactactatagtctatagtagctcactcatcgccatcgtcggaccaggtgatgtgctccatcccgacgctcttgtcgaggccgagggcgtcccacaccgccggcgacgcgtccacgatgttgttgtcgcacggcggctcgtagttgtgctcgccgtcgcaaccgtgcacggagtcgcactcgtccaccactttgccaccaccgacctcccgctgccgccgctcgccgtgatcctgacccggtgcccgcaccgcgccatgccggcgaaccaccccgtcgacagcactccgcgggcccgccgccgtccttccccttctcgaagctgttcagcgtcagcacggcgccggcggccgccgtcaccggcggggagcaccggtactgcgggtacgccttgccgtcctcgcagcagtccgggtcgttgctctttcgcagttg

SEQ ID NO: 6377 - DNA, 14918 bp, Oryza sativa
cctgcagccctatgcattgtacctcagatttgttgatggtgatcacatgcccggtgtaaggtagctgctgcatatccaagcaagatgtgtagaacagtacactgcttgctgatgctgactgttcatcacacatgatcaaatagagaagagtcagtcattgacaatggcatcaaattgtctctcctagtatctggctatccatccaaccggaataccagataagggacgcaccatgtatgccatgatacagtcttcacaaacatttgcaatggagaaggccattggtagcagctgatcttggagctaggttgatcatgaatgtatcagcagctagcattcaccagtgtatacatgtgtggccaatcatgcagcaagaattattgtagggacttgtcccttgtcgccggcaaggctcaccggcatgcagctttgtcgcggaagccgaggagcggtgacaaggcgctacacgtcgcggcccctgcttagctggcagcatcacctcggcccctgcaagggaggtgaagctcaaggctgctgccagccagccattgctgtccctgaggacagcaccagcaccaccatgttagcaccctctctcagcttcagtggtggggaatccacctgactccagtgtgtagacaacctacaaaatgacacaggggtgagcactatgcagatgcagataatgcatgcatacattgcttacccagtggctggatgcatttgcattgccatttctgcaaattgcccagaggggggagcaacactcagatcttgcagcccatcatggagcagcagatgtccagccaacagatgaaaacattcaacaaggaaccatgcagtatcatctaaagcagtagtgccaaacaacaacgtggtgtatatggtaagccacagtgctctagtctgctgtgaaatgtagtatatgggggagaaaagattccttcagacactgtaactgaatcacaaccagattgttgctcacatttacatatctcaatggtacaatccatgagtcatgcacaatggcagtgtgttgtgtttgtggactcaatctcagatacagagaggcatatgaactgtgtatgacaatgctcggagagtttgcgcaatacgattacttctttgaaactgttacagttcaagcgctagaagcgcctcttctcaaaacagaactttgtatgaggagctatttctcacctatctcattctagtgcaaacaactacttgctggattacatgtgtatttatactactttttggttgatctcatttgtgatttcttggaagacccagaggcggttctgaggcctccatggtctcgcattcttaggccaacgattggtggcctcaaagtgactggaaccttgaaaatgttcattgtcaccaaatggcacataaccatgtccatatctttcacacttggatttccagtcaggaaaaagcgaacgctgagctgtgctgcttctccaaggtggttgctctgtgccttcagctctatcactgagatggcttgtgtcgagcctttgggagactcggttactgtaatcttgcaccttctgctgtctccattgtggagcagtcctgacaaacttcatgttcacgttctcatctgtggatattttggagtcactgtgtctccatgaatccgctgaagaactctgtgggtgatcatccacgcttgatctttttaaggcgctgctttcttgagagaatgagggtgttctatacatctcctcatttgcatgcttgcagcttacatttcgcttagtagtgtccataccgatcgttgagctgacatcacccaattgacgttcatcttcttccaccatatcagcccatgtttttctaacaccattgacaagagcctttccctctggcctagtattctcaccagcatctgtggagccaccagagtttggcaagcattcaacaaaactaggaatctgaacttggtgctgtatgctgatatttagtgtgtcctctttcaccagccgttttcgtagtttctcaagcaacgactggggtgtagcagcatcattgaacagtcgagaaagatcttggtattcattcaggcatttctcattattctccccactggtagcaatcaaactttctggttcttcacgtttcatctgagtaatgggagatggaaatacttgtgaattgcaatcctcctgcttctctgcatcagcagcaactgaaatatgtggttcttcagatttcagttgagtcaaagcagttgaggatacctgtggctgtaaatgcccaaggttctccgcatcaatagcaagccagattaatgattctttagatttcatctgagttatgggagaatggagtgttggtgactcaagttccataagcatttctctggcccgagcaagagacctcacatggctttcatcactgcagttgtcaggtatagattggagaaggtatttagcttcggctacctttccggtctttatcaggcagatagctaagttgcactctttgttataatcagcttctatagcaagagcttgcctgtgtcaaatgacatacggctagtcagtagtcagtaccagctggattagttgaataacgtaaaccagatatcactcctactagtatcagcattcattagagctgattgttgcttgcagtttcaataaatggtttttattatataattacttctaggattcataagtgctgactgctgagtatagtcatttcaagcccacctagatgattttaactgtgcggccacatgttttgttttcctttttgaatgaaaagggtatgagctctgcctatacatgttttgttttcagttttcacactatggaactattgaaggaatatagtagcgcctattttttcctcttaattttctcaaatgaacaccaaatgtgagcatttctaataaactagaaatcaggataaataaatactgccactttgggagatacaagccatctgatgttgatgaaaactggactcaaaagtatacctgtagagcatttcggcctcatcataattttcagactgcatatgggcccaggcaaggttacccaacaaccttcaagacaaataagagcatcagaatgatgtttactggttgaatagcaatgtacgaaagattttaaataccttgctttttcatccctgagagacaaataaactactcttccatgagatttagacaacttggttttccacctgccagaagctagctcctcatcaacaattctcaacttcaatgtcagcatttcaatctgctcttttgtcctgccgcatttctggttttacataaaaatgactagtatcagaacagaaatggtcgcatcttcatctaaaattaacatgtcatcagtgcagcaatttagatgtctttaggatctactgctataggcctaccaaatcacagaattactttacaacagaaagatttagcttgtaggttcttggtttacaggccaagataccttgtacaggtcaagaagaatattgtcaagagattcctgagcttcatttgggcaacgatcacggaaggatcttattgcctcaatagcctcttcggctcgatttgcttgcttcagtacagtagccatatccttcagtgcgctctcaattcgatcaccactgtttatagccgcccagaacaatggaactgccttgtttgggtccttttcaatcacctgcagaaaacaagacaagaaaacaaaaacctcagatctagcttatgaaaatttctagattcaggttattacatgcatttttgttcacaaaactgaaagagctgtagaaaaagaaacgctgtcactttgcaaaaaagcaagtaacatgtactgaatgatttagcatgaatatgttgaagcaacaattaagggaaaaattagtacccactacagttactagttagaatagcatgcgttagtggcaacacaccatcaaaacttgcccaggtggtgtggctggtgtctattcaatcttttttgagatggtctatcagtcttttagtataatagatttctggtaacaagggagcctagtcatgagaacacaatttctatatcgctttacgattttactctaatactggttttgttaaagaaacatagaagtagttttatctatatcatggaaattaccttcatattctctcttctggttcaattaaaagtgttttttttttttgtgggttgaggggggacagagaagcagagcttcccctttccattactggaaacaaattcagattacagagttctagaaagcagaaactatgaaaaaaagctaatcagcaagaaaagcttcacaccaaaacgatgccatcccattgctttttgtgaagtttttgcccccaggatatcctaaattcaattcaaacatatcatgaaacaatggaaaatactgtaactaaaacaaccacaaaatgcttttgcccttccttctccctcacaaactactcattattgaaattaatatagtacacacagtcaccatattgagcatacttcagcaacctaatttgcaacctctctccagagtaaacgaaattgcatcgcacatgatggtttccgaattccaattacctgagcctgcttcgcccgcacgtagggcgaatccaccgacgacagcggcgccctaggaggccgggaacacccgccgctcgtcggcggcgtgacacggtaaccgtaacacccgccaccaccgctcgccgggggcgtcacgtgcgaggagcacccgccgctcgccggcggcgtggcgtgggcggcgcggcccgaaccgtccgcgcccgcaggcgtgcaggggctccacctcggcgccgcccccctcggcgacgtccacggcggcagccgcctccctccgctcggcattgcggaattccgtcgaacacctggcgcgcagacaccaaaatccccccatcaaaatccatccaccaaaacaaccagatcaaacacaaccaaattaaccaccgcatgcaaaagcgtcccccaacctcgatcgagaagtcgagaacccgccgccttcgccgccgcgccgtgctcgggctcgacgcggatcacgccgccgcggagttgaaagcgagtggagggagacgcgaggacgaagcggcggcgcgttatatatatacccccgcgcgcgcgcggggaaggggatttcaaacggcgctgacgtggacgggggaggtggggcccacggatgcgtacgtggacgtcgcgtcacgggtttccgatgagacggcagcagtaagtgcagctcatgcggctcctgtgaattgtgatgcgagattgcgtgaaccacgcatacaatgtgctcttcctggcttattattgaataactttagtgtgaattttgtgtgtgaaaaaccataaaaatggaactgaatttaccctacttaacttactgcgtgcattttcaaattcgaatttgtttttgtttgaatttgctgtgtacatggtgactgatttgggtgataaaaaggctgacagatgaggcacgatgaaaagaatctgcttttctgttatctaaaaatatactgtggctgtagcttctgttaaaacaaaggctgtttttttggataacaggtagcgctcggcctctgcatccgaaggtagatgcacaccgccaaacaaaatgcaaaggctgggtttaatatccattatctaacaaaaaatctgaaaatatatggttgactaattacattttggggtcgttatgtcatgatgagaaattgagaatcacatattcattagtcatgatgtagatgaatcatctattgctggcatcaggttgcaaaaatgagcatcagctttagctaggggtgaaaatgggtggatactgtcggattatggcatttccatatcctaacccatattttcctttaaattcggagtcggatacgggtagtgccggataagatattactcatcccgtatcttattccatattattttcttcgaattggatttggaaacggacatctatttgtatctctaattatagatattaaatataaaaaggtgattaaagtattaaatgagatacatcaagagaaaaattatacaatattacatgtgagctcgtaaaataatgattaaccattttttatcatgtttgtaggtggatttataatagattttcatacatattttataatatgggacatatgggcggatacatgacttcctgtatccttatccatattttctaacgaattcggattcgaactcggatagtatcgggtatcccattttttgtcccatatttctcccatgagcctcgggtcgggtgggcggtcgggaaatacccgccccattttcaccgctagctttagctgatgaaataatcggatacttgaactcaaattcagtaaataacaagtaggatagcattctgcctgtaaaaatgaaaaagagagaccaaaattgggatattgctgtgatgtgcatgtaccaccagctgaagatgaagaacataatgtgcttttttgtgctgccatggtcactaacaatagcctaagactataaattgctgtgtagtttcatgcttgctaatatctcagcctttaactgttctcttctaattttccctgttgttgtcactggaaatggtttactccactgataatatatccttggcaccttgaatctgtttcagaaaaaaaaaatagtggagtactgatcatttgataagtaaggtaaaaagaaaaaagaactactacctgattacctagagagggtcatttaattctaagattttagagctgagtccatttaaagtttttccatcatgatatcagtggattagctaacactgtactagctgaaaaaattcagttgtaaaagataacatttgcttgttagttgctgcatcattgatccaaagaatcagtggcacaggtagattttctgaatatagtgacacctgatagagcatcaggaagcaaactttccgtcttatctctcatttatttccattgtttaaggactgatctgaaacagttgataatttgactaatgaaacgctatgttgagacagaatacctgctcaatttgtttgtacggcaatggtcttgaagcatctgtgcagagacttctctgccttcccccttgtgcacagctcttgcatcaacccagttccagccatccctgatgctaacacaggcaacaattttctccccgagacgactatccggcatgccaatcaccacggctttagctagacctgggtgctgagacagtacagattctacctgaaaattttgagatgaaaatcacctaaacatggtttcacatttctacatatgcataagcataatgtcaccctatgaacattgcactacagcactaatagtagaatcagtacctcctctgggtacacattttcacctccagttttgattcttcccttttgtcgccccatgacccacagattaccagttttatccacccatccaatgtcgccggtgtcgagccatccattcctgacagaatctgatgtgtctatgctgttgttcacccagtatccggacatcgtatgtaagcctcttgtcaagatattcccaattggtgaagaagaactactgttacttccatttctgttgatctgtatctcaatatgaggcgctggtttgccaacacacacaccttcagaagagctgcctaactggtccttaggttcttgaatttttggcctggtgagaaccatgaatgtcagagatgaacaggcctcagtcatccctgatgaaaattttaagccagttagtgaactttgcagtaggtagccaataacatgattcagagctcatagtaacagtaacagtgatgtctcagttcagttttttgagatatgttacaacttgcaagaatcaaaatgactcctaatggtacctaactttagggaatttttgcaggaaaaatgaacttgaaatcagtggtaagtagttataccataagctgagaagatagtggcattaggaaataagtgagaagctccagttatcaattcactcgacaacccgccaccgccattgagaatctttgtcacggtcatcccgtggttcaatatcttctgtttcctgatgtaccaaaacttttaatcagtcaccaacaaattgttcattcctaggcttccagaatcatattgtatcgccgttgtcataccgagcataggatagtaggtcagccatgattgcaggaacagtgatgaacgaagtcactctgtgttctaggatggcgtcgaaagccgatttcacgtcaaatttaggtatcaggacatgacagcctccagccatcaggattgccaagcatgaagagatccctccaatatggcacaaaggagctgtatgcaggtagatctgcaggccagacaaatgtatgatgaaattccatttatatcacatctagatggttgctaaggaaaataatgtcaacattaagtgaactatatattcaagaaaatcatgtgacaatatttggatcctgaaagcatacatcatcctcaccatagccaacaatggcaatttttgcaagggattgaatgatcaaagatgtatggcttatcgctacaccctttggtcgtcccgtagtgcctaaatccaaatagcttatggttatttagaatcaaactgatcccaattcaacctgtctataacatgcataaaaggccgcagactgaaattccccaaagtgcagataattcagtgcagaatgagggaagaatcagctcagtgccaggaagagcaatcgcttaccagatgtgaagcatatcagagcaacatcatttggagcagacacaggctctactgctctagtagttcctcctgagctcctcttgatctgctcaactgatacaactgatacaactgaaacaaattttcatgtgtaaatacgagttgcactgagccataattcacagggcaacaatattctcatataaatatacccagcttgttcacaataataaaataacaatctgaagaacttacagtttgcagcttggctgatgctgcagagattccccaggaagaggtaaagattaaccgatgtcaagctgttgctctccttcagccgaagcgcccatgagctgtagctgccatcgaagatgaacactgttggctgcacaagctccagtgcctgtgaggcctcctcaaagctctgaccacccacatggaagatgacacagttcaatgttcagtataaagtatcaacacaggctagaacagcacatggaaattcagacaaaatgtttgaattgcagctcttttttttcccttgaatttgtgatacatgaggtgaaggaattgaattattacccagcggtagttgagaggagcgatgatccctccgatgtaagtgacggctaagaacagctcgatgtactcgatgctgcaaagcagaagggaagccatggatgaacacatgagtgcatcaatcagaagccacaattacgggtttcatttctcaaatcagagaggcaagctgaagagaatgcaaagctagctcccaagtcccaacctgttgaaggcgacgacggcgacgacgtgaccacggcggacgccgaggttggagagggcggcggccagcctacgcgccccgtcggcgaggccagcgccggtcaggcggcgattgccggagacggcgacggtgtctcggccggcgagggcgccgccgaggcagtgggcaatgtggccgcggccgtgctgctgcgacattgcgcatgcaacgcaacagcgtgagcgagcgaggaaggagaagtgtcaacgtgattgcgtgacatctgaatctttttttctttcgattcgagataagaagttcagagcagcagagatggttgtggtcaggataggaggccactgattgctacatatccagacagataacctattttatcgagatgtagaatctgaccatgtgactgacttaaggacttcttgcctggaaaaacctattttaccaagtagtagtattatctgaccaagtgactttagacttcttgccttgctgcaagaaaatagagctgaaatgtacagaaatttctgtgaaaattttgcagcaatttacagaaacatgggaaagttactttctgtgaaaatctgcataaattttccagtaacaagggcaaacttacggcggttaaacgcacggcattagttctttcttcatgatctgatcgctgcgcaattctaggatacatgcattcgaataaagaaaaagatgaaatgcacaggaggatgaagtcgataaccatcgcacaggcacaccaaaaacagcagggggatacgggcacaaccaaaatgcataattaacgataccattgttggatacattcttgtctagtagaaaattaatatgctaaagattaaaaacaaacttcgatgttcagaacttgaaacaaaactttcaactttgcagcgatatggcaagaggcttagtcgaagaggctcatgcccaggtcaccatcggactcctcctcgggctcttccttcttctcttcctccttggcagccgatggagcagcagcaccactgtcggcggcaactggggcagcaacagcgaacttgctggggtcctgagaaatataagccagataaatatgtaagaaaccatgatgcaaccgcttccaaagcagcattaacttattttctagtgtggtaaacagcattttgctaccatggatgaaccaataaaggcacaaacagcctaagtgaaatactccttgctaccataaaaattcaattgctcactagactatgtaataatgctcaacgactaaatcaattatgtagataagtaaaaatgaccagttcaccagctagctgcatgctgctaggcagccgctgcagcagcgctgcaccaagcagccaaacaagatgttaatgtaccgacatggacatgctacattttagtatggtaatctactatctattgattatcttagttagaccaattatcaagcattaagaaaacatcatcataaagtgaaatagaaacaagattactttcaaatactccttgatcttatcagcatgtgggtacgagtattcggtctccacagcaacagcaagcacattcttgtacccattgaggaacatgtgtggtgcagcagcaatagttgggtacgagattgccagggagactgaggcaaccatagaaacaccagaagcaaacttctccatcaggtcatcctcagtgaggtcaagcacctcagggctgaagactgacccactgtcatagacattggtaataaccagcccatatgagaaggggcggataccaagcttggcaagcagagcagactcggaggagcccaccttgtcacccttcttaatgagctccacaggggtgataatttccacagtacccttgttaatcttggtggggatgttaagcacctgtaacaagataggaacagtgagaacatgtagttgactacttgactaagcagacaagatagtatttattaacaaatcaacaaatgatcacctggaagaaagaggtctgggatggatccagaccagtgttgccagggggaaccaccacatcaacaggagcaacaagaccaacacgagcaggagctccaacctgttttataacaaaaacaaatcagggttattcattcatcagataacatcacaagtatgcactgagatttcgcaatgaaaagagaagcacaagtcaagcaacaagtcacactgtaaaaacataaattactggctatttaaagaaatctctaaattaaactccaatatgtagtgggatctacaacatgacattgcaatataaccaaagaacttgagacatacactaaaaggtgacgaggtcaaatattgtgatatcacatctaacataacacttaattccatacaaacagatcatctactttgcatatggataaacttaacatgcataagcctagcgataaattgagcatgacattgactataatgtcctaaagttgtacatgcttgcaaaaactagcaatactcatcaggcatcaaactgtcacaacctactaacaattgagattcttcccatgatcactgtaagataacacactaaaacatcaaccaatttcacttaaagaacaagttactattataaaaccaatgcaatatttcagagacaaatcgcattggaaaagttacatgatgatgaatatgtcctttaaaatctaacagaagatctagcatcatacaacaaaaatatcgacatagcatatggataaactgctccacagaaagtttcataataacactaatacagttacaaactagcaaacggatcaagcatcagatttgcaatttttttacataacacgctactaatatcttccacatataatcaactgcgagcgtgcaacccaatgaatcacattcaacaaaaactacagaatcaccacaatacaatctactatccatgcagtctagaacacagattgaatgccagttataccttgtacttggcaacctcctcgcggacctccttgaggtcacccttggtgaagatgaggccaacgtttccctacaaaaaaaaaacagcaagaacatcacatcgatttccagaaacacgcgtaggcaaaaacaaccgcaagaacacggtgagtcggacttacgacgaggaggggcatgagctcgaggaactccttgttgccggtgttgtcggcgtgcaccttgatgcagcggcggatgagggtgttcttccccatgaggacgatggagtcgcccctgaggcccttgcggatctcctgcagctggttggacccgacgttgtcggcgacggcgatgagcaccttggtgtactcgtcgagaagctggcagagcttcttgtcgtacgccaccttcttctccgccttggtcctcttgatcgccatcgctgcgagctacacaaaccctaaccctaggcttagatctgcgcgtggggagaggagacggcgaggaccaagctctcggcgaggaggagcaaggcggacggcttgcggcggcggcgtcgctttaacctagggtttccagggtggggggtgcgggtatttatagtgggagagggatgggtgtggcttcgggttggtgggcctgatgggcttggttttagggtttcgtggcggttgcggtctcaggagatgggccttattgggctctccggcgtatgggccttgccagagtctgcagagggcacggttgcccaaggaaccaaatttctttttcttttacttattggtagagtaattcggatcaggtggagttttatgaaatttaatctaattctggagataaattgtagataaaataaaacaagtcctggtataataataataaattaattaaaggactgtatgtaaaatatgtatgggtctttttatgggtcttacggatagtaacttacattgcggattgtggagagaatattttggctaaaacatagtaacaattttggtagaaaaccattggaaaaaaaaagggaggccaaaatccaaacggacaactctaccaaaattatggcaatgataactcttactgttgcaaaaataagataatgttaggattggcaaagaaccaaacgtgccgatttatctactgtcgacgcacagaagaaacaatccaatgagatgtgatccaaattccaacagatatgctaacaacactttggcaatttttactatgatgatgaaaatgtcaaaaacttagcaccagaaaatgaacaggtaacagctctttcactagattctcctcctgctggatggatggatggatgtaaaacactctaacaacaactcactaagttcgcagttacgacaccaacacggcaacacatctactgagctgatggcactcgattatcaagaattcagagaagaagaaaagtgaaaaggattggtagtgtgagtgatcagcggatcatcatcatcatgcttctatggacagcttcttcttgtgcctgctgagcttcagccgtggcgtggtgtcacccttcaccacggccatcttctcctcgctcgccgtcgccgttgtcgtcgctgtcgtcggaatagcctccttggtgctgcaaatctgtggtttcatgttgagggagaatctgcccttgccggtgctccggctgcggcccagccgctcgatctcatccctcatggtggagcactccttctccaggtcggcgacgcgctgcttcatgttgtccatgccctcccggagggcctggttctcccgggaggccaggggccagccggggcggtattgctcgccggagatggtggggatgagctgcctcgagccgccttcgaggttctcggagaccatgaggcactcggcgatggagctccgtagctggagctgctcgaagaagaggacctgcacgatgacgcgcagcgggagccgctcgttctgagccgcgtgagtgcaggcctcgagagagagcttctggcagtccatcacccggcaaagttcttccttctctgattcagacaggtgaggatgcgcctatggagaaaaaatccagacaaattattaagcatctacaagatcaacatgatacagcaagatgcatgatcaaaactttaatagatataggtattgtttttaagataatagtttttttttaggaaaaggcaatagctattggcaattagcatgacaacttcattgatggaagagaatagccaagctgttctgtacagtttaggcattgtttggatggcctgaaattccatcccatccacatggataggccaggatttcaggagcaggtattgctgcaagcctacctgaatagtaggcttctgaatccattcttcagtttcatcaggaaatcggcttacgcagttaccagtgaaacaatacaaggctaaatccctaattaaactgaaagagaggctttccacaaatcacttgacatacaaacttgattataaattacaatttgaaaggatatatg

SEQ ID NO: 6378 - DNA, 24105 bp, Oryza sativa
cggcgcgcccgcgccccgatggtcaccgccggcgaccatcggcgcggcggagcggcgcccgagagagcggagagaagggggaaagcgaacggcggtcttcggctcaccccgggacaacgacgacgacgagaacggcggccggagcggaggaaagcggcggcgcggttcgggatgacgatgacgacggtgctccggcggtcggcgggcgaagcggagcggcggacggggtcggcaaccactcggcgaagccgatggaggtggcgccgagtcgggaggaggaccggagcgacgacggcggcgaaacggaggtcggcggcgacggcggagagagaggagcacggcgcgagcacggatccgacggcgagagcgagcggcgagcggcggaaacggaagagcggagctcggggagcaattatatagcaccgagagggggagaacgcggccggagaggaaggaaacgggcgcggggatctcgggctccatagatgtcgccggcgatgaatgcgggaaggaaatcggacgaatccgagggagagagagaggggaaaacgggggaaacgggagagggaatcgcggggaatgattcccccctcattaaggcgcgcggggaaggcgggatgcggcggaatccgcggcggcggcggcgctagggcacgggcgcggcggcgggcgcggcgggaggaaggcgatgacaggtgggccccacccgtcagcgagagtggcgggcgggcccgcctgtcagcggtgcgcgcgcgcggggaggccgatgggccgcgggggaggagagagagagagggagggagaagtgggccgagccggcccaagagggaaggggggggaaaaagaacttcttttagggttttctttttataaaacctttttaactttgtttattccttttcaattattatttgtgctctgaaaattccactaaaatttatttaagcattttaggcttttaggaaatatacaaaaatcctccaagcctcatttgacttttatctttgcccattttaattgttggaggctttcacatgaattttaattattctttgcacaatttcgaggatgaattttagagtcgatttgggacgcgacaaacctaccccccttaaacggaatctcgaccccgagattcggaagaactggcgaagagatcgggatgggctgccttcagttcgtcttcgcgctcccaagtagcttcttcttcggcgtggttgctccactggaccttgcaaaaacggattactcggttcctggtcctgcgctccatggtgtccaggattttcactggcctctccacataggtcaagtcttcgcgaacttcaatttgctctgagtcggcctgctcggatggcactcgaagacatttcttgagttgcgacacatggaacacatcatgcacgttgcccaaggaggcgggcaactccagctggtaagcaacttctccgcgtcgagcgatgatacggaagggacccacataccgaggtgcgagcttcccttttgtctgaaacctgtgcacacctcgcaatggcgtgacccgaagatacacaaagtcatccactgcgaattccagatcacggcgacggttatctgcataacttttctgccgagactgtgccacctttaggttatcccgaatgattctgactttagcttcagcttctctcaggatatcagtcccgaacacttggctttctccaacttggtcccacaatagcggtgtccggcatttgcgcccgtacaacgcttcatagggtgccatttgtatgctggcttggtagctgttattgtaggagaactcggcataggggagactcttatcccaagtcttcccgaagtccaggacacatgcgcgaagcatatcttctaagatctgatttagacgctcggtctgtccatctgtctgcgggtgatacgcggtgctgaaattcaatcgagtacccagctcttcctggagcttcttccaaaagtgagaggtgaattggcttcccctatcagatacgattttcttgggaataccatggagactcacgatcctagcgaagtagagctccgctagtttattccctccataggtggtcttcacaggaatgaatcgagctaccttggttaatcgatccacaattactcatatagaatcatatccaccttgggtttttggaagtccggtgatgaaatccatcccaatttcatcccacttccattctggcacttagagaggctggagaagtccggccggtcgttggtgttctgccttgacacgctggcacacatcacatagagccacaaactctgcaatttcccgcttcatgctaacccaccagtatttctccttcaagtctaagtacatctttgtactgccagggtgaatggaataaggactttcgtgagcttcctgaagtatcagctgtttaagttctctgttatcgggaacgcatacccgctttccgttccataaggttccgtgttcatcctctgtgaaaccagcggctttaccctgtttcatattcttgaggagtccatgcatgtccggatcattcttctgagcctcgcggatttgatcgagcaaggtgggcttggcttctaacgcagccaagaatccgcgaccaactatgcttaggttcagggcttccatctgttgattaagctcgggtggaatgcctcggacgttgagagtgttgcagtggctctttcgacttagagcgtcggcaaccacgttggccttaccaggatgatagtgtattcccacatcataatccttgatgagttctaaccatctcctttgccgaagattcagatccgactgggtgaagatgtatttcaagctcttgtgatcagtatatatttcacagcggttcccaatgagatagtgccgccagatttttagagcatgaaccaccgctgctaactccaagtcatgtgtagggtagttgccttcatgaggtcgtagctggcgtgaggcataggctaccacatgaccgtcctgcatgagcacgcaccccaatccttggcgcgaagcatcacagtacaccatgaaatccttgcgagtatccggcaagattaacactggtgaggaaaccagcttttctttgagagtttggaacgccttctcgcattgcgggctccacacaaatttctcttctttcttcaacaactgtgtcatgggtcgagcgattttggagaagttctcgatgaatctccggtaatatcctgccaaacccaagaaactgcgaatctgagtgactgtcttgggttgcttccaatcggtgacggcggtcactgtttcggggtccacagcaactcctttagcagatattacgtgccccaagaatttgacttcggacaaccagaactcacacttgctgagcttggcatacaattgatgttcccgcaactttcccaacaccagacggagatggtgctgatggtcttcctctgattgtgagtatatcagaatgtcatcgatgaaaaccacaacaaacttgtccaagtattccatgaacactttgttcattaagttcatgaagaaggcaggagcattggtcaagccgaacgacatcaccgtgaattcatacagcccgtatcgcgtggtgaatgcggtcttcggaatatcttcttcccgaatacgtaattggtgatatccggaacgaagatcaatcttggagaatacagtggcacctttaagctggtcgaacagatcatcgatccggggaagagggtacttgtttttgatggtgacttcattgagagctctgtagtcgacgcacatcctcttcgtcttgtctttcttctctacaaaaatcacaggagcaccccaaggggaagtactcggacgtatataccccttttctttcaactcttccaactgtttcttaacttcggccagttcatttgctgccatacggtagggtcgcttgtgcagaggagtggttcctggagcaagatctattcggaactcaatctctcgcttgggcggcataccaggtagttcttccggaaacacgtctccgaactctctgactatggggatttctgacagacctatctgatgcagttctgaacttctgacagaggttgggggtgcaaagaaaacaaccggttgttctggccctcggtacagagtgacagtgcgcctcgcgcaatccactactccttggaattgagccaaccaattcatcccaaggataacatccaaattcttggtgtctagcagaatcagatccgagggaaaaggaatcccctgaatttctataggaacggcagggctataatactttgctgtcataacccctccaggggtggtgatgagcagagggtttctaagcctttctacccccaactgatttttccccacgaatggcacagatataaacgagtgggaagctccagagtcgaacaaaattgtagcagggatggaatggacgaggaacgtaccgacgatgacgtctggagttgtcagcacgtcctcggccgtcacgtgattcacgtgaccccgaatgacatccttcccgccgttgttggagcggggaggcgcttggccttgctgacgccttggctttggacatttatccgcaaagtgtccgggctcgaagcagttgaagcacagacgctgctgaccttgagcgtccctgcggccttgaacgggctgcacagttggcgtaggaggacggggcgcacgagtcccttgctgattctgctgctgctgcggcggtgggacgcgcaccacgaattgaggtcgaggcgcggagcgaggttgctgctgctgctgctgctgctgcgaggaggatccccctgggtagggattggtgtagcggaccctctggttagcaccctgctgattgcggaagttcgccaagcggcgcttgtgcgattccagctccttgtgcttggcctccaagcggatgctcttgtccaccagacgttggaagtccgggtagtccccagagactagacgaacggacagctcagggtccattcctgccaagaacttctcttgcttctcctcatcttcccgcacatcctccggggcataacgggctagattgttgaactcatgcaaatactccatcacggagcggttgccttgcttcaactcccggaattcccttttcttaagagccacgactccagcgggcacatgggttctccggaaagcggcggtgaagcgggcccaagtaatcggctgcccctctggctgcgcagcctggaagtggtcccaccagagagatgcgggtccctgcagctgatgggcggcgaagacgactttctcctcatcactgcactgcaccgtgtctagcttcttccccacggcatgcaaccaatccaacgcatctacgggattgttggagctggagaaggtaggtgggcggatgcggaggaactcggcgagtttagagtgttggggaggtggtggtggagcattctgttgtggcggattttagaggtggtggaggaaagcattcatcatgttggcttgctgggcgaggatttgggtgagaatggcgttggtgtctggtggtggtggtggaggtggattgccttggtggttggggttgctgccctcgggttggttgccttcaccggtgttaacatttctcctggtcgtcaccatctgaaaaccccacacagaaccagcaaacagagaaggagagctgacgattaaaactaaccacccacgactactataattcttgaatttattactgctattaaattggttcattaatgttcaagttgcttaggcaaataaaataagacaggctccgacatagttacaccacacaccggtgtaaccatgccccacacaactcaaaaagacaaacgaggaaaaacacacgcgcaagcctactaactgctcgtctaccgctgcgacgggccagggcggaaggtgagcaacagcgcaccctccgagctaccaacgccggaggcttccccctcctggggaaccacgggcgcaggctcggcacgaggggtctcgacgaagcaagtccacgccagggactgacgaacaagctcgggcctggaggtgctcttgcgggcggtgatcttctggctgcggcagacgcggcgacgcttgaggcggctgtcctctccctgggcgatcttgagctgatgcagctgcgcctccactgcgtcgaggtccttcttgagctgcaggttctcctgacgcagctccaggatcttcaggttgttctccaccatgccacggcgcaccatctgatggaagtcgatacgagccgcgtcgtacgcctccaccatgcgtgccagatgcacgacggtggcgtcatcctccgagctggcgtctcggaaggtggcgtagtcgcgggctcctccgcgacgagggtgatagcggtagggcgagtgctgcaactcgtccgggtagcgctggtgaagggtgccgatggcgaggagagcggcgttctggcaagcggcggggaaggaatccccacccgcggtgactgccagcgaagtccgctcgggagagccggagaggatcactgcagtgacctcccaaccagcgtgaggctctgcatcctcaccctcctgctccgggagcggcctggcctggtaatccactccatgcggataccccaagaccacgcacatgccccgcagctccaagacgaagccagtcatgtccaaaccacgacgggtaacgctgccggccatctacaaacaaaaacaaaaagagaaacaacattttaaaggacagattttgatgataagtgaagcagcaagacaaagagagaatagcgggttttcacaaataataaaggatttttatttttgaaaatattgctaaggcttgggatctacggctcgtcctagggtcaagggaggctctgataccaacttgtcacgaccggaaatcacccaacaggcgttcctgacgtgcgtgtattattccttgtcccaggaggcaaggtacaccaaaagttgatacaattcagagtttaacaagcggaagcgtaaatataattattacacgggcaacaacggcccagcacacaaagacaacgaaaaacagcggaagactagggcgacgaccacaggcgcttgacggcaggcacgagctagacaccaaagccttcatcttcaaggaactcctcatctgggcttggggaaaattgagcaagactgagtacaaccaccgtactcaacaagacacacccacaaatgcagaataaatgcaagggagtacaagggaattataccataaaggggttagggttgcagtaaacagcatttaaagacatttagttgctcaaggctattttgtaaacacgaatctagaactatacaatattattaatcaaggccgtgaacccacacgaacctgccttaacccaaggcctatgatgattcagaccgaactggcaacccgaccctgggtcccagctcgtcccaagccaacccaggccaaccattccatattttagttgttaagcaagttttaagaattaaaacactaacttgggtacattgctcggcttgcccataaccgagggctcggctattcgaatagattatactctgatcagaggtgtacatctttacccacaagacacatcttcctcacgtgtaaccacgtgccacataccaccacggtatacagacgaaagacgtgacatagtttccaacccatcctagccttagacaagagtaccgacccaatcccgcctacggccggaacccccgggacaggcagacggaactgagcccctcgcagcagggcaccaaccctgtgctttttgacatctcgactaccgggccgcagctcgtgtagccttcatttgccctggagaatgtccatcgacccccgacttcatccatctccaatccgtgtacttttgtttatgactagactgagccacaaactaagccttacccactagacatgtggaagtacggtagtgctttgcaacagaggcccgaagaccggtccttatatggccgaggtgctaccatcaaaaccatgcaccccgagcccagcctaaaagcaatttaggggattttgaatagagggggcggtgtgaagccaattccacaataaaccaacaattccagagtatccaggtgatatgaatatttcccaaagtctatagttgtaaaacctcctaaggttacctaattaaattgcgaagcatctacctagaattaaactagtggtgtcatgagtagagagtccactagttgaggttttgtttgcctagggtgaacaaggtaataataataacaataacaataataatatggtcataacaaaggtaagtaggcatggctaaataaaacagtgataacgcgggaatttaaataaagcgataatgcaataatttaaatcaacataattttataaactgggattcaatatgatcaagatgatgtgtcttgccttgctcgttttcccaatcgacggcttcgacttccacgaagagcggatcttccgaagctgcagcgtctacacgaccaacggaaaagaaaaggcttaaacactaaataactccacataacagcagaaacaaagcacaaaaatgggttctttacatcttaaggaaaaattagagacttgaacggtccaattccgagttcaaatggccaagatatggccatttgaagtttatatgctctttaaatggatatttacgaatttcttcatttaaattttaattaaaaatcggattattgcgtcagccgagggggcgggcgtgcggaccgggtccacgggaggtggggcccacgcgtcagccgctcggtccacggtggaccgggcgcacgcggctggcggcggtcggcgccgtgggtcccgcgcgtcagccgcacccgcgggcgcgggcggctgacggccgggcccacttggcagccacgagggcgcgcccgagggcggcctcgccggcacggccgacgggagcggcgcgcccgcgccccgatggtcaccgccggcgaccatcggcgcggcggagcggcgcccgagagagcggagagaagggggaaagcgaacggcggtcttcggctcaccccgggacaacgacgccgacgagaacggcggccggagcggaggaaagcggcggcgcggttcgggatgacgatgacgacggtgctccggcggtcggcgggcgaagcggagcggcggacggggtcggcaaccactcggcgaagccgatggaggtggcgccgagtcgggaggaggaccggagcgacgacggcggcgaaacggaggtcggcggcgacggcggagagagaggagcacggcgcgagcacggatccgacggcgagagcgagcggcgagcggcggaaacggaagagcggagctcggggagcaattatatagcaccgagagggggagaacgcggccggagaggaaggaaacgggcgcggggatctcgggctccatagatgtcgccggcgatgaatgcgggaaggaaatcggacgaatccgagggagagagaggggggaaaacgggggaaacgggagagggaatcgcggggaatgattcccccctcattaaggcgcgcggggaaggcgggatgcggcggaatccgcggcggcggcggcgctagggcacgggcgcggcggcgggcgcggcgggaggaaggcgatgacaggtgggccccacccgtcagcgagagtggcgggcgggcccgcctgtcagcggcgcgcgcgcgcggggaggccgatgggccgcgggggaggagagagagagagggagggagaagtgggccgagccggcccaagagggaagggggggggaaaagaacttcttttagggttttctttttataaaacctttttaactttgtttattccttttcaattattatttgtgctctgaaaattccactaaaatttatttaagcattttaggcttttaggaaatatacaaaaatcctccaagcctcatttgacttttatctttgcccattttaattgttggaggctttcacatgaattttaattattctttgcacaatttcgaggatgaattttagagtcgatttgggacgcgacatgaatggagtataaagtatcatgagcttctttcagaattgcatcctttaaatctttgttgtcggggacacagattctctcacccaaccatacagttccgtgctcatcctccaagaaaccaatagcttttcctcttctcatattcttcttgatctcttgaatatcaggatcattaatttgggcttctctaacttgatcaattagagtgggcttcgcttctaaggctgcaactgacggagctcgtggctcctcaccgggagaccgcacaggccccccctttgccggttcggccgggggcttagggtgagatctcaagctctcgctgtatgtggaaagatcgcgtgccaggaagaaacgcgagacacggacgatgtatacaggttcgggccgctgggaagcgtaataccctactcctgtgttttggtggatttgtgtgtggaggagctacaaagtgtgagccgatctatcccttgctctaggctctaaatctggaaaaaatccatcctcctctccctatgggcaaggtcctccttttatactttaaggggataccacatgcactcttccctttccaaactggacttttcttctttacataaatggacggagatttgcacggttgccctccgaacgtccttctgatgggacggcccatacctacctccacttctgccgggggcaggcgcgtcgtgggaacgtggctatgcgctgacgacatgagcagtgtcagaccggtcacaaatcggtcattcttgtccaccgcgtgtcagcttagcaacgtgcatgtttgcccttcttcacacaacatcttgcctgtaatggttaggatgaagcctggtattcatctaaccagggctaacgtgtcatctctaagaggtaacacgctagctccggctggagacgcgtgcctagaggctctcgtcttgacgggacggggcgaggcgtgcgccaggccgccagtcgccacctaaccgttgatctgaccggtctgtgactggtcacagaccggataaaagagtgcgctgcattgcgctgcatgctgcatgacacgcttgaccagatcgcaataaatgcggttaggtgagccctaccgtgttcacccaacctatgtacataatgcaaaccccacaaggggtcggggcacctcggccctcggagctggggcaggagcaacccgacccccccccctcggggaaatcaggaggagggcggacacctcaccctcgggcccgacgtccccgaaggtgccaggccacgtgggcgattccatctgcctcaagcctccgggcgcaatactcccggtcccatatcaccgacagcaacgaaacctctaccgacaattcccaaatttaatctttcaaattccttgcataattccaatggcaactgtcgtccttctgtagcattgcaatagccttttctgctaagagcgtctgctacaacattagccttccccggatgataatgaattcccatgtcataatccttaattaattccaaccatctccgttgtctcatgttcagatccggctgagtaaagatatactttaaactcttgtgatcggtgtacacttctgtacgagtaccgaaaagataatgacgccaaatcttcaatgcatgaacgactgcagctaactcaatatcatgagtagggtagttcttctcatgcggacgtaactgtcgagaggcataggcaaccaccttcccatcttgcatcagaacacaacctaacccaagtttggatgcatcacaatacacttggaaacccttctttggatcaggcaaaatcaaaataggagctgatattaagcgacttttcaattcttgaaaactctgttcacattcttccgaccacttgtacttcacatctttctgaagcagtcgtgtcatgggcttagcaatcttggaaaaattctatataaacctccgataatatcctgcaaggcctaggaaactgcgaatctctgaaactgtctttggttgcttccaattggttacggattccacgttactaggatcgacggcaactcctccggctgagatgacgtgaccaagaaatttcacttcggacaaccaaaattcacacttgctaaacttagcatacagttgatgttctcgtagcttctccaatgcaaggcgaagatgttcctcatgctcttctttggttcgagagtagataagaatatcatcaataaagaccaccacgaacttgtctaagtattccataaacaccttattcatcaagttcatgaagaaagcaggggcattggtaagtccaaaagacataacagtacattcgaacaacccatacctagtggtaaaagctgtcttaggtatatcttcctctttgattctcaactgatgataccctgatcgaagatctatcttggagaaaacagtggcacctttaagctgatcaaacaaatcatcaatcctgggtagtggatacttattcttgatagtcacatcgtttagtgcacgatagtccacacacattctctgagtatgatctttcttttccacaaaaataaccggagctccccatggtgatgaactcggtctgatgtatcctttctgtagcaaatcatctacttgcctcttaacttctgccaactcattggctgccattcgataaggtctcttatggatcggagttgttccaggtaccaaatctattctgaactctatatcccttttaggcggcataccaggtaaatcatctgggaacacatcaggatactcccggactataggaatctcttccaaagttatctggttcagtcttgaccttaaagactcagatgacaatgcatgaacagttacaactcgaccatcatagctgttgagagttacttttctgttggcacagtctatcacacctttatgtctggctaaccagtccatccctaggatgacatcaaggtctttggattttaacaagataagattggccagaaatggtactccttgaatttctattctgacagaggggctacgttgcaaagagagtgcttgattatttccttggtttgctgattctgaaattgctgcatcatcatgttcataagctgtgtctgttgagcaagaacttgggccagagtgggattctctccattgttgttgttattggggttgttgggaccattcccattgctacgagtgttcaccatctggcatggacagggcacaagaagagaaaccggggaaactacttaggacagagaattactttaacttttattgatcttaactgagtttcattattacaaactaaagactctcacaccactaaactcaccaacttcctaacactcaaaagcaaacaaacacatgcaattacatcccaccactgatgtaaatcacatgcgagccacacacaagcaaacttaaagcaaaccaactaacacaacgatctaagacaacgacttaacaagtcactctagttcttccaagcatcggaggtcgattgaaggctcgtttttatcatcttgagttgctacccactcaatcttggaattgttgtgcttagattcttcttcttcatcactacttatgatgatgaccgaaggatccgcttgagctggggcaacttccttctccaccacacgaacctttggcgccaattgatagcgagggacaaatagagctctcttccttgcggtaagacgaatcctggccttctgcggcggtgcttctcccttcaatgcggctaattccttctccaaacgatccaccttgtcttctaacttgcaaatcttaccacgattccggtcttcacgatcttgagctgctaatacagtctccgcacgactttcatccatagcccacaacatctcaaccaaatgtttcgtggtaacatcattctcaattccttcagtctcaaggtaactgccacggtcacttccctggggttggcgaggatggtagcgatactcaatgtcggccaactgatcactgtagcgatcacggagctctcctatggcgatccttgccacctcctgacatgcatggatgtagtttcttcctccagcttcaaacatcactgaggggacctcttcactattactgttcaaagtgactttgactcggcacttctcttcatgacgatcatgaggaatctgggcataaaaaggggcagtcccaaatccaatgacaaaggacatcgtgcgcaactcctggacaaaaccctcaacaccaaacaggtactcaggcttgtaacgcggcatctaaagacaagtgaaaggagggagttaagacctttatccaattaatagcacaagtttttggattaatttgaataaagttagaaaatcagagtaaaaaggtaagtaaataaagtaaaccaagctttgcgagataagttaaaatagttggaaacgaggtcacaaattttgtaattttgaataactggtttcaaaagaaatgaaagaaaatgataaaatcaacatgataaatttattttattgcagcaagattaaataaaacagtattataaaacttttgctggtaaaatgagccattagtacagtaatagatgtacagtactaataacactggaataaattttgaatgagaaccattaaaagagattatgaagtgcatgtgccattagtttggtttaattaaaagagaaagggaggagaacagttctacttttccaatatttttcagagggcttctatgggtaaccatttggcataacctagggtcaaagaggctctgataccaacttgtcacgcccggaatttctatccaaaattccaaacgcttacatgtgtgtgaaccctcgtccaggaatcagccgaggcacacaataacaaattgataatagagtacaaatattactctaattaataagcgaataaaatgtcattacagaggtagatagttcctctcaatcaataaagttctaagcagcggaaaataaataaacggcgcagacggctccactccacaggcagcttgaccaaggctacacctaatcctccacaccatcagcctcattgtagaactcttcctctgatgaatgattgcaaggtgagtatatgacatactcagcaagccacgcagcaaatatgcaagtgcacaggataacaaaggatggcataatagggtttcatttgcaaaagcagcatttagcaaacatttgagaatttaacaaaacagttaagtaataattaaacaatattaatccaacgctatacaacataccctgttgtataggcccaaccattctgaacaaccaccccggctgcacagttctatctccaaaccaggaatgtcccattccaaaccaggagctaatcaaattattaccagtttaagcatcttttacaatgatgagaggtgtgagactaatcacgaaagacattgttagacccgcccataaccgcgggcacggctattcgaatagttttactctggccagaggtgtaccactgtacccacaagacacaaccccacatcatgtcaccatgtgcctcaataccaccacggtatctcggaaaggagttgtgacaatacccctcgcataacacaatccactgcagcgcaccttcctggatcataatcacccccttataaacaaggcatggactccccagcgacccccgtgggcttatctccgccacttctcagtctggtgccccgcaatgaaccatgctatacaaaagataaagccgttgcccatgctggcttgtggttggcacgataaatgtttcacaactgaaactcgtgaaccggtccttaattgtcatgagcacgaccatcaaaaccatgtgcccacaacccaccattatcaggttttagttggcacattaattaattaactaatcacgattgaccatcgtgaactatcaataagccatcatgaaataatagtgagtcattagttatcccataaatgtactaatgtttctaagcagggctaagcaattatatctaatatctagttgaaccaatataaataaagctcaactagtcaaattaatataacccaaggtatcaaggaataaggtaatcaagtacgaaagggccataacaaagaataggtcaattccacccaatgacattcgaaaatagatgcaatagttgaatagaaacaatagctttaaataggatcaacatgctcaaagggttgtttgggatctgtgtgacttgccttgctggccttggaactcttcaaactcttcttccgcgaaaacggactctccagaaacgacggaatctaagcaaaaagaagcaaaatcaccaaaacagcacataaacaagcatgaacagtacatgtggatatttttaatgtgtaaatctcaattttagaaaaatttagagacttgaaccaactaaatcggagctaagatgaattagttatgaatttttaaagattaaatcggattaaaacacttaaatcggtttaaattgaattatgacgcaataatgaattatttttgaaaaggaaaagaaggattattgcgtcagcggctagggtttcggtggaccggcgcacgggcggcggttcacgcgaacggacggccgagatctaaccgatccaagatggacggccgagattgatcgagtccacggcggttcacggcggacgaccccgatggcgtcagcgatgacgtcaccgacggcggcggcggctcggcggagcggacggctcgggcggcgcacgctcaccggcgaacggcggcgctacggcacgaacggaggacaccaacgggaagcggacgacacggcgaacacaccgacgaccaaaacgacggcggagaagcaacggacggcgacggcgacgagaaggaagcggcggctaccttcgggttgtcgacggcgacgaagctccggcgggttccaacggctgcgaaggggcggacgaggacggcggcgacttggcgatgacgacggcggtcttcccgagcggcggcgacagctggagcgacggcggagcatggctgaagcggcggcggcgacggcgaagctagggcacatggcgctaaggctcttccggcgacgagaggcgaaggcgagggctgcgacgggtagaggagacaccgggggtccttttaaaggggctcggaggcggcggcgaaggcccacggcgacggcaacggcgaaggaaaccttcggcttggagagagggaaaaccgatccgaatcgaactcgattccaaagctttccaaagcgatttaaccaaagattccaaaggagaaaatgtagaggagatcccggagatcatttcccctctattgattcggccggagaaggaaagaggcggccggatttggaaaggaaacggcggcggcgcgaactagggtttcggcggcgacggccgaaggtagacgacgactccgacaggcgggacccacctgtcagcgacagcgaggccgcgcgcgcgcggctgactgggccggctgggccgaggagagagagaagagaggttttgggccgactttcggcccaaagccaaaagaagactttttaaaaccttttcaatttaaattatttcttaaatgcaattccatttattacaaatactttcttagctcaaataaatcccagaaaaatctaggaattatagaattaagcaaagtatttaatgaaattttatctggcccaattttatattggaatttattaattaaacttagattttcttttcaagacttttaaaattatttctaaaaattccaattaaacaacaatttatatattttgaattttcagggtgtgacatctagcgatcccctaccccctccccctccgccccaagcttctcccttggatccggcggtggcgacgtcggcggcacccgcggacggatctaactgagaggatctgcccgacatcgccgccgtcccctcgcggccggatctgccggtgttgttggttgtgtatgggttgtttctatttttttttatgtgatgatgatgtcgttgccgtgattgattttggggtttttatgagaggagacctctcattgattacgatttggatttggattgaaattgagattttgtttttgggtaggattgtgatgatgtgggatttgaagaggaggtgcgcgacggaagaaaaatcgcggtatggacgaaaaatcgttgtgacgtcgtcatcttattttggatttttttttatgattccgatttagatttggattggaattttgaaaagtttttatttggattgggatggtttgagattttagagagaaggtgtgctcaatgtgggtctatttgtgtgatacggaatttcgactgggatttgggggggggggctgacgggacgaaaaatcaccgcatgcacgaggtgacgaaaggaaaaatacgaatatttatattagttaagatacagtagataggtagtgtggagattatgggtaccccatacccacacggcatggttatccgactagtaataggggataacatatatctatggaatatgtaaccgatcatgacttgggtattacgtttccttttatattatggagcggcctaaagtcctgattcgataatattgtaaaatagatttaggaaaccgataccgtattggttaaggtttctatcttgtaatcctgccccccatcctatataaggtgggcaggaggccctctagggggcatgagacaacctgatcgtcagatcaatacacactcggcggattcaaatccccaaacaggagtagggtattacctctcattgagagggcctgaacctgtctaaatcctttgtctctgcatccatccactttaggtctcgtccgctacccccttttattattgccgaattcatgtttcgacagttggcgcgccaggtaggggttgcgtcgagtttcctatcaacgagcgcgatggaatcaatttcatgagtcgccgacttcgctttcgctttgggagttttcacttcctttccgtcgaccacttcttcaagctcctcttctctgacttgatccaaatcagtcagggggaaactcaatctgatttttatcattatttatcatattgatttttaatctcagattaatttcttgctattttttgttgttgttcgcatataactacgcggcactattgaggcgattgatgctggtcatggactcgaggcgtctcagctttccggtcgatcggccgcgagtccactccgccggcttgtcctcgccaccgccattgctgatagcaacaacgacttcaccgccggcctgcctccgtcgccgccgactggtgtcatcgcctatacggttggtcggtcacaccaccgttcatgggcgtccatgtcttcaccgaccggctggccttcgccgccgccgactggtgtttccgcctgcacggctggcctattatgccgccgctgttgggcgtctacgacttcaccaccggcctgcctccgtcgccgccgagtggtgcccccgcctatacggtcggttggtcacaccaccgttgatgggcatcgtcatctacaccgccggcctgcctccgtcgccgccgactggtgtccccgcctatacggtcggttggtcacaccaccgttgatgggcatcgtcatctacaccgccggcctgcctccgtcgccgccgagtggtgcctccgcctacacggctggcctattatgccgccgctgttgggcgtctacgacttcaccgccggcctgcctccgtcgccgccgagtggtgcctccgcctacacggctggcctattatgccgccgctgttgggcgtctacgacttcaccgccggcctgcctccgtcgccgccgagtggtgcctccgcctacacggctggcctattatgccgccgttgttggatgtctacatcctcaccgccggcttgcctccgtcgccgccgagtggtgcctccgcctacacggctggcctattatgccgccgctgttgggcgtctacgacttcaccgccggcctgcctccgtcgccgccgagtggagcctccgcctacacggctggtctattatgccgccgctgttgggcgtctacgacttcaccgccggcctgcctccgtcgccgccgactggtgtcttcattgttattgatggacgactttgttcccacattggccacttctgccatcaccaaggggaatattacaaagctaagtcatcatttattttattctttatatgatatttttccttttcctctgcctcactacaccaattggtcttccattgagtagtgagtcgggggctacagatgttatatcatattttttataatatttatcttgattgcttgcgacataatctgagtacaaaagtacctatcgagttatggagttctatcttcctatgctttccgtttggtttgccaatggatggttgcctttgggccgattcctagcacccgggggctcgttggatggaccgagtaacgcaaggtgctaagtattactcggaagaaatcaaaagcatagagataatataatttattttctgctcttaataattgcaaaagtacctgagtagtaaattctgatccgtgaaactttgttccattaatgacgaactcatgtcactcatatgcatgtttgggaagtgcttaggccgactcccagtgcttggtggctatgactagttgggcagagcgtttaaacgtaatgagtcatctgctcggggaaatcaaaattgacaagaggagaaatacatgtttataaatattttaaaatacttgattttttctcgagtattatatttatatcagatactactcatcctatatgtttgttctgcaggatccagatccagatatgcataaaagggattcatggctttaggcttatctcttacgctccaggaatggatcagtcagaacatcaccgactggcttgccttcgccgctgccgactggtgtttccgcctgcacggctggcctttatgccgccattgttgggcgtctacgtcttcaccgaccggcttgccttcgacgccgccgactggtgtttccgcctgcacggctggcctttatgccgccgttgttgggcgtctacgtcttcaccgaccggccgcctcgtccgccgccgactggtgcttccgcctgcacggctagcctattatgccgccgttgttgggcgtctacgtcttcaccgaccggcttgccttcgccgccgccgactggtgcttccgcctgcacggctggcctttatgccgccgttgttgggcgtctacgtcttcaccgaccggcttgccttcgccgctgccgactggtgcttccgcctgcacggctggcctttatgccgccgttgttgggcgtctacgtcttcaccgaccggcttgccttcgccgctgccgactggtgcttccgcctgcacggctggcctttatgccgccgttgttgggcgtctacgtcttcaccgaccggccgccgcatccgccgctgactggtgtcaccgcctgcacggctggcctgttataacgccaactgatgctatcttcttcacggctggctacatcgctgtcactactaataggcatcagtatcttcaacacaagctgcctacgtttgccatggctgccgactggtgtttccgcctgcacgctggcctattatgccaccgttgatgggcgtctacgtcttcaccgaccggcttgccttcgccgccgccgactggtgtctccgtctgcacggctggcctattatgccgtcgttgttgggcgtctacgactccaccaccggcctgcctccatcgtcgccgactggtgtttccgcctgcacgctggcctattatgccatcgttgatgggcgtctacgtcttcaccgaccggcttgccttcgccgccgccgactggtgtctccgtctgcacggctggcctattatgctgtcgttgttgggcgtctacgactccaccaccggcctgcctccatcgccgccgactggtgtttccgtctgcacggctggcctattatgccgccgttgttgggcgtctacgtcttcatcggccggccgcctcgtccgtcaccgactgatgtttccgcctgcacggctggcctattatgccgccgttgttgggcatctacatcttaatcgccggtcgtctcgtctgttgctgactagtgcccttacctctacgtctggtttatacagctaccactactgatggacatcatcatcttccgtcgccgactgattatgccgccgccgactggtgcttttatcttcacaactgcgcgtcttcactaccagtttgcttctgttgccgacgactcgtgttcacttcatcacggcaatgcaactttgtcatcatggtagagcgacttcatctttattatcttcggcactggcaaactctattgctgctacttcgcaagttttgctacttcaccaaccacgacgtctttgtgagcctcgacatctcggcatgcgatgccatgttattttactacaacaagaggctctccaatattcaggatttctacttggacatcttcaacacatatcttcaatcaagcaatgactacttgacgacaagaagctataattctcgactctatgttcagttgtttcccaactaaccaaagagtcgggggctacacaaatacaaggctcaaaatttgacaaattttatgtcaagctgaagaaatcaattcatcaaccaacgagtcaacttcaggagtcattatcttcatctttgattcagagcagacattctacttcaacaacttcaaatatttcggtttagacgagttgggcaacaacatcaactctcctccaattatttgtcttcacggttggcctactacgcaaccgccgatagaggatctcatcgttatcatcggctgctacatcgctattgactggatcaccgacatcgccatcttcatcaacatcttgtcaagcctcatcaacatagcctactctgctgccgttgatgggaaacttcatcatcatagtcggctatctctattgccgctaatcatcattaccgtcggatgcgtttgtcgccgccgattattttcttcatcttcatgattggtggatttcgccatcaccgttgatgcgtgtctacgtcttcatcgtcggtttgcttttgtcactaccgactgttctttcgttgttgttgggcgcctacatcttcactgctagctgacctgactgttgccgactggtttcttcgcctccatggttatgcaacttcattacatttgattggtggcatctttactaccactgacatcttccgttacttctgatgagcaatttcgtcttcatgttggtcatttcatctccatgccgactgcgtcagctattgccaatagacaattttgactatgacagaaggacaagctatatgctcaggagctcatcaactcaagcgtgaggattatatctctaatttggacttgttccggatacatgcaacatgaatttatgatcatgggtctattttctatgctcaaagactggactatttattattccccgtaagggttatcaaccgaatacttgcgccagtcgggattcaatttttatatctattttggagtatcccataagggataatcactcagatcacatggtctatatcacccgggagcatgttacatgcgtcatcctttaaagggtatcgaaggcatattttttggcctaggcctaatatgtctgcagcccatattttcaggtgtggcctgtcacgttcttttagggacttaggcactttttgcttaggccaaagtgcgcgtgatcaagtgcccaataccttaaaatccttttataccgcagttactcaactttttaggagttggtacaatgcatcttaaaaggtgtcaaacagtaaagctttatatagctgccccgctgactttttaatatagtcatggtgctgtttgggtttttaagcaattgattggatacaatatcgttgctttttgccacgtaagtgtgcatttttattgaccaatattatggcttaggctgattatatattgtggtcatttttctaggcggttggtaaatcctttatgagtttatttactcggattttacaccacatatgccatatatttccaggtgtggtgaaaccatgtgtcttttagggactaaagcacgtctgttaaagcagtgtgcgcatggcgtatgcccaatactttggaaatt

SEQ ID NO: 6379 - DNA, 27885 bp, Oryza sativa
ctctaccggtgatcacgcattcaggatcaacatagcctggtgtcccagagacggcggtcatcgtctgcatccccacggcatggtcgatgaaccttgcaagcccgaagtcgcctagcttggcattgaattactcatccagcatgacattgctcggcttgatgtcacggtgcacgacacactgttcccactcctcatggagatagaatagtgctgatccaagcccaagaacaatcttaaccctgtgacaagttaagaccaagttagctgagtttaacacgccaattaatttaacatcacaaaggaagtttagatgaagttaaagagaacaggtactaacctcatcggccatgttaggaaggtgccattgccatggaggtgaatgtcgaggctgcggttggggacgagttcatagatgagtaggagctcgtcgcggccatggcaccagccaatgagctgcaccagattgcggtggcgcaaccggcttatcaccttgatctccgacctatactctttcttcccttgcttggaggaatccttagcaaacctcttaatggcgacggcgaggccctgctctctcaggtatcccctgtacacggcaccgaagccgccttgcccaagcttctcctccgccgcaaagctgttcgtcgcctcgatgaggtcttggtatgggatttgccttggccccatgcccatctcgatctccacgatgggctcaccgtcatcgtcatcatcgtcatctctggccaaccctacgtgtctcgcctcctctgcctcttctacctcccttctcttcttgctccgacgtcgccgcacaaggacaactaccatggcaaagaggagcacgacgaacagtgctgcaccaacggtggctccagctataactccggcaagtccggaacctgaggtggtcggggaatgttgcaccgccggtggtggattctgctggaacgaggagttgaagtaccaagaatgcagctgatggagctcaagggataagcccgtcgccgccaagatgccgacggagaccttctccggcaaggcgctcttgagatcgacggtggtgctaaggttgtaaagtgtagtcgagccattcgtccatgtcttcaccagctgggccgacaggatgctcgagctgctgttgtagtcgacaatggcggtcatgttcccggtgaggctgaagctgggcagcgactcggtctgcaccgatctgatggagttgacgtcgatgccgatgtggtcgtaggttgcgttggggtcgaagtcgcggtttagataagtgtcgaattcgacggcgacgaaccggttctcgccgggctggacggtgtcaaagtaccggctggtgaggccgagggcgccaccgtcgcccttgtccggcatccttgacgggtagccgacgaggaagaaggccatcccgtcgcccttgttgtccaaattcgtcggagtgatgttgaaggagaagcgcgtggtgaagctggcaacctcgccggtggcggcgtcccagagctgcaccggcggcgtgtacgccacgcgtcccatggtgccgctgctcggcaggttgcttccggtggtgatctcgatgcaccccccgccggcgaacgccgcgctgccctggagggtgatgttcttcgcgttgctgaaggtggagtagttgaaagataccgtggtagcgacgacgctaggcaagcagcgcagcatgacgagcaagcaggctagagcagaagcggcagccatgaacggttttgtcatgaggacgccggcggccatggccggtctttgagcagaatcagcggccggacaatactgccaatacgaaaactactactcgaagaatcagcaggtcgccactcggagagaccagtcaagatcttaaggacatagcgagttagcgtagtgagaagaactctactaatttaacaagttggtgccttggtggttggcaaatcaattaggctccatgagaccatgactctgacaactctggttcctcggaaagtgctgtatcatattttgtatattttcctaataattttaaatgaagttaagagtaagtttcgtttcttgttggtatcttcaattttcttctgatacattttcaagaatgataaaacatcaagctggtttataaaaaaaaaggtgaagctttggacattggcataggccctgcagattgagtgcaaatttttcgtcttttttcaccaaattttataaaaaaaattataaaatttagctgctcctcttacttgatcaaatatccaaagatagatgatctgaaatcttgatggtatgttaactagggctacgttcgggaggttgaattccacggaaaatggggttgtccattagcacgtgattaattaagtattagtcttaaaaacttgaaaaataaattaatatgatttttttaatgtaacttttctatagaaaacttttataaaacacacaccgtttagcagtttggaaaacatgtgcataaaaaacgagagagtagaagttagagaaagttggtagcgtgggtaccagacttgctgtggtagtgtggtggcatcagttttttattattattattttcatgcaggtagtgtgggtaccagactactcccctcagtactaaaatttaagtattcttaaatacttttaaattggaaggttttgattggttaaaaatagaaaataggtgtataaattttagaagtttatgatttgttaaaaatagaaagtaggtatagaaattcaatgagagattgttattattcactgtaatgagaagataaagaagaaataactatattttttaagataaatttaaactctaaaagtaattatactactcatccggacaaataatactggtcgttttgaacacaaatgagaatataagatcaaactttaaaatctttatctataataatttctaaaatatttatcttagaaatatggagattatatgtatagagtagtcttaaaaagtattttaataatatcatttatttgttattgttttcatatatattataataaaaaataatgtttaaagttgttttctagatgttgtagtattgtctcgaattggagggacgagccaatatgttgatttgatatatgcgagtggcactggcacacattcgagttggaaatgcataaatgcatgtgcgtgaacagaagaagataccgccgtgcttctttggttctttgacgtaacttgtttttggcttacgcttacccccacttgccttactttctggatgtcagttttatcgaaagagatgcgggcaacttaactaaacccactggttagtactatacactgttgggtataccctctttgctcccggtttacaacctctttagtcccgggttacaaactgggactctgaaagcaggactaaagatatctatcttttgtctcggttgaaataactgggactaaagattcaccaaccaggactaaaggtcttctctttttctttttttcattgttttttattttgctaattgccgacattcccaaatccccacatcaaattgacgtcacagatcgaatgaacatactaaacaacaaaatcatccacaaattcacaaatcatctaaaaaaccacaaaatcacaaatcgtccgccgtcaatggcggcaacatctcctctggcgccgcccgctgttgacggtcgttatcgatcaatttcgcccgtcaatattaccggaataaaaggagaactagtcatgcttacaatgcatatagtgttagaataaaataaaatccactattacttggtttactaacctcttgtagagaataagcaataaatggagaagaataggcatcaaaacactcgatcgatcaatcagacgatgccgagaatcagacttaaaggaagatgggctgaaaatatcaatttcagaagacccaaaatgcccaaaattcataagtctgcggagagatgaagtcagggaggccgcaggataaaaggtgggctggttgggccggcctgaggtaaccctcctcatcgccgttggatgcagcgctttgggggaacaacttagattagcccccaatgatggttggagggtatttccgaccattccaaccatcacaatcgtcattgggaggctatataaacccctcaccctctcactttctccacacacttcaagcaacaaagctctcatattctctcaagttagtttagtgctctcaagctagtggagtcggaataaaattgtagtcaaagtccggaagtcttcggaagagttcgggtatggctctagtagctttactttcttcttttgtaagactagtatttaatttagaatatacttttgtatacgactctggtattgtaatactctccaattatatgaatacaagctttacaatgtctgagatattatgattatactgctagcttatctgggagatgcattggtacgggtataatgtttgcatatgaaattactctatgtcatgacgatgatactagagtagtatctggtagtttaggcatggtatctagattactcggtatcattatttggggttatatgctgcggatgagaggtgggccgctgatggcgacagctcagtatgggtattcctccgcgcgtgtatatagtcctaagttaattccctggggagggtactcctccgtatttagccctggttgaatggttatgacgggctgtcgtaaggaactcagctgtcaggggtggcttctcaaagtaccaggagggcatcggaaagggggtattagctagttaatcatatacctaggatgtatgtataatatgtatactagaagtatagaaatagattcttttctatactctttccacttagcttaggagatttaatataagaatgagtagcttatgcttgtgtgtcattctaccctgcaattatatttacccctgcttagacatgattaatacaagtaacatataaatattagtttggttctctctattataatcttcccatgggataaacaaatatgatacccttggaatactctcgggtgaaatgctacaatggtatatccatgcgcttgtggataaactctgtaaccataatataccatgactatttttggcgccattgctgggaattatatttctagtaatgtcgttaagaaataccaacaagcatttctagcgccgttcccggggaagatttgtaaaaagagattactaaaactaatatcttatatttacctctatataatcactgtgctttgcaggctaaccatgttgttttcaccttttgttgtgaaaacagggtagtgcatgacaggtttcgacttgccggaaaattttcaagaaaatccagaagtcttcttccgaagcgtaaagccgcgggttgttcccccgcagaagactcttccgacaaagaagccagccgtaccagcgccaccaactttcaagactatggctgacaagaccctccgcgagttcgctgctccctcctctgagaacgtggccactgggccgcaactcaacatgggagacgtggactttgacctgaaatccagcctcattacgatggcgcaggctagcccattctgcggcaagcctaacgaggatgctaatgcacatatgcaatggttcctggagatctgcagcacgtacaccgtaaagggcgtcagtcctgacgtcgtcaggctgcggctgtttccgttttccctcctcgggaaagcgaagcagtggttttatgccaatcgtgccgtgatcaatacctgggacaaatgctcgatagtattcttgtcgaagttctttccgatgggcaagacaaatgcccttcgtgggagaatttcgagcttccagcagacacgtgatgagtccattccagaggcatgggaacgtctgcaggagtacgtggccgcctgtcctcatcatgagatggacgactggctgatcctgtagaacttttataatggactcactcccacgtcccgtgaccacctagacgcggcagctggaggagcctttttctctaagacggtcagaggggccgtcgatctgatagagaaaatggtctctaatatggggtggagcgaggtacgactctagtcccatcagcaaggaatgcacaccgtcaaggagacggaaatgttcactgcaaaactcgacctcctcatgaagagattggacgaacacgagaagaagccccaaggcaccgtcaaggccttggactcacacgttacgtgtgaagtctgtggcaacacgggtcactctgggaacgactgcccgaaaacccatgaggaggtgatgtacatgggtaacaacaacaataacaacaatgggtatcacccacaaggaggtcaggggtgaaaccatccccgtccgtatttccaaggaggcaataaccaaggtagcttttctaatctgtcttccttaaaggatcttgtctttgcgcaagccaaaactaccgacgcactcaacaaaaagatggctgccaatgacaagatcttagaaaatataaatgtgaaactagatggctttgcttccgcatttcaaaaccagttgagtttcaataagatgattgaaacccagttggcgcaacttgccgctctagtacttgcaaatgaaactggaaggatcccggggcaacccaaaccctccattgaaaatgttaaggtgatcacgacgaggggaggtaagtccactcgcgatccgccatatcctaacactgcaggtacaagcaacacgcgggaagcaccatccaacacaacggctgaagaagaaattcagccagagaagaccgtgccgcaagactactgcaacgcgaggttgctgccattcccatagaggatcaggaaaccgtcagttgacgaatagttcgctcgattcgttgaggtgatctagaaaatccacatcaacatgccgttgttggatgctatgcaagtgccaacgtacgcacgttatctcaaggacatcctcaacaacaagcgaccactaccaacaaccgaggtggtcaagctgacggaggaatgcagcaacgtgatcctccacaaactcccggagaagaagaaggatccgaaggatccgaggtgtcccacaattacttgctcaattgggacatagaaattcgacctggcgctctgcgatcttggggcaagtgtaagtgtcatgcccaaggatgtctttgacaagctcaacttcacggtgttgacaccaacaccgatgcgccttcaattggctgactcatcggttcactacctagctgggatagcggaagacgtaccggtcaagatacgagattgctttatcccggtcgacttcgtggtgctagacatagacactggcaaggagacaccgctcatcctggggcgtccgttcctgagcactgcggaagcaaacattgatgtcggaacgggaagtatccgtttccgcatcaacgggaaggaggagaagttcgagttccagccaaggacggaacaatgctccatgttccgaataaagtacgggccagccccgtagaacattcagacggtcgaagtggagccacccaaaatggatagcctcatcgtgtttatgaagaaatctctagaaattcaaccatccaggatgaggtcccgttattggaaaacgccggtaaaacccaagacaccggccaagaaggaagaaaagctggctcagaagaagccgccgcccataccaagaacaaagaaggtatggcgtgcgaagcagaaaacgcccactccatcacctccggagacgggtgaaaaatccgtgaaatgaacgtcggaggtacggtcttgcacgtcggacttgaagcgacgccgccctcgccaataggtaaattggtatgtatcctcatatttgttttcatcaatttgatttctgcaacaaagcatgtttgaatttttttaaagaaattgcatttaggtttgaattttgtggcaattattcaaattgaatttttcagagcaaaatggaatcaaattttaaatcaaaattttcagtgtcacgaccacactgatcgatcttgtagattgttgaactctggagcaccatcatcctcccgtttgagtccttcagctttgacttccttaagtttatcatcattagcagagcttgactcaggcttctcatcaaccggtggcaaatccaccttgtgtctttgaattactgtacccgaacgagtcagaacaaatgaatgtaagtaccgattttgcagttgatttatcatcccttcaaacccttgcttctgttctgatgttagcatgtccatggttattggaatcacattgtctggatccacctcggtagacttgatgtccaccatgatggaagcttgtcacactcgtgtcccaccgggcgtgccaaaagcatgttgatgcgaaaaacacacactggcctgagagatctgcttaactctagtgcaggtccaaatcttggtttcgagttcaaaggcatgctagttggtttgatcctgcaaccaacaagaaacaaagaaagaaacacagttaaattcataaacgatagccgatcggccatgtgccgatgacgtatcgtttgtaatctagccgatgtaacgtgaattagatcggtaatgatatgtaaagaaaaaaggacggttagatctagtcgatcggctgtagatattaacaacatataatcagtatatcaaaatatgttgaaaccatgtgactgggatagatcggacaacttgtcgagacagtataaatcacttatgtctaaaagtacttcaatataaagattatatatgtttatagcatagccgatgttgcagatctgacatgtatcggctaatactccgataccactttatactgagatatcaatatagacaaaatatattaaacagagatcaatcaagtattaagatgacttaacagattaataacgtgcttaatatatttaattagagtgagatcttaatataaagggcagacttagcatattaagtaaacataaagtagacaaaataaccaaatcaggtaagatcggttgaaactccgatgaaaccctaatcggcaatcaataaacaggctagagattactattctaatcacaacttataagctcaaacttaactaatgcagcaatgagtatgaaaagaagaacaatatctagataatcaagtcattgattgattcctaggatggtggatatactatataatctaagtcaacgttggtatttaaccctatcggttgccttccaacaagagatgtttgccaattctaggttagatagcaatattgatctagattatataggaaatatgataaattgacaacttacataaacaagattaaagtatcattgagatgaaagcactaatcccgagaacacaagccgccataacaagttttaccttatcatcggagatcgaaccgatgcagcccaactcgaaagcaagaactcgtcgaaagtaaacgaaagtgaaaggttggcgaagcagcccaacacgggttgggctacttttatacccaacccaaagtacataatatgcccttgtcagacacgactcctaactctattacaacttaggatacgaacaagtccctaaggcagactcttaccaactcaaactgtaagtaaattacataaaatatctaattaatagatacaattgcttttttcagactcaatacgcacgtggcaatcctcatgaagcatatcaacccgatccgacaatgattgcaatgccatcttgtcggaatcgacttcatcggctaccttgtccgactcgaactctgccgatgcataccttagccgattcgatctccagccgatgcgcactctgtttccgaaaccatcaacctccttcgattccgcttcggttttaatctctatctccgatccatgatttaccaaatttggtccttaacaccgacaccgacctcgacattgttggtgatcgggagctacaagcctaccacatgctgaaggaccgggagttcggccacaccagggcgtatgatccagaacttctaagaaaaacaggtatggatgttgattttcacgctgttagcagagatttgtagtagtagatgagccaggttctcgtttgcttactatacaatttctgtgcactttgaaagaaacagaagatagcatatccttttgttttttccataaggagtatacactttcatggaaaggattaagcacacttcttggttttcacgataactgtaaaatcgatcttcggaaaggaatttccgggttcgagaaaaacagattttgggaagacatttctggtgctccaacttgcagaaaacctaggacaaatgacatccataatcctacacttaggcttatgcacaaatggattgctatgactttgtttccttgaggtgatcttagacccattcggggagatgagttgattatcatgtttgccaaggttaggaagactaaagttgctcctgttaaatatatgattaggcaatggttagaaagtattaagtataatgcccctgttgagtgcacttccttgatcacccgcatagcgaacggacatggagttatcaccactgatcaaatcgagtatatcttcactgtccatccctatgtggatgaaacatatttaatgcaagggcatatacttaagcatggagccgatggctctttgatatactttttcccctgtacaaatgaaatcccgttacccaatgcggggtatcatttgtacaactgtcaggaactaaccattcccctgcagaccatagaagaatctcgtgcaggtacatcctacagggaaacacgcaacaaaccaaggcaaaaacacgaggagtcatcatcatcaacacccatgcagatgtacgaggcggactgggaaccaacgggggatgcacccggttggacccaagcaccacgacacaacacaggaggttcgtcctagcacagtgccagtgagaaccgctggcaagcaccgcgtgaagtacactgggggaacgcgcacacctgttcctctggatcaagcgggatgcctcccgcctccaactgttggcgctcaagttcctcccaggacttgggtgaaatcacgaggaggctagacacccttgatatgcagacaggagagatccagtactacctcgatggacacatcgttcagacgcaagaatggtaggaaaatgctaatgctcagttcgttaacatcaacaatctgatgcaacaacagcaggctgatcttcaagcgtaccttcgcttccaagggttcaatccctaccagggaccctgagcgaaagataagcttggggggagacatctccccccactgaggtaacttgtatcacattgcatattttccttttccattgcatatttacatttccacattgcatcctataaaccaaaaaaaatgacataaaaatttgcaaaatagaaaataccaaaaatataggttagattttattatgctaggtaagacaagtagttctcttgattgaaatgatgaatagttgcactgttttatatctcttatatatggattcacggttaagtaatatctcaaagattaaataaaagtggccacatattatccgggaacctgaggtaagtgggctgcacttgctgaactaagtctaggttgttgtgagatatgagatagtgataagagctgctatgatcctgttctaagtttgacttaaattttggatgttttattttctaaaatgataaacttagaagttcatcatttgatataaattcctaccagagccaaaaatattcatattgacaaaccatatatatttttggcacttgtacttccattgaactttgtcaaatttttgagacttgtgtagatacttttcatgctctatgatcaagatcatacacccacatatatgcacatgcgaacttttgcactagaagttagcatccatccattccatttatatctatcatgttaccacccaaataaagctctctaattatatgctttctcctcccaaaataatatcctttccaaaaagaaagaaaagagggaaagacatggttatgaaaataaattcttgctcctcaaaatattgagcatgataaaaaaaatatagccatgccccctcctaaaaagaaatgaaggattttttagagaagaaagaaagcacaaagtagaagtattttctttattttttcacattccatttccaccatatatcacacactttatgtacgatcttgatcttgagtatgtctagtcatatgctctagtctaagtttttgacttaataataaatgtgaatacaggtatgccatgtttgatccctaccaagctccacatactaaaccttagagtaggaatcaacaaggttactttggtgaggaattcatatttatacactttgagtgatcgagaggatcatttgaggaacttagatttcttttgaaaaatcatttgaaaactttcggaataaaaagttgaataaagattgggtgactagtgctcatcattgctgttctgtctttcaaccgctcagggcaaggtaaagcaatgtctcgcgggaatcaggtgtaagggtaagccacgtgataaaattatttgatttgagagagagtacatataccttgcacttgtacatttgagaatatacagcatagtagcaactcctgatcaataaccaagttttgtttcctttcgtcctttactcgggacgagcaaaggttcaagcttggggtgttttgttgatggtcgttatcgatcagtttcgcccgtcaatattaccggaataaaaggagagctagtcatgcttgcaatgcatatagtgttagaataaaataaaatccactagtacttggtttactaacctcttgcagagaataagcaataaatggagaagaatcggcatcaaaacactcgatcgatcaatcagacgatgccgagaatcagacttaaaggaagatgggctgaaaatatcaatttcagaagacccaaaaagcccaaaattcacaaatctgcagagagaagaagtcagggaagccgccaggcaaaaagtgggctggttgggctagcccgaggttcggccgaaccctcctcatcgtcgttggatgcagggcttttggggaacggcttagattagcccccaatgacggttggagggtatttccgaccattccaaccgtcacaaccgtcattggttggctatataaactcctcaccctctcacacacttcaagcaacaaagatctcatattctctcaagttagtttagtgctctcaagctagtggagtaggaatagaatagtagtcggaatccaaaagtcttcggaagagttcgggtatggctctagcagctttactttctcttttgtaagactagtatttaatttagaatatacttttgtatacgactctagtattgtaatactctcctattatatgactaccagctttacaatatgtccgagatattatgattatactgctagcttatctgggagatgcattggtacgggtataatgtttgcatatgcaattattctatgtcatgacgatgatattagagtagtatctggaagtttaggcgtggtgtctagattactgggtatcattatttggggttatatgctgcggatgagaggtgggccgctgatggcgacagctcagtatgggtattcgtccgcacgtgtatatagtcctaagttaattccttggggagggtactcctccgtatttagccccagttgtatagtcatgacgagctgtcgtaaggaactcggcagtcaagggtggcttctcaaagtaccacgagggcatcggaaaggaggtattagctagttaatcatatacctaggatgtatactagaagtataggaatatattcttttctatattctttccacttagcttaggaggtttaatataaaaatgagtagcttatgcttgtgtgtcattctaccctgcaattatatttatccctgcttagacatcattaatacaagtaacatataaatattagtttggttctctctattataatcttcccacgggataaacaaatacgatacccttggaatactctcgggtgaaaatgctacaatggtatatccgtgcgcttgcggataaactctgtaatcataatataccatgactatttctggcaccattgctgggaattatatttctagtaatgtcgttaagaaataccaacacgtactgtcggccggcgacggcggcgacacgaggagaatctccacgctcggcttggcgatgaggtgggaaggagggggaacttgatctacgccggcagcgatgaccagtcgaggcagagagccaagacgcagcagctgaggtccgcggatgaagctgctcggtgggaaatcccgaggtgcgggaggaagaagcagcggctggcgacagggtcgcagacacagaggtcggagggcgccgcctgccgccggccaccgctgtcgtcgtcgctcacccgcgcgtgacggaggacgatgaggccaccgcgcaacgtcacgggctcatagccatctccgtcttcaccacctccgactccatgctccgatctccacgcctcgcctaggtgagaggggaggaggggggtggaggagaggataggaggatgcgacggagataagacgcgacacggggtaggagaagaagaagataaggacgagggagagaaagagagacatcagagataattaagacgcgatgcggctctctccctccccgtgcgcttttttcaattttagtctcggttgtaccaactaggattaaagtgctgtgttactaaccaggattaaagatcctgggcggcctgacaaaagacaaaccgggaataaaaataatctttagtcccggttggtgttacctaccgggaataaagataaaaaagtttcgctgggcttctgatatgtatgttctgcataagtgtgtgtattttgcttttaagtgctcaataatgaaaccgatagtttcgaatttttgaaattggtaattacaatatcataggtatatagaataaaatataatactttttatcccttactttctatttccttatgttaatacacacttcgaaattacggaatataaatgttttttattaaataatatgaagctttaaattaataatactgagttgtacttgttatggtgtcttacttttagtatttttcttgataaaggatttctgaatttaggattgataaaaataaaatattgtacatggatcggggtccagattttaagttttcatggtgttgtctaagaagacaacagtgcatttataagtgtacacaaagaaagtaaatatatttattaatccttaaaaactctcacttacatatattttctcttggaggtgtctatttatagccttagattagctttgaacattttatatttgtcagttaaaccagccatctatgctgccaaaaaacctaatttaacccggctttgcacgttggatgtccatatttattggaaagatgagaacatcaagtggacttatttccattgggggtaggcatgtagatcaggcttttcctagcggttgtggcccagcccaacttcattctgtaggccatggcccatgaagaggatggcggccacctcttcaattgtaatgggccgatcgtttaattcgcttccagtaatcctcttggccgaacgttcagggtctgtttggttgcctgcaccaaggttggcccgcaccggtccatgcaaattcgtggtgttttggttgcctgctcgggcctcccagcctgtccatgcggatgcaaaaataccccctcagccaggcacggcagaaacggtcaattcccacttcgctgcttggcctggctcgaccgatgtgcaccgcttcacccgcgcctgcacccacgcgtgcaactcgcgggatggggtcaccactgcttccccagaatcgctccctccctgcctcacttctccctctcgtgaaaaaaaactagggttcaacctaggctttggcagcggcgcggcgctgctcttctcgtcactccggccataagcggcagccctctcccccgattctggctctccttcatctgttccgaggtcgtctcacttcctgcccccgcgtcggtccttcccctcgtttgccagttctctccgtcgtgcctgttgttccactgtcactctctgtcgagcagcagggtaagtgcattgatggctatccatcgcccattgcaaggttgggcatcctcttccctgtccctccttccccagttttttcttctctatttggttgatttgctgttatttgagtggatgagagtatggggccttcataaatctgctagatctagtaaaagcttatacattttcctagttgactttggtagatttaaatattgaaaccgtgtcaatggctagatgaatattagttcaatgtcaacgtgtattgttggtatcctttttagctgttcattttctttcagatctactgttttttcagtttcatacagattaatattagttcaatgtcagagcaaactttgggtgcttatttgttttttatggtgtgctgttgtgttacacttttggctgtgcaccttattttgccgattgtgttttgtctgagtaaatatccatggtcgatgatggtatgccactggatgtatacatacatactcaggttgtgctccttaggatgttgtgtttatgtttcttggtccaattatcttttatatgaattacggagtacaaggtccatggattggctatgctgttaagcatatacttctaaatctctgcataagttacatttcagtctttgtaatataatcagatgttgacatccactgactaatttagtcaagcttggaagaacaaaggtaagtacatggaactgaaaatggccacttggagatgacagctccatactcagtcgttgtggctgccatttgatttcccagttccatctggaagaaacaaccagcaaaaaaggaggctagcaggaagcagcagaaaatactaagcatgatcaattttcccatcatagcatttctgtttagagcatgtatatctttttttttttgggttcataggacaaatttcagaaagcagagcattgcaatatcagaaattaggcttattccttttgtttgacctcctgtgttgtttgatatttaattttctaggcaataccattctagtagtactgagctgtgatgcataagaacatacttatatacacttgtcattttaccagattgcagatatataaggctgttgagtttaaagatgtctgtaaaaggattgtaataagtatgtacttgtataacaattggttcagttttgtataacatcgatgtaattttatatactcaaataccaaaatgtttgatctgttccttgtgaacaacttcctgtatgcacgtttgtttcctcaatgctgcttaccgattcttacaaaaattaccaaccgaagaaaatagacgtgtatgccaatattctaagtaatttagctcacaaataatagtagccaaagaccaaataaaattttaacacaacctcacggagtaacctcactacacagatgtaaactttatgagggtaacctcaccactcacaagagagggtatttacacctaagatgtatccatccaaccaaacaacatctcctgcatgcaaccattccaccaatcctttgctgcaaccaaccaaacatcatctcagcatatccaggttcatcggatgcgggtaatcaaacagctgcatatgtatccttttagccagaccaaactcagcctggatagaagagatgagccagactaagagaatacgagcaaccaaacgcacccttaatgctgctgcagccactatctctgcccgtctccctcactcgacttccgctgctgctggaacagaaaatggctggacaattctttgtagacaaattataacggcagtaaagttcaaatccctgccgtatcaatcagtatatataaggcaatcttcttgccttcattatctatctattatattattaagacagctcaaaaaaaagacaccacgttcgctgtggaggctagaaattatcacattaatcgaagaaaaagaaaaaatctacaccgctagatcatgatagatttatattttaaccgttgagattgatcagaatagtataagtaagaaaggatacatgacaaatcctactcaaactatgtaaaaaaaaaatactatacagcaaaacaaaaattctattcggactgtaatggcccaaccggacagagggctgagtcaacgtttcttttgtttccagaaacttataaaaaaaaaggaaaatcaatatgtttccttggcacttaccgcatagacgtgtcagctaacaatcaaactcactctgccaaccaatgcaccctttccttgcacagcagcagcgggtgatttagtcagccacgcgcacgcacacgatgtcatttaaaggcaagtttagtatgatcaaaattttgttaagtaagaagtttaattgttttgttggtcgtagattgaaagacaaaaatatattcccaatttttctttttttgagataattttgtggttaaagaatactataaatttcaaatattacataatgaggtatagaaattatcaagacatcaagatcaaggtcagtatttggcagcctgccaatgttcgatcatcaattcttgaccatattctatctaagaattaattcacatttgcaggactaaaaatgccacatttaatcaaaagaaaacaaacatattgccaagggacggcaaataaggcggcatgcaacgacggcttacaggaattctaaaaaaattataaaaaatgaaatcatatcaataatatggattgattttttagtcttaccggtgtagtgagagatgacaaagaagagaagcaatgggcaggcgagcgtacgcaaataaatgagataggaggcaattgccataggagggcatgccgagggtggtaaagtaaataaaaataataattataagagttcaagtaggaatacaatttataaatgaaagaaatatcacaatgagaaatattgatttttgaaaaaatagtccacacagaacacaacaatgacaaattataataaagatgagagaattaatagacccacaaaaaaatagagtggtgtaggtagatgggatatctaaaaactataaacaaaacctcacatagaatttcaatgataattaagaggagggacgatgagcaggtcgttaagcagcactgtctcgacgattggcgggatttctagaaagtaaaaaaaacttcaatcataatcatgttcgatttttaaatctcaacgataataaaaatgggaagcagcgggcgaaccatagaggagtacagtggcggcgtttggcgagacttctaaaaattataaaaacgaaacccaacgatacaatgaactctaaaaccacaaggtcaaatttgtaaaggttccaaaaagaatgaatgaaaacagtggtagattgagcaagcaaataaagcgatgacaaagaaataaggcgtagtgattggcgtgactattaaaaacaccggcatgataaagtcagtctttcaaagttctaacataacgagatagttatttaacaaatttaagtaaaaccatacgtaaaaaatagataattttatatgggtgctagccgcgcaattgcgcgggccaccagctagtttttttgaaaaaggaagttcaaaccatcgcgtaaatacacatacattactcacatcggcaattaggcaacactaaagaccaaatcaacggaccattcaaccgtaaactctaaactaagaacaaacaaattaaaaaaaacaaaaactaaacgctaggactgatgcttgagcaatgaagacgagtccttcaaaccggttgaatcggacggaaccgacgaacacgaggtgtgagtagcatggccactcgtcgtcgatgtggacgaggactgcgtcacacctgaggacgacgacaaccctgtagatgacgcaaagagcccatccaatgagatcaccggcggcgcgtacgtcggcacgggcatcttggccggtagcaccggcagctagcctccactcgattggagtatggccatggcgtctctaatagaaggtcgcgcgctcggatcagggtgcgcgcaccagagcccgagaacgatgacacgctccatctctgtaacatcgtagtcatcgttgagacgcacgtcgacaaccttgagaacatctcccttgccatacagatcccaagcccactcgaccagccgaaagacgccatccgtttggctgtctagtaggctcatcggtttcctcccgcatgccacctctagcaggacgatgccaaagctataaacgtcagactttacgcttgctctgccggtgatcaagcattcagggtcaacatagcctggtgtcccggacactgcagtcattgtccgcatccccacagtgtggtcaatgaaccttgcgagcccaaagtcgcctagcttggcattgaagaactcgtcaagcatgacattgctcggcttgatatcacggtgcacaacacattgcccccactcctcatgaaggtagaagagggctgatccaatcccaagaacaatcttgaccctgtaaaaaataagttagctaatctattaagtttaatttaacaatatatgttaattaatacggtcacaaagattgagatagaactagcgagggttgataacctcattggccatgtgaggaaggtgccattgccgtggagatggatgtcaagactacggttggggacaagctcgtaaataagcaggagttcatcgcggccatggcaccagcctatgagctgcacgagattgcggtggcgtagtcggcttatcaccttgatctccgacttatactccttcctcccttgcttggaggaatctttggcgaagcgtttaatggcgacggcgaggccctgttctctcaggtagcctcggtacaccgcgccaaagccgccttgcccgagcttctcttccgccgcgaagctcttggtggcctcaacgagctcatagtatgggaaccgtcttggcccagtccccatctcgatctccacgatgggctcgccgtcgtcgtctaagctgtccgagcttatgtcctgctcatcctctgcctctttcctgtttttgattcgacgtcgccgtatgaggatagctgcaacagtgaagagcagcacaacgaacaacgtcgccccgacggttgctcccgcttcaactacggcacgtacatgcttatgctcgaacgacgggctcgagttgaagtaccaagaagtcagctggtgtagctcaactgatgcgcccgttgccgccgagaagccgatggtgaccttctctggcaaggcgctcttgagatcaaccttgtcgcttaggttgtaaggcggcttcgttgtgtcatttatccacagctttactgacaggatgctcgaactgctgttgtagtcgacggtggcggtcatgctcccgttgaggctgaagtctggtagggactcgttcgtcacagatacgacggagttgacgtcgatgccgatgtggtcgttggttgcgttggggtcgaaggggttgacgaaggtgtcgaactcgacggcaacgaaccggttctcgccggtcgagacgccgaccgtctggttcgttaggccgaggttttggccaccggcgtcgccctctggtaacctcgatgggtagctggtgaggaagaaggtcatcccatcgccctttttgcttctatttcccgggatgatgttgaaggagaagcgcgtggtgaagctggccacctcgccggtggcggcgtcccagagctgcactggcggtttgtggaacacccgtccgacgttgttgcccacactgttcgcactgatgtcgatatacccgacgctgacagaggcattgccttcaatttcgatgtactggttgtgtgaggaggcgaaggtggggtagttgaaggacaaggcggcgaaatgagccggaggctgaatgtagcagacggagaagaagatgacgaggtcggcagcacaagtgatcaacgaaaagacggccatcccgccggcgagccagcgtcgatcgatcgtgtgcaaggtgatactgatacagtactgtgatactagtactgtgtactgatcggcttctccagctggaggagcaacgacacaacttcctatactgccagtctgagtctgtatttgaggtatcctccattggacccgttctcggcctggcgcgtgacgacgaaacaagagtaagtcaaaccagtattcgtttcgtccttagggtacaatgtcactgaactcttcaaatgattgatactccctccctcccaaaatataaatatttttagagtaatgtgatgtcaaaccttttaaattttgactattaatagcaaaagaaaaaagattgatcatgtcaatttgatgttactagactgatcattaaacaaattatcataatatacaactctttttagttaaaacatagatattatttgtcaaagtagtatctcgaagaccgtgtcgaagtttaaaaatatttatattttgggacggagggagtagcatatattaggctgtatttagttccacgttaaaattagaagtttaaagaaattagaacgatgtgacggaaaagttgaaagtttatgtgtgtaggaaagttgaatgtgacaaaaaagttaaaagtttgaagtaaaaaagttagaatctaaacagggccttactatatgtgtcttctctagcactaaaataaatatagagactgtaacttttgtgctccccgccggccgtggcccgtgttaacaccgtaccgtacacgctcaccctctagttactgattttaaaattagattttttttctccactgtccatctagaaactacaaacaacataatctttagctgaccttaggcgcattttgtttggtgttactgattttaaaattagaatttttttctccactgtccatctagaaactacaaaccacatattctttagctgtcctttggcgcattttgtttggtgtttctgtggagatgtacataatttttagctgccctttggcgcattttgtttggtgtttctgtagagatgtacataatctttagctgccctttggcgtattttgttcggtgtttatgtagagatgtgctgaactggttgtttggtgtttatgtagagatgtgctcaactgggattatgttcctcttaactttgatgacttctttatccgtgctgacattagagcttttgatgacttctttatccttgctgacattagagctgaatttaaccatttgctggactctatatatgaacaacgagaaacaacatcgtatctacctttccaaattgtctctttcttattgccgtggagttctttgcgtaggatcgtaaatagtctttcccatcacaaaagctagccttgaggtgaggggctcttccacttatatcttatgtcatttgtccttccacaatcaatataaagactattcaacactttgcatcggctggagatgaataagagtgatctagaaaagctggccggtaaagaggttgaaggagggaggacctgctttaagacaaaataaaataggagttggttgatcttgccagcccaatccaatgtttttggcgttcggtctgtttcaaaggtttaatatatcacttgtctgttggtaggtaatcatctccgagtgctttctgtgctcctttttgtaaagctggtaaccccagcaaaaactctgctcgaggttggctttcaatataggccgggtccttgtgaccttttctctaaaaaaaatctatatggataggtaggagtatatagcaaatctaactgggaattcaatcataatttttacggtcggtttttttgtgtgtgtagatgaatttggctatagatgtataagagcaggtacaatagcagcctataagctaactataaacacatttcgaggagataaaagataagagagaagagtagcgggctacagatttgtagccagctgcagcacggactccaaaatgcatgtgtgtatgacaggtgggactagatattaattgtgtagtatatgtttataggtaactattgtataattgactattaagttgactatagatgatttagagtcagcagttggctccactattaaacttgctctaaatgaaacataatctgcgattccagatccatagcattcccaaaaaataaagagcgatgctccggtactctatatcgtagtattatacaactagtaaaattgatttaaaccgttgattcataaagacattttagtactttactaacttagtgattaaaggtaaggttggtatttaggatattatccactcttcattaaaaaaaaagtttttgtacatttagatctatcgcttggctactcgacggcacatccttccgttgccggtcggcaaatcgtcctgccgggcgccggcggctccggtggccgcgttcacaaggccgttatgttcccttttcttttcaattcattgtccggtttcaaatatgaacagagaagtagaagataaaaactgttgcactgcagactgtagtatagtcgctgattaacatgtaaatcataaagcacattctctgaattataacagtgtagactctattagaggtcccatagtttagagtgggattcaattgaagcagatgagcaagagaacagaagcttcgctctgatatgctgattaaaaaacagtagcagtttagcacgtcaagttcagacttttatctttatctcttgtagtaaattttataatgtttagtcctaattctttccgcaggcaggagacggccaaccaaagaaataaactactcgcatctatcgctgctgatcagctgccggcagcacaccagccacctccactcctcgctctgtaacgctaccccgcatgctcagcccagcaagacccaaaaatccgagcgtttccaactaacatgcaaatttacaaaattatcctcccatgcacgtttctactaccattaaatatggtggtagtacgaataggtctgatcccttgaatagaaaagaatctacggtttagctagatttatttttactaccattagaaagcaccgttgtgagattcaaaaataattcgtcaagtactttgttttgagatagatagatggtcaagaactgtcgtaaagtaaaaaggagaaaataggtaacaatccaatgattttagagaaactcttacctttttatcattgacaaggagccagttctatagattaccattgacgatctcaaatctatctatctatcgattatattattaaaacaactttaaaaggcgacgccacgttcgctgtggggggctataaattcccacattaatcgaaaaaaataaaagaagagtctaagtagaaatacaatttggaataaaaataagcaatattgaaagaagaatccatataagcacccaatacaagattaatcaaaattcggaataaaaataaaataaaatccgaaattagaaaaaaaaagagaagagtccaagtagtaatacaatttaaaaataactgaaattcggaattaaaaataaggaatatcgaaaaaagagtacatataagaactcaatacgagattaattaaaattcagaataaaaataaaataaaatccgaaattagaaaaaaaaataaaagaagagttcacgtaggaataaaatttaaaattaactgaaattcgaaattaaaaataagcaatattgaaagaagagtccatataataaaccaatacgatattaattaaaaatcaaaataaaaaagagagttcaagtaggaatataattttgaaacaattgaaattggaaaataaaactattaaaaagatagtctatatataacacaatacaagaataattaaaattcgaaataaaaaataaaataaattcagaaaaatagaaaaagaaaaataagatctcaactataatacaatttataaatactaaaatttgtaataaaaataaatactattgaaataagacacaatctagaatacatgacgagattaattaaagttcaaaataacaaataaaataaatttcaaaagtagaaaaataattataagagttcaagtaggaatataatttatgaataaaaattatcagaatgaaaaatatgcaatttaaaaaaaaagtccatctagaacacaacgatgacaaatgacaataaaaaggggagaagcaataggtagagtactagcggttgatgggatatctaaaaactataaacaaaatcccaaacagaatcacaatgatgattaagaggagtgacgatgggcatgccgttaagcagcatggtcacgacggttgacaggacttaaggagagtgaaaatataccccaataataatcatatccgatttttaagatctcaatgacaataaggatgggagggagcaggtgagctgtagaggagtatagtggcgaagtcactaatgatttggcgagacttataaaatgtaaaaaaagaacacaaacaataattatgttcgatttttaaaatcccaataacaataaagagaggtggtagcggacgggccgtagagtagtaaactggcgatgttggaagatacttctaaaaattatgaaaacgaaacccaacaaaacaatgaactctaaaaactataaggactaattttaaaagttctaaagaagatgagtaaaggtagtggtagatcaagtaagcaaataaaaaggtgacaaggaagtaatggataaagactggtgtggcttttaaaaactataaaattattagaatcacgggaatgataactttaaataaaatcatgtgtaaaaaatagataattttaaattgatgctagccacgcaattgcgcgggccgcctaactagttatattattaaaacagtcttgaaaagaggcaccaagttcgctgtgggtgctagaaattcccacattaatcgaaaaaaagaaaaagagagtccatgtaggaatacaatttagagatatctaaaattcggaattaaaaataagcaatatagaaatattgaaaggagttcgtacaagaacacaatacgatattaattaaaatttggaataaaacataaaataaatttcgaaattagaaaaataaaaaagagagttcaagtaagaatataattttaaaacaactaaaattagaaataaaaaataagaaatattaaaaaaataatccatatagaacgcaatacaagattaattaaaatttaaaataaaaaataaaatgacttctaaaattagaaaaagaaaagaataagagttcaactaggaatacaatttataaataactaaaattcataatagaacataaagactaatgaaagaaacgaccatctagaacgcatggcgatattaattaaaattctaaataaaaaataaaagaaattcccaaaaatagaaatatagttataagagttcaagtaggaatataatttataaaaaaaatagtggaatgaaaaatatggaattttcaaacaaaaaattttatatagaacacaaatgataaatgatagtaaaaatgagagaagcaacatgcgtataaaggagtagattggtgatggttgatgggaaatccaaaaactattaagaaaaccccaaatagaatcctaatagcgacaatgaacatgcagttaagcaatacgggcacagcggttggcaggacttctaaaaagtaaaaagtaaaccccaataataattatgtttgattaaatcttaatgacagtaacaggtgaggcagcgggcgagctgtagagaagtacaatggaaaagccgctgatggtttagcaggacttctagatagtaaaaaaaatgaacccaaacgataattatgttcgagttttaaaatcccaatgacaataaagagatgagacagcggacgagtcgtagaggagtataatgacagcgtttgatgggacttctaaaaattataaacga

SEQ ID NO: 6380 - DNA, 20228 bp, Oryza sativa
tcgctcgccatggcgctctccttcgcagtgatggtcacgcggcgtccgcatcactatccgtaagtccgccgcgaagcgcaagccatccacctctggcagcccgtggtacggacccgaccgcgtcttccgctccaccgatccggctaggcacgtgcggagcccggcaaggaggagagaggaagatgggggcggcctccgccactagctctctccccgccagccaccgtcgaccgccgggctctccaccgacctgccatcactccggccctcgaccgcccgccatctcctctactgctgcctcctcctcctcagcctccatccgcgccgactccagcccgaagcgccgccaccactctagcccccgcccatcgccatcactgtaaagaagggaaagagagggaggaagaagagagaggatgacatgtggggcccacacattagtgggccccatattttttttcgaatgacaaatgggtcccacatataactctaatgccacctaagcgtcacgtcaacgccatagactagtcaatattgtctcgtagacgccatgttagtgaaaccaccctccaaaaccaccgagggagttaaattgcaccggttttaatagttaggggtcgagatatccggtattgcgtttgaaggatacagataacattctgtcactagttaagggagaaaaattgaacttattccattttctgacgcacgcatgaaaggtcaagctcccactgaaaatgggccgcactaaatggaccggacggcccacaaaaagaggaggccacgtggccttgctactaggtaacatgtgggccatcgcgtgggcgtggtcggagtttaattctccgaaccctgtctaacatgtctctggcgatataccagcactccagcatacagcagctctagccttgctggttactgtagtctgtagttagtagttaatcgtaaaatttgccaaaatttgaagcagaatgttatgctgaattttcgaagttctcctgtgatgtctgggagatgaatgccaacaaacagataaacaagaacccaacaatcaaaaccttctgtagcataacctgattcagtatcatgtcatgtgcatgttttcaaaacaagaaaacatgttaagccatgcaaggtttgcttgttccactgcatgcgtataacaaaaacccgcagtcaggtaacataattaatctaaccaaggcggtgatgaattcttgagtacaattgctggaatgttttgtgttgcgtcaaacaatatatataatatgtgcggccatgaacgactccaaacctccaaaattaaggaggttactgccttactgatcacgttgcagtgtttcttggatttgcatggtagctgatctcagcagagccctaactgaaatataccataacatgatgtcaatgaggggtcggagttttaaactccgaactcctttgggatctctgacggccatttgatcacgcttgcgtttgcgcagattgaacagtgaaccgatcgagtagagagagccacggcggactcgtcgatcgaacacatgtgacatctcgaaccactttacactgcatctctgacatgccgcgcgccggacttgtggcaattcgtcagtaatcgccgtaataatgcttgtgccgcatgaacgaacgaacgtacggcgcctgatcgagatgccagatgaaccaacagtaaggccacccgttggtaagaaaggcatgtgcgcgcggcgagcatctcttcgccgctgatggcggccggaccttggtcagacgtcggtgcgcgcggcagcgatggcatggaatccggagtccactatgaggaaagaaagctgtagtctttgttcggtttagagaggattgaagaggattggaggagattgagggggaataatttcacaccacaataagtgtggaataaatcccctccaatccctccggattaaccgaacaaggccgcaaagggagaacaattgccatgtcatcggagatcagaattccgaccctcctcgggtctagctctgacggccttccaaagctaacaacatgtagtcagtcagatcacatggtcaatgtaaccaagacagtgctgaaataactaacattagcctagccacatctgaattattgagtgcaattatcgaaaccgtaattttgtggtgcataaaacaatgggaccatgaaattctactccagcaccctcttttcgaaaagaacaagatatcttccataccaagatcagaggcattcttctacttcgcccttagattactttgccatgttgacgctctgcatagcttttctctatcgtccgtgagtgccacggtgttcgatcgatccgtgtggcgctcgagacggcggccggccgtcacagctctaagccagcatggcggttcaatcaagcccctgtgtggcccaaatgagactaaaacctgtgtcaatgcggttataatttgaaaatttttagtttttatcaatttgggaataatggagtaatatttttctagcaaaaggcaacatatatgttgacagcgttccttatgatagaacctaagtactcaggtttaagttgtagattttatatgtgtattcgcatttacgattggttatattttaagtggtaaataaatgaaatatacgttgagagtgagatgcttgtgattatctaattaatcttaaaatatactacttaatttttcggagatgcttgtgtgtgttttataaggataagtgtggacaagctgtattgctgttctaataattttgctgagaatgtaggatagaattactatgctcattcatacataagttctacgtgatgagtagttaaccaacgtaagtgtggggcatgtgggctccttcttctatatttttcttttacggggaggacataagactggagctcacccacgcccagccgctcgtctagttttttttatctttaagatgcttttgctatttaattacaccatcaagatatggtatatcctaatactatgaatttaaacagagcattatattttaagacggatagagtatctatcaagtgaatggtgacactggaccaacgataagccaacaagccggtgtttttttttcttactaaatgcttttactatttattatgtattagtataagtgaatgttgacacttggaccagtgatcagccaacgaacctgccggcttgagaaggatgaatcggatgtagtgaaatcggtcaagcctccaggatggaccaatggaaatacccacaattcgtgcaggtcccatcctggctccaacttggcatgtacagcaacaagcaataaatatagctaggctttttagattgtcaattagacagctgatttgctaaaatagaggaaagaaaaaaatcaaatgtaaagcttcacaacgccttaaaattaactatttgcatttacaaaaggaatattttctatacataagggtaaggaaaatgaaaaaaaaaaggtaataaatattattttgaagtattaatagctagaaccttcgttgtctcaattgttatgcgaggttagtctctacatagctggcaagtcgactagggtgtgctctttccctagtttttccaactctcccatgtcgttttttgtgcacacgtttttcaaactgctaaatggtatgtttttttttaaaaaaaataattatatactaaagttgttttttaaaaaaatcatattaatctatttttttaaaaaatatttaatacttaattaatcatgcaataataagtgtttcgttttacgtgccgagaactaacccctcctcgcgaacgcagcctaagaggctctaccatgcaacatatcatgtgtttgttttttgacgcatgtttcccaaactaataaacatggtatctcacacacacacacacacacacacacacacacacacacacacacacacacacacacacacacacacacacatatatatatatatatatatatatatatatatatatatatatattgtgtgtgtgtgtgtatatatatataattttactatacacacacatatatatatacatatatatatatatttatatatatacatatatatatacatatatatacatatatatatatgccttaaaaatcatattaacacatatttcttaagtttttttaagctaatacttaattagtcatgcgctaaatcttcgctctattttgcgtgttgtgggccgggggaggggttccaatccccacaaattgtacgggtaaaatcgaaccatgcttgaaaaaatcgactacaacacactgcagcaaccaattgttatatgttaaagtaaaatatcgaccacaaaagaagagtcgaacttagcgttaaaaagatggtttgcagctgttggttggctgcacaagatagggatgtacgcatgtgattagagattctttttctataagggtccaacgatccatgtcacatattgtagccaacaaatcaaaattttgttcgaccatactaatcgaactagaactgcaggtaccctaaagctgacaagttgtattccattcgaaagaacacccttacagttacatccactatccttggccatgggtggttgcttcatgtgaacatatatgtggactgtgggcctgtggcttgctagtgccaaattggttgttgaagaagggccgttgacccctagtcaatgacagtgaattgtactcccctgcctgtcctgcaggtgctataaattctgaacctcaagaactagaccaaagcaacaaagcgaggtgcagtttcagtgagggaggaaaaaaagagtgagaagaaagtcgagatcatgtccctttggaaggtgctcctgatggtaatcgcgctcatctgcgccctgcatactacttcaggtaaacgagttaataagttttttttactattgtaaatttataattaatgtctactaccttagttataaaataaatttagaatatcttaaattgatgtctaaaatataatttattctgagacggatatagtataatctctattattagagaatagagagaatagactgaggaatttaattgtataatttgatgcagggagacctcccgtcgtgggatatcctgctcctcgtcccaacggtagctcgggcacacgatgctacgaaggctgcaaccctccaggtagagatggcaacagggatccataacagagaccctctgctaccctccaggtagagatggcaacagagatccataaccagagactctataggtttttattttattaggagtcatatatgatctaattcttgtatctatggatttatcaacagaaaaaaaatccttacatgttggatagatgggtattagttctttagccactcgtaccccttacctatgggtaaaaaatacctatatgcttagcgtgatagtttacttactttgaacgttcatgtatggtttaatactagtatggtttatttacttgttatatatggtttaattcttgcatgatttgtttacttgtatttgaatgctaatactaaaaccaaggttacttaatatgatgtcgatagttgttatcgtaatcgtttagttatagataaaggggaagggagaagttcactttagttccctcaatttatcgtcgagtccgaaatttatctttgaaatgcaaaaccgggtacaacacatcccctagcttacaaaatcagtacaaatatggggtctctcggcaatattgtgcccagttttggttgacgtggcgtctacgtgggatcctttaactaggtgttcgttccacgtggtattgatgtgtcgcttacgtggaaattcgatccgagaaaaataataaaaaccgtaggacccacatgttagctacacacgaaacaaaaataatagagggtccgtgtggccccacacgtcatcctcactcctccctcctctctctatcccctctctctcctcccttcttccagcagcacgccgccgctgggggattggtcgccggcggtggaagtgttaggcggcgggcaggagcatcatgacagcttcggcgtcttcctgtacaaggtctcctgcggccggcgtccagcggtggtggtcatgaacggcggcgaggacgcgatccacctcgtgcagtgggtctgggacacgcacgggcggcgcgcggtggcgggggcgacatcctcgacgcggccgacacgcggctgaacggcgagttcgacggcgcagacatggagcgcgcgctgaccgcggcctgaggccgtcagcgtgctgcggttcgtggcgccgctgccgagcctcccggcgaagatgccggtggcgagtacgggccgccggtgtccacagcgccggcggccagcagcaacgatttccatggctgccggaccaggccggctcactgcttcagctactgtccaggtagctcgttcagattgatgaatgggtattgatgaaatggcaagccatggatgcaaatctcaatcgaattagcttattattcagttgtctcgaatctcgatgaatgcgtttgagtattagagattcagagttggtgcctgttcttggccgatgcgaaatttgaactcaaaggaatagttgaataaaaacgtctgaataggatgcactgaatatatgagtttattccaggtgattaataccatatcatgagttggcaatgccgaaaatcttgtcatgttctttggatattctgaattcagcatctgttcacctagttcgtgttacaaagcggcaaccatcgtgtaatcaacatgttttgtgtctgaatctgtcatcaagtttcgatcgagatggaacacgagctgctagtgtcgtcgttgccaccggtggactgaatcagccgccagcgccatacgtgcgtgggctcggaagacattcgcacggatcgggcgcacggtggcctctagcgccagctggatctcctccatccgccgccccttctccccgccggtcaccatccttctccctgccgccattggtcgttgcgcctggagagaggagatttgaaatgtgtgatgattttatgattttggtgagattggtgtgaaatcaatatgcaaagaataatgaaaaaaaaaaaggataggaaccagagacgtggcgctagcctcaccaaccgggaccaaagattttcctctttactcccggttggtgttactaaccgaggatctttaatcccaggtatttgaaccgggactaaagatagcgatctttagtcttggattcttagtactggttggttaccaaccgggagtaaaagacatttccccaccagtagaacacagccatattgatagagtagagctaatggttgggcctcagaaaaaatatgtataggacatgatcaaatagagccaatgtcggcaaaagaaagctccagaaaaatcactctcccaaaggttgcaaccccgcgaggtcttgggttcctgcccttcgccacgatacatcgtcttcgattatctagatgattattattggcatcgactaataaacatttaaacaacatatggtaagtggtaagacatagaacactctgattacacactgttctttggaagaatttctgcagagtactactactactaaacaagcaaaacatcaccagaattcaaggccagtacaagatcaggacacggccggaaccataataccagaaataacgagcaactaattaattgatcgactcgaacaatgaaagaaattaagcgctaactaagagcacccacaatagttatctatggctctctatgagagattcatgtcggtatatttttctacttagaagagattaaataaagagagagagtaaagctatctactaaactgaagatagtctatagagaaaaacgaggcaatggattagagagctatagatacccatgtagacatactattgatcaggtggtttactgttaatctagtctattgctgagatgtacatgttttataaagaataccttactttaccattgcaattactgcgtgattgatgggtgagctatctggtgcctttaattttgtatccatgacttgagatatctgcagctacagatacaactttcgagacgtacgcaaaggtacaacgtcgactcctcctcgatgccgtaggaggccagcgtgcggtcgtccgcaagctccataccggagaaaaccagccgttgcttgcacggcatggtcttcttcttcttcctgtagtacagcttcaccttcacgcttcccaccgtgtccgacggctgcaccttcagcgccgtcgccttcttccccccgagcactctcacgaagatctgcatctcatccgtagcagcaggtcgagtcgttagggtttgatgatgctcttggatcagtttctgcgcctccatgtgcgtgcggatgcagtcgcagctggcgaggcggccgcagaggttcaggtacgagtgcttgcggatgccgcaggaggccaccgtgtcgccgtcgtcgagctgcctcccctcgaagatcagccgctgctggcacggcggcagcccgtccttctcctggagctgtagcttgacgctctccaccgtgtccgacggctccacccacagcgtccaggtgttccccctgagcccgctcactaagatctgcatctccgtagcggggtcgcggatgccgtagtcggccagcgtgcgatgaccgtcggcctcatccatctgctttccgtcgtacgccaacccgaagtcctcagtgatccccgacatggccttgatcttcgccttcacgctctccaccgtgtccgacggctccacttccagcgtcaacgtggcccccgtgatcaggtccacggggatctgcatcctcttccccctggaattaatcgtcgccgccggccaccacagtttcgtccaggtcacgatcgagctggtgttgctctggttgttgcgcggctgcgtgacttgccggaacgacgtgtatataaataatataaagggcagggcaggcttaggtcagaacggttctggtgttggagttcgaaccagtcacgacggcaaaagtaggttcggatatgaatctcaaaatatatttgggatatattctgcggcgatgaatcccaacatacatatatacgagtccagaggcgctggacacgttggagttgccaagaaattttcttttcatattccctttttgtttatgtttttcttcccttttaaatatgtgatttgaattttgggttcacaatatatttggattatagtattctaatagaacctgactattagattagttttctagtataactcttagtctttattcacgacgactcctagttttctcctgtgtatatccctcgtaagccgcactaggagggtacgatagcccaatgtatctctgcgtttgtatccaactcctcaatagtaattattgttggttggcgcccgtggttttttcccaaaagggttttccacgtaaaaattcgtgtctccgctgcacatctatttccataacacactttattttgggttcgttactacctgcttagtgcttagtgctacgtgacaggtggtacaagccggatcgaagcaatgtggcttggtaggggtgggcaaaataagaccgaaccgaagaactggaccgaaaagaccgagaccgagaccgagaaattcggttagtgattcgatatcagccatcaaaagaccgaatttttttcgggtaattcggtcataggcttccgttaaccgaattaccccaaaaaactgaaatttggcctaacaggtgtacgaggcctaataagcccactaaatagaacaaaccctagagggagcaaccgagtaaagtcgctctcaggtctctcagcggctcagcccctcactgcctcgcatccatcgcgtcgcctccacgcctccgccttcgcctgcatcgcgccgcctccgccctccgcctccagcaccggcgccgcctccgcctcgacgtcgcctctgcccttcgcctccagcgccagcaccgccgccgccgcctccgccctccgcctccatcccacctctgcgcctccatcccgcctccgccttgtaccgtgggtctgtggctgttgtgacttgtgaggttcagacttgagatctatcctgtgataatttggtgcttgatgttgcctattgtttggtatttttgtgatatatatgtctgtgaaaaatttctaaaaagagggaagtgctgtcaaaatttttcattctcctgaaatttcggttagaccgagtccaagaccgaatttgccagtcctgagttttttttatgaaattcggtcctgactttccaaagactgaattacccgagaaaccaaagggaattttttagtctgaccgaacgcccacccctatggctcggtcgaatccagatttgtcctagcatctctgcaaccctctgttttgttttgtttttcttcacggcaactttagttgggaaaagctacgactttagcaaacgatttaactgtgacctttaactcaccatgcatgtgacatgtgggtccgacacgtaacgacgtgagttttgcgcgtgccagagttgactaacgggcctaaaattcatcaagtgtatgaagttgcacttttgtgataaaaaccatttactattgttgcggtttcatgaaatgtttcactaaagacatcaacttatggaatagtcacccgaccgatccaccgtgtccaacggctccattcttagcttcactctcagtgtcactgtactcctcatcaacacactttcacgtagatctgcatctcagtagcaggctgcgtggaatgtaattgagctagggtttgatgcttttgaattagtctttgtgtctcgatgtgtgcgcagatgcaatcacaactgtcagcgaagtgatagcagaggttcatgttcgagtatttccaaatgccgcaggaggccagcgtgtcaccgtccttcagctgccacccctggaagatcaaccgttgctagcacggcaacatcttttccttctcctagagcttcaccttcacgctcttaaccgtgtccgacggcttcacccacagcgtcctagtattccccatcagccccctcacgaagatctccatctctgtagcaggatcatggatgccgtaatcggccagcgtgcgactgccgacctcatccatctgcttcccatcgtatctcaaccagaagtcctccgtgatccccgacatatccttgatctttgctttcacgctctccaccgtgtccgacggctcctgatgtgaccatggctattatagatacaaccgttgctcacatcatgaattaacaagaagacatcaagatcaagtcctccatgtgttgcaatctgattcggccacgtgctacattgctgacttcaaacggccgccaaatctacatacgtgctccgttttgggcccgtgagtacttgatggaaagctctcgaagtcttctttccaacggatccaacctcatctcggaattccatctcgtttggccataatcacagaagcaaagtgttgcgtcacctgtaatgggcctatgggcttgtaacctcgtctgggatcccggcccaagtgaggcccatgtgggatgcatcccaatctggtgaagcacgacccttggacaatcttggtcgtcctcctacctctataaatagttaggtaccccttcagggtttttcgggttttgtttagatgaaagtttagctattgctacttccttgcagcgcgcatgtgggctagaccgtccgtctgcttgtaatcggaaccccaacttatcatttatgctcaattcctatttgtaattcagattgcttttatcttgttcttgcttgtttcttcgatttgcttgcaggaacaaggttgatctgcatcggcaagatcaacaaccaacggagaggtgtatcgatcgctaaggcgcaacacaacgtcttgtacggttgtagtcgggtcgtcaacgtttctctcaaatcgtagttatctcaactcactgaaagatcgggccaacaacagccttgagtgtcgagtggaactcagggttcatcagctccacttccagtgtcaacgtacccccctcccacctccccccctgatcagctccacgaggagctgcatcctcttcccctggaattggcggctgccaccgcagtttcgtcgagatcgaccgagttggtgttgcacggctgcgccgggaacgacgtataaaaagggtatgacacgacggcaaaagcacaacccggatacaaattcatacgaatcccaaaatagtttgggatacattctgtggcgattccggcgatgaatccaaaaatacatctacttgtttcaggaatgctttgactcgagcgttcgatacgcgataaaaaatcggacgccaccaccgagtgggtcccacctaaccactcttctacgtacctttttctcatcaaacttatccctatctcaaattctcagccacttgttctctctctcccccatcaacaccgtagcggcaaggtaggaggacaccaacgacaacgtgaaaagggaggaggatgacggtgaccacgctggcggtgatggggcggcgcaacatggagaaggaggcggacgctctgcacctcgttgacggcgcgacgtgtagaggggggaggacgccggcgaccttgctgacggtgcagcgtgaagagggaggaggacaccggcggaggcagagcaggccgacccgaaagggaggaccaaatgaggcaccactggtggagcagccacgagcccacgatgcgaaggaggcgttggaccggatgccgatgcgactggccttggcgaggtcgccctttcgacatggctgcttgcttgtcctcgtctacaccatcaccacacctcacttgtctcgccgtgttggccgcttgatttcggtgaccggaatagaagacagaggtgggttttgttaggaattttagtgatgttacagtttatttgtttttttggttgcactttgttctatcaagttgtttcattctattttgactcaattttgcgtacattgtattaaggtgttgcaatcagtatgttttactattgcatttggttgaaacaattttactcaagtgttgaaacatttttatctggtagtgaaacatctgagacaatttttatcgagaggtgaaacatgtgaaacattcttcaacaatacggtacaacaccgtccaataatttgcatcaaatcggacgtccgatccgtagcagtctccatttgtttcgggctagtgcgaacaagtccaaaagcgctggacacgctggagttgcgaagaaattttcttgttcttccctttttcttttcttttttttctttttaccttttttttctctggggtgattacaacttgctgctagtgctatgtgacaggtggtacaagcctgagcagtgtgttgctcggtcgaattcagagatttgcaccaacgtctctggaaccctctgttttcttgttttgtttttcataaatttcaataaaatgattcgaactattagtatactaaaagacaggtatttcacaaagctacaattttaataaacgattttatcaataagatgcaacctgtaagttatcatgtgtgtgcgatatatgggtctgacgcataactatgtaaattttgtacgtgtacctactagcgaacccaaaattcggtttgcttttatatttatttttattgcaatgtacgagcattatgctactaaaataaagctcttcattatctaaaagatttatatggtaaaccgatagtaaaatgttttccatgctatgaattcaaccatggcacatcctaattcttacttgcactgcagcagcacaacaacggtacgcaccttctgtacagtagacttggatatatgcatataattaactagatgatacctcgcactttgttgtgagatttatagatgagtatatattaaatattatcgaaatgatgaaagttaaaatgttaaaaaaataatatgaggaagatggtttgacacatacttgttgatgatgtgtcatgcttgtatggggatttaaaataggctataatagtaattactcgtgagtgaagatgtgacatgcttttatgggattttaaatgagctagaatagtaattgttagtgggtgatgatgtggtatgtttgcatgttgagctttggcttctaataattaataattgttagtggataccaactatatagaaagtatagatttattgtggtagtatttttatttcatatatatactcctcgtatgcgtcttaatctacgtatgtatactgttgtgtaaaatcttgtgttgaggatagtgctctctatccatttgcaggctgaaaacgtgtcctaggtaaactaggaataactggaatatctggaaacttgattagcgtaactaattaataagtatagtagtaagcacaccttaaagacggtaaaaagaataaaatgtcaatagtcagatattttcaaccaaaataattatatgtatagaagtatagaaattcaaatagccataacactaattcatgggagaattttccagtgcagtgctaagaccaacacagttcaagacaagcaaagatcaagacgcgaccaaattaaaatatcagcaactaattaaccaattcaaacgataaaagaaaacgttaaataatatccgtctctcacacgatcttttgaagtactaattttatttcatatcctctggctaaaattcaattaaattaaaattgaggatttatcatttctaggtatcaacttttaaaacatctcctctccacttttcagttcatcaggtaagtccacacttgccgcaggtgagtcagtcgtggtgcttcgccataagtgcgccaacgtctttgcactctgggttaggacacatcagtcgtagcctctccaccttccccatcacgtcatcgacacgatagtgacggagcaccgcaagctcttccttgcggtgctcatgctttcccttcttaggtgtcgcgtacgccttcttctttcgcttcttgttgccgccgccgccaccacagatgcgaccgaggaggtgcagcgtcgactcctcctgaataccatagtagattagcgtgtggccgtcgtccagctgatgcccctggaagatgagcggctgctggtctggcggaagcccctccttgtccacgagcttcaccttcacgctcttcaccgtatccgacggctccatcctcagagccgtcgtcttccctgtcagccctttcacaaatatctgcgtcatcaccgtcgacatcgccggccgccggggttccgcgagatcgtgtggcgtgtgccctaggttgtgttggtctcagctgcgtggcggactcgttgggaacgacaagtataggcgaggctcgtcgacgtgggaaggggtggtccgtccgatctgaataatcggacggtggtgatcgagtagagtccggttcgaaaccgacccggagaccacaaggcccggcccaatttggttcgagccttcgaggccgcacgcgtcgcggttgcgaacacgaggcgaggaggggagaggaggggagccggcgcggcggcgaggaggggagaggagaggaggcggcgatggcggcgatcggctcctccaacgtcgggttccaggtgcgcgaagctctccatcccacctgggcttccgtccgttcgaatcccatggccatgggagtgggtgggtgggtggggctagggtttgatgctttgttcgatttggtcctctgcatctcggtgcgtgcgtctcgtgtcgtgtcctgaatccggagctaatcttaagtgatcttgttgctgctgcagctgctgaagaaatcgggctggaaggagggcaccggcctcggcgcgcaagagcaggtttgcgcctctgttcttgcgtcaccggaaatcttttgtgtgtgtgtgtgtgtgtgtgtccatttaccccaattgtagttatattttggggttttgcactttgatgcttaattctgttcatcgtgcatgtgattttgttttccctcggcttgtttggtaactcgagggaaggggattgggagtttacacgagagaatttacgatgagattaagatgggaatttgatttttaatcccaatgtcttgtttggtagatgtgatggaaattgatagggagtttagttggagattagctcattaataaaaacggatggctgagatttgcttagaccaagtaaacgaggaattccctcccaattacctgcccctacccaggtattgaaaaggagggagtttcttcctcaattctccatcccaatcccaccaaaattcccatgtctcccaaccaaacaaaacacttaatagcctcatccctctaaactctcaatccctctttaaaactccctccaaccaaacgggccgtagttgttaatggtgcgtagagttaaatgttgagacaaggctactgcaagttgaactgttgaaagctcaaaaaaatgtgtagatcaacgtaagatatatgtttagtttctggataatggttagtggtctctggaggaatggtaaagccaaaatttgtttccgaaccaagtaggcaggtagcttaccttagttggctgttaactccaaatgtttagtaggatctgaaattatatatcattttgaccggaatgattatctcgcatgttcataggtattaattaagagctgatgtttagtagtcatatatgtgttacatactatgtttgcatgtcacttggatgaagccagtttatgggttagatttgccttttatgctgtgtttttgttttcatactcacttagcccaatttaatcctggaacagggaagattggagcctgtagaaagtcgtgtgaagaataacaagcgtggtttgggttccaaggaaccaaagctaaagccaaaggttgacgaggatggtgaaaaagaccctaaaaaacccaaggtgagcaaaggatatccagtttattcatgatacccgcatacaatacctaattactttctttggcttccttgtaattctcattccgagcattgtattaatagttcactattatcattagttctacttaatagccttttttattgaaaaatactgatgactgctctatagtgtagttcagtaaaaaggtttcagactttacagataaacgtggttacttgcatcgttactaattgtattggtaccagttattctttatgcattataatacttgtctcatttggtagctaatactgctgctttgatatgtatttgttcatcttcaacaagctacttttagtaaatcacacttactgatgggattctaactaactgattcaaacgtgttgcccttgtcagctggaagcaccgaagaagaaggccaagttggccgcgaagaggatacggaagatgcaagaagaagagaagcggttacaagagagggaatttgaaatggctttcttcagggaattttggcccgataatgtgtagaacaggaggttaaccttgctgggcggttcgacctgctggcttcagcttattaggctcccttgtacagaacaacagctttgactcccttgttgtatgtggctaaaatgtttacattgattcaatggatgtttctggagagaatgctggtcttgtatcatgattttgttgtatagaactgtttgcaatgctgttacatgctggccgaataccttttttttttgttaccaaactggcagagtacattcactttacagtcataaaaggaaaaattttcatccataatcgcccacccccaccccgttttttttttcccaaagtggccgcgtttatttttgaagtcataaaaggagaaagttccatccataacctgaggaattggaatttgaaatcccatcgcatagcatttggtgtgtggtgtacacactcagtttgataatgtaaactgaaagaaaaattgctgaaacatattggctacaatgacccatacaaagggacacatatcatatgctgcagttgagctacaacaaaatcggattttatgactgaggtagcagtggcgactgtgatacataatgaaaaggggaagaaaaaaaatacaaaaaaaaaagctctcgctatggtctgaaaatgaaaaatgcagcaaaagagatttgtcaccaaattcggtgccaatttctgtctatacaaacagttaacgcacgtcaggattatgcgttgcttctcaaaaccatatgccagcgcctagctacaatagcagcggttggcgccacagcaccaagtatggtaggtcctcaactctgctggctacctaacaaaaaaagaccttcacatctccctccctagaataccaattcatcctcctcttcagttgcaacggatagtgtgcctgccgatgcggcatcccgaatctggccggccttctcgtcgcttatgccaagcagatactgcaaccttgacagcttttcaggcttcggaatgctcttcatgtaaatgccgtacagatcatccagctctcctgatgtaggccatgataggggcttcgaagcaggcacagccgcgtcgcatgcaagcaagtcgttcaaggatgcgacctgcattggcaatatattccaagtaaaaattagaacgctgagtaattctaacagtgcagttattgtaactttcctatttatactctagttgaatttcttttgtcattatgacgtgccagttatcaagaataggttaatcctgatatacaccaagatcaaagtcaacgctaaatcagtactttgataactgtagtcagtgttttaatctttcagattcttggagaaactaagttccaacataaaacaaataagtaggagatatgcagggatattccttacgtaccacttcatctttcttcttctgccgaagcagagcaacagcttggacaagggcgttatccaacctaatcttcgcaatgtcctggacaatcgacttggccttctcagcattaatgatgagatcagctgggatctttacatacacttcctcttcatcaaattcacctgtgcctgacgaaaagatctcctcaacggattttttgtaaatgttttctcgaagtggttctgcaatcaagctgtccaattgaaaatttgcttctttcaatcctcggacctgctgtataccaatctgtcctcgagaaatagaggcttcaattgcagaagacaactttgttgttgtgatattcttgattattttctgtgcatactcagtaggaagaccaacttgcttctgtatctttgcaagctggtcagccttggcctctgttaacttcccatcagcaagaatcacttcagcctgttgcacaaatgccttttctgccatcttaatgtgaacattctgagcttccttgcgggttaaaccaagtatgtctcctaattgcttcagcattaaatactctgaattatctttctttgtggagattgctgttccaaatgaaacattggtcgtctccccagtgacacagaacaccaaatatgtttcatacagctcagctctgtctctcaatggaatgtcatctttgagggttatctctttctggcttgactttgccagtttctctctgagctctttatcaggcctagttttccttaatgtctccagctgttcccattcgtattcatcatccccctcagactcgctgacttcaggttctgaggttgcatctgatgtttgaggttcagcagttgttggttctcctttaatgtcagctaaaagctcactcacaactactgtgttgaaggatatcatctttttcagctcttttgcagtttcaatgcggttcccagctgcttttgctctctgaatgtagttcaggaataacttccgtacctggtcatggatttggtaatatagaagtgaatttcattcacagtaggaatatattgaaaaataatatcatctagcacttttttttggtaatggggattaacataccactttgctgaaaatggccatgacagactcgtttttcaaattcagaccttgtgctgccttcttaacagcctgtcgtctattagtgtcatatccatcaacagatgaaattgcttccacgacaacctgcaaagcactaacggttgtaagaacaccactaacacagaacaggccatcaactttgcctgaacaagggaaatatagaacaggcaacatagaatatttcatatcaccttttcaaacaacttgccacagatttctgaatggacagcatcaacagtttcttgtggaatgcagagacgcacttggaatgccatcaaagcttccacttcgtccttgttcagctctccatccgctacaaactgctg

SEQ ID NO: 6381 - DNA, 9206 bp, Oryza sativa
gtcatctattaaaaaacggagatagtacatgaatagtgatcgctgactcactcctgtcaaacatgttacacaagtcctgggaataacattcaagatcttgttatgaattttggagggagagatcccctaacaacaaatcagatgtttttcaattgaaacctgaaaatgttgccacctgtccatttttattcaataaaaaggtactaatccaaagtgcctaatcaaagtttaaatgaagatggctccacaaatcaacaatcccaaaaaggacccatcatttataagctgcctaatctcagctactaccatttgactaaaatgctcaattaggcctaccagattgcatcttttttgtcttggccatagtctccaatcaagctggagaaacagagaggccatcatagataggagtagcaccatgaactctccaatgctcatgcttaaattctgccggttcatgcgtctctttgcaggttggtgagcagtgcgttttgcctcctctctctttcagtttttggcagcagatcagttaatatggtatgctggggtttgcatgaagtggtagttagcaacttgcaaggctgcagcaacaggtgaccaaacctaacgcacatgcacaagcaaccaggatttcttttggagagagagtgatggatttggatcatattggtgtatgcaagtgcccacaacatgtctctttttttagttgccacgccaagtctcccccattggtttacacaaaagaaattcctcccattttgttcggcatggtgaattttgaatagatatgatttctcggtttatcagcagcatccacaattttagtgttgattttaccttttttattatagtctattttttagtattggtttttaaattgtgaataatatagatataaaagttttattaataaattatgtttagcttttcgttcatatttctataagcttatcagtcgcatcttaaccaatgctattataaagacgcaaatgttaggaaaggatctaatatcaaataattagaaggggcgaggtttcgaacccaggtcatctagcccaccaccttatggagctagccggaagacccccgggtatttctcaccaatgctattatacatctcgatgcagaggctggactgatttctattataaaaagaaatagatatagttatcatgtagatggtgaatgtttatggtactaccacatagaacggctaaaattgtcacatgataaggatgagatgagagtgtgcttctggtaggatgaaccgggagcaaattaagctttgttggtcatcggttagctgacaacatttatgtgaatagtatccagagtactaaccaaagtatggtactccaaaaagtacagactatcataacttttagtagtacgtcactattattattatttgtctggaattttagtagtatgcgagacaaatacggagtactatgatacatgcatgattcaggctgtaaatctcagtgtaaatctcttccattatcttaaaacggcaatgcttccatttatctaaaaaaataactatcattagttataatataatattgtgctaacaatttgcatgatgaatttacccacagctttcttttcatcacagaaagatccttcttttcccacaactaatttggctttttgctaaaatttatacagcctatagtaagcctctgttcgctagttctggttgggaaccgatgccccatgcacggaaaacggagcggtcaattagcatgtgattaattaagtattagtatttttttcaaaaatagattaatttgattttttaaagcaattttcatatagaatatttttttttaaaaaaaacgcaccgtttagcagtttgaaaaacgtgcgcgcggaaaacgagagagaagagttggtaacctgggggaagaacttagcctaagctgtactctctccatatgcatagagagtttcagcagtgaattcaacatttcacattggaggcttggatagcaggtcatatttagatttaaattttatgttatcccttggttaattgttctaattttatttccaggtttactgatccaaattccacaacagagcctaaaattgctgtggtaatgtctaatacaactggcacatattaaaaaaaacatgactaataactctatacaaagtgcttatggtaataaaattttgaccaaattttattacaactttcttataatctaactaacttgaatttccatgcaaaccagaatcactccaaattttgacaggaaaaaaagggaagagtttatacttctcggggttttggcccaagttatcgcagcctaggcccaacaacacgggctgttctcactgggccaagacgggccgaagcggcccaagcccacgttcccgaagcctctccaccatcctagggtttgcttcccccgaagcacctatatataccaccacgcgccgcctctctcccacttcctccctttcccaccgccgccgccgccgccgaaaaagaagaagaagccgacgaggaggcgaccatgagggccaaggtaaccaacctccccgccgtctcctcctcctccctaggctgtctacgcccatgtgttgttgcgtcgtcgccgtgcttgttcttggttggtcgggggctgtgattacaaagagagaggctcgagtggtgaattttcacgggaaaccctagcgaggcggcggatctcgccgtgtgcccccctcctccccacgagcaccccgtgtgttcacggcggtggagtggatggaacccgaggtgccgccccatcgcgatgttggcttgggtatctcggtagttgcatccatggctcaccatgctagtactactccctccccgtccaaaatgttattgctacttcctccgtttcataaggttataagttcatttctgggggaggaatggatggcgcgtggtggtgggttgctgtctcgtgagggggtttcctgccacgatgaaggcttcgtttttaacgcatacacttgatatgagccccctttatgatggtattttttatgatggtatttggttggcgagctgaattcctgttcttgcaacatctgatggatggtgcgtgatatttgcttggattacccgtttgtcagttagcataggaaattaggtttatccattagatgctgaagatgctcattaattttgtggtgctcactgtttaaataatactccgtagtactgtctgtaggaaattataactattatatactaatagtagctgttaagttgatcagtaattatgtgatgctcactgtctatatgctattcctgctgtagtttcagtaggaaattatgaatgctttcaattccctgtgaacatgaaattcagttacataactgcattatcggtgattacctaagttaccatttcatagtagttatttttgtggtgcaaagcttatccagggaagtacatcttaatcattcattcatgatttgatagactttgtaatatgaaattgtcattctgtattttgtcaatctgtattgccattttgccatccatgatgcccctacttcagttggtttgttcaacaatgtctatgctggcattcttgaatcacccaagcaatgaatttaaatcaactaaatttgctgtgatgctatgttgcttcttgcttctgcgttccagtttctgttcacccttgtgttctttgagagaaggctactgtgttgtgatcttttgcagtttcttagctatgctaccatgcttatcggctaattttcatcagttaactttctgtgatctgatacttctgtttgtattgtattcagtggaagaagaagcgcatgaggaggctgaagaggaagcgccgaaagatgaggcagagatctaagtaggcgaaggagatgggcgatcatggtgatggcgtgtcgcagtgatccatgtcttcggctgccaagctcgttgatatgtcaagctgcttggcgtggtgccaccattcgactgttgaatggcttatttacctgtgctgttatcatcttatatccctagttttaccaagagttttgcaccaagacatgtcggttcagttatgtgaacttgttatggagccgtatttgctgctaatgtttacctaccgttgagtaattgctttgttggctctgtggtaacatctattgattgctgctttatctgttagcattggtgtgttgatctctgcgttattgcttgcttgatggtttcagtgtaggaatttccctggagacgctgatgctcagcctggacaggccttactttttctttagaagcttaacattgttttgcatgtctgcagttcttcggctggttcttgcttcctgtggtagcttgtttgttgttctacttagggcctgttttgcagggtttaacttccaaatttaactcaagagttggctttggagagcagcctgaaccctgctctctagtctatggctgtgtttagtttcatgctaaaattggaagcttgactaaaaattggaagtttgaagaaaaaagttggaagtttattagccctatcgtttggcctaaacagctaaagaataaaccaaaatttgattttgaaatgcttttaacataatttttttttaatgttggcttttaagttttgaaatgcttatgtgtgcatgtgatggaaaagtaaagttaggaactaaacaaagcatatgatttgagagcataccagtctgttctgatcccttttaaggcgaagctgaaacatcttggttctctagtttattttctgagaggtgcagctcaaaacagtttgatttaaataagccctaggagtatgtagtttggagatattttgcaaattttgaatttgctgttcattgcggttaagtaattttgcgtttatttcatatcgtgagcaatggtgtgacattggataggttgtttaaatctgttttagatgtagcgtggaaagattagatggaagccgtctaaatcatgttcatgaacgtatatttttcgtttatttcgctgctttcacggtgtttcgacctctgtgttctggtagcttttcttggtacgctgcgttggaaggatcagttctagctactcattgcatactgttcaatgttaacgatgcatattattgtggttgattgatgaattttaaactcagcgataatttgagggatataaagtgaacttattcatagactgaattaggcccaaatataaccgcacagcccatttcacatccaaatgtgggcccattacatggaggcccatcaccgtctcgcactttctcgcttctagtccccaatctgaagcccccctcgatggcatcgccgctccaatggacggctccgatccacccgccgccgcctccccatccgccgcagctgccgccggcgacgacgacgacgagcgagccgccgcgcccgcggcccagccggagcggtgcgaggctctggccggggccatcgcgggggtgctgggcggcgcgctgcaggaacacgaggcgtgcgcggcggccaccgctcggagccagggcgagctcgccgccgccgtcgaccggctcaacggaggtgagtgcgtgcctgtctctccgagccttccccccgcgacttccgttgctttgcttcctactgctgctgtgtaggctcgtcgactcctagggttttgtgtgccttttatggtgtaggaatcgtcgttcgagttgcgttgacgattttctgctatgtgattgattcgtagaaatgttctgatgcactaaggcgttagcttgcggcatacgtgaaccaataattaacgaattatgcttatagttcacgcattttgtgaattgtgctagtatcgagtacaatcttctttacaagctatgcaatatggacaagtacgtctctaattgtctggatattttgatactgaattactgatatagtcttcttgtttccagcattaggtagatattttcgtgtccgttcccgctgaacttttatctgtttgctacatggatgattggatattcatgttagttcaagaggatttcttttttggtttagagttgtattcaagtggtttggatgagttgaaattagttctatatttatttcaaaatcgtaacattgctaaagatcgtctccatttttttccttattgcaaaacttgttatgattggcttattgaaatagctgttaaactgatgcagacatgcagtacgatttcttgtgtggagttgaactagttcacggaacatgccattcatcttttgttattaaaccttgtagtatactgtacaataaattagcgaaccaggagatttactgactgtacttgtatggttcttagttccaatcataaattgaatcctcatttggttgtttgatatgtttatgattgggacttagagaggttatttgtatttaatttcaccctaaacatgaatgtatgaacttgtaaatcctagtaagggaattgctattatgaagatcaacatagtcagaaacttttgggatatccatactgtccatgcatgacaaagtacgaattcaattttggttgacctgcctatttttttgatctgtctatattcctcgaggtagtttatctacattttctacatctgattcttcctccggtcctcccttaaaaaaatgttgatatttgctcagtttgcctcacatcaaatatgttatttcaaaatgcggtttctccatggccctttgtacatgcactaatgaattatatgaaattacctttattcttttgcagaactagacaagctattagagaatgcaccctccccggtcataatgcaacaagccacaaggatttgttctattcgcaagagagttttagctctgaacatgctcctgcgctccatacaaagacgtatagataacattgatagaattgtttctactggtgtaacaagtggtattgctcttctacgatgaataatgtattggtctgaatctttctgtcaacactttgatgagtcccttatgattaacatcttgcattttgttcgcagatcattcttctcatgtacagttgcacagacagaattgaagttggattgaggtacagcatatagtccccagatgttggccttaataaaatatgctgacaacagattagtcctgatgaatcgaatagagatgcagagttgtgattttccttatttgctagtataatctagtgctaaaaactcgaacaattttatatctgaaatgttataagcctcaccaagtatcacataagaaatcttctctaccttataattgcatcttttattgacttgcatgctgtatatgacacccctgctatgaattacagggtttagaagatagtttccactgttaccccgtgtacacccgtttctatctgggagagttgccatttgaagttctactgtaagcaacattttcgtacgaagttgtgcctaaaagtgagagtaacatttgcagtttgtcctccaaatgagtctcacttactccatttctttttgccatttaatggagtgggagtaatatattggaccaatcttttttttttgttcgtactgcagactgggaaatgtacttcagatgtatcatttgcatttgtgaactttctttttgtgggtgaggaatcgtcactgcatatatcagatgaatgttgctccatcgacacatcgaagttgccaacaacgtgaatcaatcgattgtgttgttatatgttttctgttgtacctttctggccaaccttgttcccacatttcaaacaaattgtctaaattttgtttaatcgatgaagccgacctgtgccggcttgcgtatattcattgatgcggcaacgttagtgaaaacaagaaaatttagaatagttgttaattgattcatctagtacgttactatgtactcactccctttcaaaatataaggagttttggttagacttgacagtattgagatgtgtctcgtctaattaaaactccttatattttgggacggatggagtattatgctctaaatgtactgccagacgaggaaaatattgtgcgcagcgaaacaatctttgatttatcgtttcaagaatgcttcacttacagcctcaatgaacaattaacaatgatttctccatagaatagatgccgtgctctgtaacattctggcgaggcgtattcccaaattccaaacatattcgatcgatgatttggtacacattctggcgagggctattcccaaattgcaaacaaattcgatcgacgactccaaccagtaaattttacagacattcttgccggcagattgcaacctgatgtacaatctggagggttttcttccatgctccaacatgaagtgaaactgactcacagttaatggcacttgcgctggcaaactctagcgccaaccatatatgaagtcactactcagtaaagcatatatgaagtcatgactcagtaaagaaaaacacaccgaattgctcatagtgaaggttgaaccacagggaatgaaaacaatgtgtacagttaacaacaatagatatgaagattgaaccacagggaatgaaaacaatgtgtacagtcatgactcatagaatgctgaagtttacagggaaacaaaccaccacattcacaagcttcccaagaaacaaaggaaagaactaagcaatgaaaaagatatgaacctccagtagaggctctgaatcaaaagctgtacatgtgcgaatgactatctaggatttcctcttgccaatgttacaatcacatcaataaacttatctttctgtcaactttgcttgctgacaacatgagcgcgttggattttctatctatggttccatattacaaaggcatccatgtgctggctaagtacatggagaacctgcatcaatatagagattgtaaggagattatcaatccatgggaagactgcaataatctcaactagtaactgataattatgattcctatggaaaaccatatattaccagttacctgcatttctgttctcagaggcgcatgtaaccatctttgtgacccttaaagagtttcagatgtctcttgttctgagaactgctccgggccagtgcacggcgggttctccatgccgacacgtgtgaatacaatgaaggaaataagaaacaaagcagcaggatcaacaagatcacgacgcatattaacatgacattgaagaagccatctagatttgcagggtttttctgctcagtccatggcacaccaccaacattcatcccaaa

SEQ ID NO: 6382 - DNA, 24792 bp, Oryza sativa
aaaaaatgtttgaggcacattaccaaatttatttagagtttttatagcgaaaattaataaaactactacagtttgggaggaatatgttggtgatagtgtgtttggtttgctacattgccgaattttaataatgacaaaatttagcaaggttaaaaatagtatcaaagtgaacacacaagatatcaaaacacgagtagcaactcatgggcaatttaagataaaaaggagtgatggggcaaatttctagcataaaaacttaagagagttggtaagagagtaaggtttaaaaaacaactcgatctaaaggtaaaaccatttgcatgatccagatagccacattacattaaggtgcaaccacgcgtgcaccgtatcagtcatcacattgttgagagaacattcgtcagatcatcaaatgtaccaaaacaaacataaccaaaaaggaaatctccagacatcgcgcacatatatcttctgaatcaagaagatgttaattaattcctgcgaacacggctcctcctctcccacacttcaaacgccagagagggaaatgctctcttcagctgctggtacccttgacttgcagccacggcatccattctctcagatgggaccatgaactccatgcaagcttccttgagcttcttgagatctagcaagtcagctagacccagtatcgcagatacatgctccgtgtcgaggttcgtagctagaaatctctcgcacatgatcctgagcctctccaatccataccggtcaccggccttaagcaaatgcatcatcaaatgcatcttctcaccattgccaagatcatccattcttggaacacaatcggtgtagatgaaatagaggaaagcctcgaagacagatggctgcatgtcttggatggttatctcctgcatttgtgtctccttcttctccttcatcggtccacagagctgagcatgaaatactggagacctcgcagctagcaccgccctgtgggcacggaatgtgtcttctccaactctgaatgtcacatctgctcctacaccgtccttcaacatcttggcgaaatccgacgatatctccataggaggcacctcgatctcgcgcaatgccgaactagtttcagcgtcacacaatgccctggttttagacacttttggctcatagatgacagtaacattgcattcgatcacgatgcagtcattgacgatgaaccctggagtgctctcaatatcgctcctcttcatgcacttgagagaccccaaggtagactcctgaaagcttgaagatctgaacggggtaggcacatcggtcttggtgaacagctgacgaggttgcccgggttgcagctggttgatcagattcacgtcgacgagtgcccatggctcgccgttcttgctgatcagctcgaggtagacgccgatgtagcccttgctgtcgtcgtcgatgccgtcagggtagtaaagcaacgcccaatcgaatcctcctacgttgaagacgccggaccggatggagtcgtcttcggcttcggtgttcatcatgctgtaactgaagatctcgaacctgtggatgccttttgccgtctcagttgtgcagcttgatatgctcctcgacgccattgctgttgcttaattggtgtccaatgatgatcgatgaccctgcagttaatatatagtgcagattaacaaatagcatattttttttagataatatagaaacactaagaaagtactcagggattttttggtggatgtgacacatcctctttagaatgtgtcttagaatgtgtcacatccacccaaaagcacatatattatgggacggaggacattttttatatatattttatctttgtagtagtagtatagattaattggaaagcttatgcgtcttgggaattaatttggaatcagtcaaacatgtaaaggtactatatggcaagaagagtaagaaatcaggtgcagattttttcttgcgattataagaatttatctcttgctaaaacagccttacaaactcctaattaggcacaatttccttttagcattcgtagatcaatcattcacaaccaatcttgtccatgcaaaacatcatttggaagtgccaacctattgttcgttggtgagaaaggtaggagtttcaacaaattcaattttgaaaacttttgcataaacataatttacatacaattatttactttcaaaccaagatatatactaataattaaacattcactactacataaaccctaatgggtgccagttgggaatcctacgtaggtgccagattttccaaccggcacctcataggtggcactgatgaggaggaatcttaggtgccagtttaggaaccgacatctttgagagtcccgaatccaaaacaaaggttgctcgattcgagccgatgcatcaagcaactctccatcatccctaaaatcgatcaacatccaagaacacaattataaaatcaacattcaagagcaaaattaacaacacagaggagaacacaaagagggagttgagggagccaccgtcgtcgttgagcagccacccctgtgcctgtggcgattgagggagttgaggaagccgctgttgtgagtaggccgtcctcgtgtgcacggtggtagattcggccgcccccaagcacacggtggttgagggagttgagggagccacagtagtcgttaaatgggctgccccgtgcttgtggtggcggatccggatacccccgagcgtgcggcggcggatctggctgtccctaagcacgcggcggcggatctggccgtccccgagcagagaggaggagaggagaaggggcgacggaagacaggggaagggaggtggaggagagggggagggtcggcggaggcaaggaggtagcaaaagagagggggaggagtggcggaggcaacgaggacagaaaaggggatcggagagcagtgagaatggtgagagatatgtgaggagggcgagaagaaaaattaggtcagctcggttttcatcggctcggctttcacaaacgtgtcggtttttagaaaaccggtactcatatattcttctaggtgctgattttttttaaaaaaaatagcacatgtatttatatgtgctggtttttttaattaaacttgcacctataaaggcatgtcagtatcgttttttaatcttagactcatgtgaagattgtgaagaggttaaatgtgatggttttttagaaatctgcacacgtcccctattaggattttgtagtagtggttagaggtaaatgcggctaccctgcctagcacgccgattagggcctaatttttctccttacatatctctcgccgttgagagcccttgctgcatcggtggctgttagctaggtgctcgacggtgagaaaaattagggcagcagggactcaccatcaggcacctaaaaaccaccgaggtgatgactgcgccgatttttagaatattgaacatgcaagggttttttgcttgatgaaatatagaataaagtgctcctttcccttgtgcgcctgttgtagcttgtagacatatggcaacccagcagtccaaatttacttctaatcgctaaccactagcagtttatcctcttgacagttttggcagccttagttgtattaacccatttaattacttgcttttgttgtcttcaatctgatgtggtaatagcagtgacattctactggggacatgtgccaaacaaagaaccaataatccccttgtcagaagggagcagtaacagcagcagctactgcccactgtcgatcaaccccgacgagctcgacggcaatgccgggctgtgcggcggcgtgctcccgccgtgcttcgggttgtgctccatggtgggcatgggcgccaccggtgtagtctaaaaaggccgatcagctcccccgcacgcgcgccgtgatcgccgtgaagaagctatggcgaccagccgccgcccaagcccccactccggcggcggcggtggttgtggacaaggacaagccggtgttcagcacgacgccggactccgagtctccgactacgtacgcttagctaggagcaagctagctggacggccgcaggcccaaaagacgtcatgcctctatgcaatctccaagaagaaaaacgatgactggatcggagatttggtctcggagacaaacccgcaaatcacggcgacttttgtggaatagctcgtggcactatggatcgcagtccatggcatgcatctggatgaaggagaaccagaccaaatcacatggaagttcacaactcacgggtagtactcggcttcgtcagcctacaaagcacagtgcattggcacgcttgacacgacctttgacccattaatttggagagcttgggtgtctggaaaatgtaagcttcatgcatgctcatcatctagaatagagtatggacctctgaccggctcacaaacaggggatggcagaacaacgggcagcgccccctctataggggagaggatgaaacggcgtttcacctcgttgcggaatgtcgatattccaaaaggatttggagactggtagcggactgggttcagctcaatctctggcattgggagatgacccagacaatcaaagattggtgggaaatgctagccgcttcggcgggcatccccaagaaggggttacgcaccctgatcctccacattgtttgggaaatatggaatgtgcgcaaccggcgaatctttgagcacaaagaggccacaacattaatgtacctcattgcaaaaataaaagaataagctggcatgtgggcgttagcgggtgctaagagattgcgcgagcttatcccgcaccttgtatagtgtacagtttttggtttttgccttttctttgcccctaggggctgtatttttctcccactatattcaatgaaaaggcacactctcgtgttggttccattaaaaaaaaagagcaagctagctgtgtccattttctttcttctttcttttaattttctttcttctttctttttttctgcggtgcatgttaacacggccggtcctaacttttcagggccctagcgcgaaagtaaatatagaggccctttcatactatataataataatcaatagatacatatactgaattattaatgttaacatttaaattgcatttagaaataatatttatataaaaaacatatgttacctcaaaagttattatagtactttaactcatataaattacactacaaaattacaaatctaaatttagaatcttaccaaatagtttatcgcgagcgtccagatgcgcaccgcaaatgagccggaaacacaactagtgccttcgtcagtttgtccaactatcgggacaactgaattgccctaatataggactatacatcagtacacgggcacatatatagctatttacatgttaacagatataatcacaatgttacaaaattagtgatgatgtattgatgtattggtgttgcactcacctgaatagaatcctccttgtccaatctcgagggggcagccgggagccggcggcaggcaaccggcagcggctgcaccagcacctcgtggcctactggctactgccgtcgcgcggagcagcggaaaacgggaagccgtgagccgcggagtcggcgccgatgcgtggcctctggacctggggattgcacgcgatttcggcgccgtgaggaggaggagatcagaagacgtgggcggcaggcggtggcaatcgcggcatggcgcgtgcgccggtgcgcgttctggtggcgcatctgttcgccttcgggcctacggccttccgtattgggctaggcctgagcctgaggacccggccctgctgcatgttaatgatttgttcatgtatgtagattattctaaaaaatgtaagaattttgagcttgtaacaaaccaaccaaccaaccattttctgtaaggattagacatagataatgtagattaatgtaagcaatttgaaagcatgtgaataaacagcccactcggttaattactcttatttatttatccgagtaggaaaattaagaatgaaaaagatgaacaggattaaaaccaagctttcgaaagggccatgtgaatattcatattctccaatccaatattgcagctcctatttatttattttttggaaaaagtacgaattatcgccccccctgaactattgcggtcgaccgaattacccctctaaatccgaaaaccagatattactcactctaaacttttaataccggacgaattaccctcctcaatactgttttgagcggttttgaattgagcttgcacacgtggcgccaacatagcaatccagtcagccaaaaaaaacccttcttgggcccacctatcatacccccccccctctcctcggatgccacccagccacagcgcgagcgccaccgtcgtacagggcagcgacgaccctcgccgcccccatgggcctctcccccactaccgccgccaccaccgagtcgttgccgttcgcgcccacaccgcagagaggaagccgagacggacgaactgtccacagcaggcggtcagtgggcggcggcacgagacgaggaggaaggaggagcccgcgccgctgcgatagaggggaaggaggatcccgccaccgcctcactccacgtcccaccgccgtcctcggttccttgcccgtcaccctgccttcgccccctccggctgccgtcctcggctcctcacccgccacccgcacccgcctccgcctcgaccggctgccatcatcggctcctcacccgccacccgcagccgcctccacacccgcctgccgccggcctcgactcctcgcctgctggtcgcggccgcctccgcgcactcgctccgcgccggcctcagctcctcgcccgccgcccgcggccgcctcctctgttcaccgagagagaaaggcagagaaggagaggaaaaaaaacactgacaggtgggtcccagcggtttttgctgtgtgtatcgccacgtgtgtgccacgtaggcttaaaaccgctttgaatcaagttagggttataatttatccggttttaagagtttggggtgtcaaatgtccggtattgtagtttagggggtaaatcgtactaccgcaattgttcagggggagggataattcgtacttttttcttatttttttaacgactcgcataagacggtgcgaaattttattgatagagcagaagaaaaattataagattaaaaccatgggatgtaaaggaaaagattacagctcctatttatgggccatctaacttaagaatgagctagctagcggagattgattcacggatcgccacccaaaatcctgacaaatcgaatcaggatataacaaagcaggcaagaagattgtttttcgtctagatttacactgctagcagaaagaaagtaatcaatcaacaaatcatctatcggcagcaggcgtgtggagcaacatccagcgatccttcgagtccgggaaggcacacgccgagggcgaggtgaattatatatcatcgttttgattgattactgcactttttttttattgttgttgagctagtgatggtggtggtgtgaggtttgtggatgcgcagtaccaggcgcgacgtgcggtggaggcggtgacggacgccgccggcgccatccacattccattcaaaattttcactgttatacctctcaaccacctttctatcatcaaccataaattattttataaagtttatagtaatttgttcttaaccataaattattttataagggtattatagtcatttgttttaaactttaggatatgccaaacaaccttaaaaaatactccctccatccacaatagttatacatattacttttaacaccaagaccaaggagaaattaaatcacctcggatgttgtaaaatcaaggagtgaatacaagcatgcaaccaatgagtatttagatgactccttgggttctaataaaacatttaatttatctcttcatttaagtcttgaatgcataaagactacaaataggaacaacttatttgaaaaaaatcaaatgtgaaataggtgtaacttttgtggatggagggagtaaataatttgagacggagatattacactgcaatacggcccattggtgactcgaatttcttggcagtgacagcctagggccgtgggccgtatgcaagtgctagttgtaaccatcaatcagggaagtgtattagagcaagtatcatagtaggctgcaagtcacttataaatatatgcggaaaaaaataagtcaaatataaacacatgcggaaaaaaaataaaagatgagaggactacagatttgtagcatggactttaatatgttgtgtcaatggcagatctagcactaaaatttagctatggtggatcatcacaccagaactaactgcatggtattttaaaaatgaagcaacattttattatacacaaactataatatgtcagcacttattagaatatatgccattaaggatgattataatcctaaatttgtcatgcagtttttacaactgaagccttataaattcgtcgtataacttctacaactaaactacatttccacgagtgtttctctgttttgttttctaggtgtgtttattcataataagtagacattcattgaagttacacatatattctttaacattcaatttttaccgattaacattttgttgttagctagatttgttcattcatttgtgcagacacaaggcagtcccactataggtctttatctcctgttaattaaacgaataagcttgtaccaaatgaaatacaactaactaatcacataattagcatctgaaatcaaggctgagatggccatatgctcgaatactctacctactttgggcatggcataggtatgactggtgccatcccttgccacgagagaacgccgttgtgttgtgtgtgtatgaaagatgtaatcatatattataatagtgtaatatacacttataagtaactatattttatggataagctattagattgactatatataatttggagctaataggtgactattctaaacttctctaatcttttctcgtgagaatgtagactggtgagcaggtggcgcaggcggcacagaacgcggcgaccgccaccaagggatccgccgtccaggcaggcatccatccgtatgaaaatctgaatatatcattcgactgagcagtgaaggtgaagcattgcctggctgaagctgcattttacgcgccttcgttctctgtttcatgtttctttcgactaacctggttgtaacaaacatatgcatttgtttgctcgaagattccgaaatgttgtcacgctgaacaacattccacatccgtgataacagtttatcgcatgacttgcactgtaatttttagcttccgccaaactgtatttcttggggtacattttactccaagtcagttttagctgataactgtatttcacatgctagatgtagttacatcctagctaatatactttcaaatttagtttttgctaatgaacgcaacacttcccgaagcaactttgttagtaaaattacatttaagaaattagtaaaattggtccagttaaactggaaattgaggatggtagtcaggttttacataccgtttcgagatgaaaaccagtcccattctgcttttaactaaaacaaaatggctttcaaaaccgatcgaaattgtgaatcctggtgtcagttcccaagagggacaacaggagatttcctaagggcctatttgttagagctccaactcttaaatttagctctaggagttaggttagggtggagttatggagcagcctaaacccagctccccctctggttcattttgtgacagtgctccacccaactccactcccattttaggtggagttgaaattgtttggttaagctccagctctagataaggtggtgccggagttggagttgtgccaaacatgccctaaaattagttgaatggcagcagaaaacaagcggagacaccatggaacaaaataaaatacaccgctaacatggacacttgcagacatcaacgaacatggtatgaaacaaaaatacgagaggttcaactgactgatatttcagatgtcaagttttcaagcaccgtaacaaataaaatcagatcagtacatcatattataggagagatggcacaatccaggcaaaagttcttaaattctagtttcatagctgctttcatagcaaaacggatctagttggccacggcagctctcttccttggggtagcctcagtacctgaatcgatagaacaaaaggaacataatgaatccaaacaactttgctatttttaacgcaattaacatttcccatgatatttaaaacatcagaaaagtttcagacaccttctctgaagttgctcttgaacctcctaggcacatgtcgcatgtacctcatccttccggttcctgtggtcttgcgcctaatggccttcacgctccagttgtctgaaatgacatcgcagaaattaaaactaagcaaatccaaaaagacaaaagaaattcaaccacagaatctaactagagatttagaggctaaccacaaacaatacaactcaaactaagtatgttttcatttaatgtgtatttggtattaaatgaacgatgcaaggaaacatatatgcaatgatacgaatttaaatggttacattacaaaccaaacaactcaaccaagtactggctaccatacattaaacaaggcagcagcaggagcaagttgacataatggtgaacagaatgacaaatagaattgccatatgtttgaactgaaggttgaaaaagagcaaatataataaaattgcctgatctcagaaaagaaaaagaaaacagaataaataaaatataaggttagaggatatgtcgaaagaaaacataagaaagggaaaattgagtacttatagaaaaaactatgtgcattgggtacatcagagacttaaatacttaggaatcacaggagcatatctcccatcatattgttgcagtttttctctcatcacttgagcctgcctcatgacagaagcaggcaacatggaaatacataaacacagtgaaggtacaaaacttcaaagtgttacaaatttccaaaagtctaaataaccactgcacaaatcatttaatcaaatgtgatagcctgaataaaatataagctcagaaaatgaaaacatcttctcattgatgccatggcatctctgaagtctgacatgcgaaagttttcatgattcctcatagcattttttttgtaagacagcaaaatcatttgggaaatcaaatgcaaagaaaaaacatagtatttgtgatcaattacgacatatgagatatatcagtgcttgaattttgtacgttaatactgaccgttttcaagagcctttcaaaaggaaaatatgtttgaaggatcatcagagacttaaatacataggaatcacaggagctaagctcccatcatattgttgcagttaaaacctcatcacctgaccctcataaacagaattaagttttcatacgaaaatggtcatccttatgttttccaagcaagaattttagcttataatcatttgtgaaaaaaaacatgtgtacaaacaacacattaaattttgttcagttaagatcaacgcagccgagcaggtaaatcacttgtcaggaccacagatcaaaagaggatggataatgcccaatacatacaataaaaataaaaatgagaccaaagttttcttcatttccatcaaaatgccggaaatgccacgctctacaaagagggttcaggtaggagaacgcatctcagcttgagaagccccgatttctacccattaattggctcatctaggcgcagtataatcatcatcaaatctacatggcaacccaaaagcaaatacaagatctagtggggaaaccgaatcatgaggaggaggcttacacttgcggatgcgggcggcggggtaaccgcaggaggagcaggtgctcttctggaggtggaagctgcggcggccgcagcggacgcagagcgtgtgcgtcttgttccggcgcttgccgaagctgcccgtacccttaccctgcgagccacaacaagatcaccacgttagagctatggagaagccatgaggaggccgcggcggcggcggcggctgcgaggtttaccattgcttgatctgctcctctcggctagggttggagaatggggcggctgcggcggcggcggtggaggcgtgcgccgtggcgtaaaaccctagctatttatagggagcaagggagcagcaatagtgggcttccatgggccgttcagaacaaacgcaatcgattgggccgcacgtaagtccaaatcgtaccgcgcgtaatagaaatatgtttactttacatccctcatgtttgacgttgagtttgaatctcttcccttaaccacagcaccagatataatgtgtccctcagtttgtaataccttatctccttttctgtttcttttaacgtgaacatgtaaattgaaagatatgttatatccggtattacggttcaataatgtattattccaatattaagaattttcggttaatcttacagaccttgcgattgttgagtcgtcgccacggcgacggtcggctattaaaatatacgagcaactcgagcttgtcagagttacggataaggtataccctctatccttagatatacgttgtatactgatacggtatacccgcgcgtatacggatattttctgcgtacgttaaggaaatctatcacgtgatagaaacggagttcacagatggaaggagtcctactcggacagaactgggtcgttgccatatcgtgaggggtccgatatctccgagttatacttggagaccaactgatccgcgatataaaagggaccccctgggcaggactgagggcatcaaatctcaccgccaacacatctaccacagcctacgaagccgaagcctacaggagccaagtcgccgggtgatctagtcgaaccaactcgattacggtctcgtcggtatcatcgagttccattattccctttgtaatttgtgatttccatcatataatcccataccaactggattagggctattacctatcaaggggcctaaaccagtataatcttgtctttcatttgcttgatgtcgtattacgtagatcctcgttccaacataccccaatactctctatatccggtctacgggtatcccccgtcgacagagctgcagtgtcggattattggacactttatgccggaaacacgaacaatgatctaaggtagggggcggctaaaataaccgagacgcctacaaatcgggcacccattttttttcaaaaatcatgcacggctccaccaagtagatcggaattatttcactaagtagatagaaaatgtttaaatcgtttaaaaagctgaaatacaaccaaatcacctcacgaaatattttgctacaacatatgaaacaacggtttttgaagctgtttcaccgtatataaaacacaatgtttcagcaaatagcgaaaggatgtttcaattcaccgcaacacttgatctatacataatgaaacaacatgagtatactttctgaaacattactggtggaacaaaaaatgaaacggattcacttaatatagcgtttccgtgatatgtggggtgatttgttgcaacggcacatgtggtggggcgcgtggtggggacgacgcgggggcgcgggagcgcgcacaggaggactgttgcccgattttttcggcgtggaggcgcggtgtaggcacgggcgcccgatgcatgcgcgcccgcatcgggcaccccgatttaaagaatttttggttaatcttagggaccatgtgattgttgagtcgtcgccaccatgacggccggctattaaaaggtacgatcaactcgagctgcagtcagattattgcacactttatacaaaaaaaacacgaacaatgatcaaaggtaagctacacgtaaagccagtttaggtaggtctgccgagagataataatattattatccccgaggaggatttcacatagtgcgagacgcctacaaatcgggcgcccgatttttttttttttttttgcaaaaaccgggcgatgttccaccaagtagatcagaattatttcactaagtagatagaaaatgtttcaatcatttaaaaaactaaaacacaaccaaatcacctcatgaaacattttactacaacgtatgaaacaacggtttttaaagttgtttcaccgtatataaaaacaatgtttcagcaaatagcgaaaatatgtttcaattcactgcaacatttgatctatacataatgaaacaacacgagtatacttgctgaaacattattggtggaacaacaaatgaaacagattcactcaatagaacgtttccgtaatatatgggtgatttgttgtaacaggccaacggcacgtgtagtggggacagcgcgggggtgcgggagcgcgcatggtaggcacagcgcctgattttttcggcgcggcgttttgaaagtttttcataaaataacactgattttttactttttgaaaaacctttcctcgttagtgttgcgtgtccatttgtataagtaacaagcatccaaatgaacaactcatcggagtgcttgacgtctccaataaccaaccgaccaattgtgttccatcaaattcatgtgtaatatacactatacttaaaagtgtctaatacataatttaaatataatatatcctcatgtacataatatgcactctgcttaaaagtgtaatacataatttctacatgattatatttatacgtaatcggaaatggaccagcgcagctaggcaccacacatgggaatggtgcaaaatagaccctaattgatacacatcacgagacctgtatacacatctaagcatacactactcctagtctgtgccagacgctcacataagcaaaggctatgaataaatatatgaaccttgatgaatcctcactaaaagttcactcgtgtacatgattgtagacactagattttaaacccagattagaggatcaccacacagaacatgtttccctaagcaaaactaattcatttcatactatttttcttagataatgattcattttatactatagccgaacttttatatatttgatcaattatccaaatcctagactcacgcgggtaagcttttcattcgaaaacaacagacattaacttctaccccccccctctccctcctctctctctgacttatttttgataagaaaaagtaatgttgcctggatcaactgttatatttggtggggcattggatttttagggatgaagataagaaattgagggttgaaccaatgaactacttgctttttaatatctgtttagttcatcggatggagggtgacgacaaggtgaggtcaacaacgacaacagatgccccttgagcttccagatccggaatctgatcgagccctccctcctcttgtcctccttcctacctgatttggtcgagcttgagctcttgggtgccagatttgccacgtggcggtgctcgtgacctcagatccagctcatcggagttaacaaaggtggaaggagggcaccaacaaaccctagtttttggtttgggggagaaatgaggaggaagacagggtggtgaccggtgacccatcgcaaccccttgcccacacgagtgtaacgtgagttgcgcaactgcacgcatcgagccagaacaagtatccaatcttgattcggtcattcctgctcaagcaggatgcgagggattctttcatcagctaggcctagatctgggacatgtgtaggtaaccaaacaaggagccagttgcacctggaagatacaagccaggttgatacaagcaaccgattatgcccttaagatctagtctctagttttgtactccatgtcaattcccactaactctaccaaacaagatattataattatttttttcatattaatatcgttacctgttcctcttttatactcctgccaaactaagcggtagaagcctctactatctaccctatatatgcatcatttgtgtaatcttagaaaaataaagtgccccaatagtaaccccacacatgggttgcgcgcctacacacgtcgatccaggacaagtaatgaagttcgattcggtccttcttgcttagcttagccatggggcttttttttcatcggttgtgcttgactcagatacgtgcaaacaagcaaacacacccttaagatctagtctttatactccatgccaatcctcgtgtaaactctcattcctcttctcccgagttaccaaactaatccgtagagacctctaatctctatcctatacaggacgtacacgtgcgtgggtacacggtgtgaatgtggttttgtgtctatatgcatcctctgtgtaaaccttataaaaagaaaagcgccccaaaagtgccccctttgtgtgtaaccttaaaagtgtgcctggtccacacggctggaacggaagcgtacgaccgcaccggattgtattgaccgaccccgatcccacgcacgcacgcacgcacccaacacgacaaatccccacgccgcagtggtgcgccaccacccaaccccaaccccaacacatccccacgcccacgccacccacccctcttctctccccccttcccgcttccctcgtcaaccgaatcaacgcctccgcctcccatccctcgccgccgacgagctctcccctctcctccccccctccccacctcgccgtcgcggatcgccccgggccggccctgaccgctcgatcgcccgccgcgcgccgcccacccccaccccccgggatggttcacagggcggcgtctcctgctcccgcggcggcggcggtggcggaggaggaggcgtgagccgagggggaactggagctcgagcgagatggatgccgccacgcgccccgccgtcgtcatcgacaacggcacagggtaaggcggttgttggttggttcgtttgtttgtttgtttgccccctctcgcgttgtgctctcctccggttgttagcttcgctgcgtgatccgtgcgcggcgtgcgcctagctagggtttttccgcgatgggattggctgtgctgtggattcggcgaggcgagcgtatgtcccttgtgtgttatggcgatggattgcctgtaccgttgcgtgtatctgtggcttggattattcagtcgttcagaggtttcccatttcgcgtccttgaggttctagtcaatcagtaggaactccacttcatatagttcagaacttcggatcattggatttccgagtgatgctgtgttggattggagtgccttttttgtttagttgcattagttgcaaatggaataggattgggttcatgtttggggtgtggggatggaacatttaaggttaactccctaattagccaggacatgatgcagctctcatgactgacgggtttgatttagtgtctgaaaatatgtcttacttgaagcatcctgattcctgaaaagctaaaaatggtagataccagaatcgggcaatacctgaagatactgaaatagagtaaaacatatataaatagtttgtaggataaagatgtttcccctgaagctgtgtcttgatttatctgcaattgcttgaaggccgcacattgtcaccccagtaaggttatgtttgattgttttcttacaccatcttgcatgatcttatgtttaggtatagcaaacttggattctctggtaactctgagccatgtttcaccatccctactgtagtagctgtgaatgagtcttttctggaccagtcagagatgtgcagtagtgcaaattggatagcacagtacaatgcaggtgtcatggctgacctggatttttttattggtgatgaggctctatcactatttaaatctagtgggctgtacactagaaaacacccaattaatcatggtcaggtatgtttatgtgttttctgtttgtaataacaacaattgtttatatttctatgttatacgactatagtatgtcccttttacccttttgcaggttgatgactgggatacaatggaaagattttggcaacagtgcattttcaactatctacggtgcaatcctgaagagcactacttccttcttaccgatagtcctgtcagtacacctgaaagtcgtgaatgtgcaggggaaattatgtttgagactttcaatgttcctggactatatatttctgttcaatctgtcctcagtctttctgctggatatgcctttctgaaaagtatttctgatgaggactcggtttctgtggtaggttctgtaaacatctgcttttcatgctttttatttgctccagtgagacatttgtttccacatggactgcatctccttgactgaaaagaattttctgtattacaaaattattgtaaacttgttttaatgacatgtagccctgctatgacaaactctgtttttgctccctttctttaagatatttaaatagccacatttcaaaaaaaaaaatccagtctgttcctgccatattatccatagatatttgttgcctgtgttgttcctagaattcctattcttgtatgcagttttgttttgctattcccttgtatactggtatgcaaataaacatgttctgcatattgtgttatatgcgaagagaagtatatatttaagcaatatgaaagacagataatactgattgaagcactatgagaaatcaacattaatacaatatgactgtgtaaatttagtcttttagttgccagtttggttgaggataaagatctgtagttcctagcaagccagtaccaaccttgcaaaagtttgaacacccataattcatatctgttgggtctattcatgctcccttttaattacatgcccttaaaatttctggtacaccatgctacttattattgttaagtttgaccagtatattttgtcagtctgatatgacaggtgtagtagttgatattggggatggagctccacatgtggtgccggttgtaaacggctacgtaattgggagtagcatcaagtcttttccattttcaggaagtgacgttacacagtttgttttgcagcttttacaggtatttcatcttctcctcataagtcatgttgttcataaacaggatgtgtgtgtgtatctagcattcatatagtgcaaatacattgaaaggagcatcgagtagtttttacagtactaaattagaacaattgatactattctcaatgttctactcagttttcatctgtaatttgagttatgctgctcccagatctttattgcctctataattagttgtggcctgtcacataatgtttttagtgattaatggcatcttttgttgtgcaggaaagaggtgaacttattgcacctgaggattctttggatatagctcgtagggtgaaagaaatgtattgctacacttcttcagacattgtcaaggtattatgctgcttggtttcggagctacttactcaataataccttatgttttttagggtaccttgttgtaattttccaacggtgtacataaatacattctttgatgaaatagttgaaagtgatgtttctgttgaagtatctgtatatcgactatcgagtcaacacaacaaattccatgaaaggaatggtgtgctgtatttttttttcagaatacgcaggagataatggcgtgctgtatcatcctttgaattttaaatgcgaaacaattatgtttgaagaaacaaaaaaaatgccaactttgttgtgaattgtaatttgttttgttatgattatcacggattagttaatgcctggagaatagcccatgggcaagttgcagcatgattcggatggcagagattaaattttttgtgatgttacttttgtcatggatttatctgctggctaatatatactacatatgatattattattctggttctaccagcaagattgaactgtagtttagacttatcttgaacagataggttattatgtgtttccgttacaatttcaggagttcaagaagcatgacaaaaagcctgataagtatatcaaacactggtctgctattaagcccaagactggagtcccatacacaattgatattggatatgagcgttttcttggaccagaggtttgttcccatttctatcatctagtttccatgttcttttagtagtgttgctacaattgacatgataccaatcatgctttgaacaggcgtgctaccctactgacgtgataacatttttacagcttttgatgttataattgattgtgtcctgtttgtttgtctaatgtgctactccatgaaatcatgtgcattgttggaatgaactgaaagcccatgttatgattgaacatgtatgattagttggaagagtaattctgttctctagggcattcagtattagtgaaagtccaggggcttcaacacaaaaaggactaataagaactatgggtcaaatgtaaattttgtgttgatctgataaatgcttcctccagaagtcattttattgacatttggactcttcaccttgaaatgacattaaaaggagaaaaacatgaatttgatgtaatttactaaccttctactagcgcaaatgcagatcttcttccatcccgagatttactctgccgacttctccactcctctacctgaactaattgatagctgtgttcaatctgcgccaattgacacaaggagagatctgtataaggtgctttgtttgaactctgggacacatctaagaatgtgacatatattgattatgtgatatttgactatttgcagaatatagtattgtctggtggatctacaatgtttaaggacttccacaagagacttcagaatgacataaagaagatagtagatgagcgtgttgccgcaactaatgcccgtcaccatgtggaggtgaaagtaagtacaacgatgattggttttgagttcatacggcaatacttgaactattccatttgtgttttgtctcaacctgttgtctcaggagtctttgttgacaattaattgagtgtttcgttcgtctaatgttttggttccagcctgttgaagtcaatgtggtcgcccatcctatacagagttatgcagcttggttcgggggttcagtagctgcttctaaccctgaattttatgaggtgccttccactttacactctttgagtcttgacacctcattctgcaaatttaataatatgacatattctgccatataactttgttaataagtcaataatatgcttcaggtcaatgcaaaccatatgcactgcacacgtgaataaagtgataagatggaatctaaagtgtttgtatgttctctttcagagttgccacacaaaggaagaatacgaggagcatggagcaagcatctgccggaccagcaccgttttcaaagggatgtactgaattttttccacctgtccaaatctctcagtaggagttcgtttaggtttcaccagatagaaatatgtagtcaaaattgattctttttggcccatccaaagcatcgccggggccatcctgattagattggtagctcaggttgttgttagctctctctgtgttcatgctgtgtatagccagcagctgctgttcctctgtttctgttcgaggtgcatgtttgtagccaaaaccttgggcagcgaggccttttcccactttctacatactcctatttcacaacattttttttctacacatctttttttccagatatatattcatgatgaagaagtttttgctaataagaattcaggttatgcattggactgttgttaagctgaggtaattgttcgttgatgatattgaagactttgaaccgtatgacaaaataccctttctgatcaatcaaccaagtgcatgtatgttacggttgcaacgagccaataattaccgagagacgattctatcagaaatgcagatgtgcataaaatttgcatctgaacaatccactcaaccataaacgaaaactttagattcagttgtagtatcgatcatgtggtctatacccctaaattttaaatcttaatatgcacaacaaaaaagacaggagaagcctacagcaatttacatggatgaagctggctctatgcacagcgcacagcctagagtggagtttcagtgatcaactgttcaaaattacatgatgttctctctgtttctcatggaaaattggcatgacgtggattagcggcaaaacagggtgttcatcaggaaatcctcaagagagaccaaccttgtagttctcagatccagcagatgattttaatcctcagaagatcagattttctgtccaccagatcggattctggcatggtggcaataggagcctgatgtgtatcctcaattcaccatatctagcgatccggaccaaattcagatgtttgagatgtgatagcccccatcatggaaacctgatgtaatcaagaactaatgttttggccggaaccacaacggtcttgctaagcacgaagagcacaagtgttaattcgagcatcagaattgtatttaggaatgtccgatcaacgatccagccaaatatcgtgatgccacctgggttgcccagaagatacagcactgcagtgaaacacagaagaataaaaaaaacataagaatcaaacaggacacccaaaaaaaaaatctgtatatgaaatgttagctttaacacttaacaatataaaagaaaagaatgtcttgtaaagtaaggtatgcattaattccaagttatcacaatgaaaaaagattaagcaatgcaaacttcaaatggaagctttagatttactaaccaagtgattccctcttgtggtatgaagacatgtatgaagccaattgagctgtgccatgagaattgccttgtactgagccactctccagagactccaaatcactttctgaaaagtctctcaagaacatatgtgctggaaaaggcacaaggttcccagaactgtttggtgtgcttacataagtagaatcactagagcatgttactaaggcatgccatcgactagccagtgaagcaatgttttgagctctgtgagaaattttagcagctgcatgcaaacaaaggacaagaccgacaacttgaacaacggaagagacctgcatcataagagaaatctatttatgatctgttttgtttttaaacataaccagaagggaacattatgtgatttttaatattgtactcacagctatatcaccaccattagtgaaattgattggtccagtatatgctgttgtcttgaacagaatggcaaactggcttgctgtaacagaaaagaagagcagcaaaaggaacatgcggaacctgtgactgattttggagagattatgacgaagctgcaggtgctcttttaaatagaccaaaggatctgaatcttgttctagaagttttccatagtcatcgaaatgaataacttgtaggttgcaaaccaagttgaaaagcatgcaggaggttaatataattgtggtcagatacatccatgacatgatggaagcaaacagtacagcacatgatctccaagtcgactcttggaagatatgggagaaacggaacatttctcgtgtgaccttcacaacaaagcatggcaatatccaccacaaaattgtgctgaagaaatcctgccatagagattgaaaacacatgtcaatatggcaaacaaaactctggcatatcaaataacaaatgcatggttattaccatcctaaacattaaattttgcaattaaaacatccactagaaaaataaagcatgaagcatcacgcaaagggtgatagcagtttcagccagaccatagacctagcaggacacagctcatttttatttttaatttgtcttctgttccaaaaagaaaaaagtacagaaatcagagtgtgcccatttcctaaccaaacattgtctattgataacaaatcaagtatggctttatgcttcaattgattcctcccattagaactgctaaagacatatctgaagaaatgtgagtcttccagagcacgattctttgttcagcccctaatgacgcgtcttcatgtaaaaaaacacaaacaggtttgtcggcacagacaaaaaaagtgacctcccatgcacatgacatcaactcacatgggggcataagtagaagtagcaacatgcaaatgcatatataactgagagaatcaatcaccgcagttcacccttcactgaagacaatcccatgaatccaaggtgctaccataataaaaaatgtaactccatacaaaagatctcgtactaaattacaacctagatgcaagcacaagcttacaaccacagcctcaaaatcctccaggtttcctcaatgctaaacaatctgaacatcacattccacctgagtccacaaatttctccttcaaatgcacaagttgcagtaaaatgacacctactttcatgccataatctagtagtggagtagtaattcatcgagaaaatgtcttaactaaatataaaacaatttagcaactactcctcactaatcactatcattatctaaaaaaactcgctaatccctatcaattgaagtcaatgactaggtgaatttcagtgtaatccaaaattacatcgatttgaaggcggcgagacatcaccttgatcttagcgacgtactccttttggaagcggatccgcatgccgagctccgggtcgacgaagaggaacttgcggaggccgtacatggccatctttctcgacacgcacgcgagcgcgacggccgcggccgccgcctgcgacagaagcacgcacacctggaacacctgcacctcgaactcgtcgcaacccctcccgcgcccgcggtacggggagagcgccaccgccagcgccggcagcgcga

SEQ ID NO: 6383 - DNA, 19498 bp, Oryza sativa
tgctactggtacgaaaaacatatccatactttctatatagttgatacccacaaacaattattagaagctaaagctcaacatgcaagtataccacatcatcacccactagcaattactattctagcccatttaaaatcctatgcaagcatgccacatattcacccactagcaattattattctagcccatttaaaacccatgcaagcatgacacattatctacaatattacttcctctgtttcataatataagtcattctagcattacccacattcatatagatgttaatgaatctaggtacacatatatgtctagattcattaacatcaatatgaatgtggaaaatgctagaatgacttacattgtgaaacggaggagtagtatattatagagatcaacaagtatgtgtcaaattatcttcctcacattattttctcaatatttcaagtttcatcatttcgataatatttaacatatacccatctataaatcccgcagcaaagcgcgaggtatcacatagtatagttgatgtttgggccaaaactgaactaaactccatattggggcggcagatttaatttgggcccaagaaactgcctaggcttgggtccctgggaatgggctggccagagcaatatcagaacagaacagggtcacctatatatttgcgacaaattttctcttaaaaacttgacatatataattatagtacaatcatgatgtaattacactataacttgcatgtaactttcaaaaatctctccgtaacatgctatttcgatgaaacggaggttgttggaacaaatcctcttacatgtgtgcgcgtagtgacctttttccttcttcacttgcataaatcttgaaactaatataacggtggaaaattatgtgcaagttatagtgtaattacactacttcctccgtttcatattataagactttctagcattgcccacattcaaaaggagggagtacgattgtagtgtaattatatatgtcaaatttttgggagaaaatttgtcgataaatatatagcaaaattggaacaaaaatatgttgaaacacaatatgtatacatgcaacaccttttttttatccgactaattggtatacctccatctcagaataagttcacctatatcaatttccatatacaaaagtgaacttacagagtagacgaatagacgtacacacgcgcgtttaccatgcaccactcgtggacaagtttggcacggaagtcaatgttgtgagaaaactatttcatacttcatcaatcccaaaatgcaaccatttgtatgttaaatactaaggttaagggggtccctctcagtcatcttattggttaaattttaaattttgaaaatttctcagactcatcttctaagcatagtatggatttcattccactttcctatttcttttcttaacaacaacttatctcatcaaatactacctccattctaaaataattgtaattctaggttgtttggcatatattaagatttgaaaagaaaaactatgatatccctcgttaaatggtatatagataaaagtgagagggtggttgagggtaaaacagagagaaatttaaatgagaagtgattggtaagacaattagtactatattgtgacaactattttaagacaaaattgaatcctagaaatacaattattatgggacataggtagtatgtcgcattttcaaagtcattaatcgtcccataccctattttcttgaagcggattgtgtgagtgttgtcagatctatggtggcgcagacggataacaggtcatcttggtgccatgttttcaaggaagcaaaggcggcaatcacactactcccggcgtttcgtaccgagaaaattagaagataatgtaataaagtagctcctgaattagctcaattagcgatgcgtactaaacattgtgttgtgtggcgtatgcaagctcctccttgtatcacagagctgcttgatcatgattgtatccaacctcttgagtgatcaataaagcattttcttcctcgaaaaaaaaacttcatttattcagccttaaaagatcccaccacagtaggggatcggatgaccgattcaccatcaccattactagctaggtttttatatgtatatagtagagaaaccaagtcaatttaaactatagatggccaaatgagccgctcggccaggcacgcccgtgcctaggccgaggtcactcgggccggcacggcccgacttatacatcgggccatgccgtgccgtgccagcccacgggttgcacacacggcccaataatactcgggtcgtgccgggccggcccgaagacataacagtccattatgcttctccaaagaatatgtctatttttcctccctcaactttttgggctgtgtctatatggctggacaataagtctattttgtattcctcttctctttgggtcttgtcttatatggttgattaagtctattttggatccctctactatttttcttcaattgtgctaggccgtgccggcccaccgtgccgagggagtagctcaggcacggcacggctgtcgggccgggccggcacgggcacgaccctagtcaggccgtattgtgcttgggccgggccaaattgccgtgccttgggctgggccgtcgagccgtcgggccatatggccatctataatttgaactcatttttttttaaatgacggtcaaggctcagccatacttggtcaaaattaatccatctggctgcaaactttaactatattttatacatggtacacttgttttattgtatcatccgtaagcaatacaagtaataattgtataaaatccatagctatgagttccaacaatctatatatatatatatatatatcaatcaacgctggtaattgatctcatggcattcattctaattgcatgcattgatcgatcgatcgatcagttgccgtacttggccttgtaatcctgccacagctgctgcacggtcttcccggtgatctgcacgaagtagtcgacattgtacccgtccttcaacttggcattgatgtcggcgacgaaccctggcttgacgctgtcgcagtagtcgaagaacctcgccgtcacggagtagctgtcctcccagctgttcccttgccccggctgcacccagccggcggcgacgtagccggcgcgcagccgcacgaagtcggcgatcccctcgtacacccacgagtgcgccgcgtagtcctgcagcccccactgccacacgtgcgtcgcctcgtggtacagcacgccggtcacctccgtcctcacgtcgccggagctggagctgtagccgccgacgtaccgcgcgctcaggtggatgccgtcgccgctggtgaacgccacgccgtcgatgtcctccacggtcagggtcaccgcgtccaccggcttccggtcgccgccgtcgccgggctgctcgaaggcgtcccagatgaaggacgacgcgtcggcgagcacctgcttcgcgtagtccacgccgacctcccggtcgaaccgctgcccgccggcggtgctcgacgccgtgttcgtcgcatcgaacgtcacggcgccagcggccgtcgcggccgcggccgcggcggccatgagcgccgcgagagtggccatgtggaaaggcttcatttttctttttatgatcttgtattatcgatgtttgttacggaattttgctaaccatggtagggtttatataggttagagaaaaatgtgttttcgaaattcgaggataagtttgattagctaggtgattgtttttttaagtctatagtcaaatcgattgacttggaattagtcaaaattggttatatttcttctgaaatttgatggaaggaagctggcccgtgaagatttgatatggacatctaatattttatttttgtttttattccaatcaaaccaggagttgtttattagtctcagataaaagaagtgcagtgacggcaaaggaaacgcctgaaaataatctggcttttagtatcatgacttctaactcttctggatgcatcaattaatgtatgtttgcagatccgctagcaatttcactatgggtgtgtttagttgggaaaaagaaaatttttgggtgtcatatcagaagtttgaccggatgtcggaaggggttttcggacacgaatgaaaaaactaatttcagaactcgccgggaaaccgcgagacgaatcttttgagcctaattaagccgtcattagcacatgtgggttactatagcacttatggctaatcatggactaattaggctcaaaagattcgtctcgctatttccccataactgtacaattagttttttctttttatttatatttaatactctatgcatgtgtctaaagatttgatgtgatgttttttggaaaaaattttggaaactaaacgggccctctcttctctatctgaacataatataaatatgcgtgtcctaattaatatcaagcatatacatctgaaattatttttgccattgcgtgtcggcattacatttcgtgttggagacggtgcagcttgacttaatttgccaagagattaatttccatgttgccaataattagatacaattcagatcctcttcagtactacgcatgcagcactgcagactaacatgtaggcccgaggatttgtggggcccacatgttagtgagcagtactgcagagaacctcagtggagatgggacatgtgtgaccagccaatttccaccaataatatttcaaatctttcctgttgcaaaaatgaatatgtactctaaaatgagaagtttttttaggacaaactttaaatcctaaaatggcatcgaggaagtagtagcatttaggagtaaccatttatggagtcatgatagattgacaggacagtacttgaagctttgacagtgagcacaaattgattacagatggagtataacaagatcaggcagtagtatttcgttgaattttcagtaaagtttcaggcctgcttagattatagttaaaataaatattattaaattttattaatgctaaaattttagcaatttaacaatattgttaagttttgacaggatttcttatgtatttatcagagtttaataatgaactaaatggatgcatatatttaacaactttacctaaatttggtaagatttattttagctacaatctaaacagtccctcggacatcaaacatggctttatttattgccttattatccacatatctgatactaactacagtactactatagtactatatatatatatggccacctcgccggagctgacgtcacgtcagctagccgccgtacttggccttgtaatcttgccagagctggtcgatggtcttgccggagatctggacgaagaagtcgtcgctgtatccgtccttcatcttgccgttgagctgcgccacgaacccctgcaccaccgccggcgagtcgcagtagtcgaggaacctcgccgtcacgtcgtacccctggtcccaccggtcgccctgcccgggctgcacccagtgcggcggcgcgtagccggcgcgcagtcggacgaagtcggcgatcccctcgatcagcccgccgtcggcgccgccgcggccgtcccactgccacacgtgcgtcgcctcgtggtacagcacgccggtcacctccgccctcacgtcgccggcggcgctgtagccgccgacgtaccgagcgctcaggtggatgccgtcgccgctggtgaacgccacgccgtcgatgtcctccacggtcagggtcaccgcgtccaccggcttccggtcgccgccgtcgccgggctgctcgaaggtgtcccagatgaaggacgacgcgtcggcgagcatctgcttcgcgtagtccacgccgacctcccggtcgaccgctgcccgccggcggtgttcgacgccgtgttcgtcgcgtcgaacgtcacggcgccggccgtcgcggccacggcggccatgagcgccgcgagagcggccacgtgagaaggcttcatttttttaaaaaaaaaataaaaatcttatggatgcacttgcaaattcgataacaatggcagggtttatataggttagagaaatgtgttttcgaggataagtgtgatcagctagctgatgatttttaatctatagtcaaatcaattgacttggaattagtccagattggttatgtttcttctcaaatctgatggaaggaagctggcccgtgaagatttgatgtggacatacgtgtcatacctaatatttatttatttattccaatcaaaccagaagttgtttacagtattagtcttggataaaacaagtgcagcgacggcaaggaaacgctggaaataatccaagcttaatctgacttatagtagtgtcatgacttctaactcttctggatgcatcatttaatgtatgtttgcagatctgctcgcaatttcactttcttctctacgactgaatagaccctatctgaacataaaacatacgtgtcccaactcccaagtcctaatataaaccatatctgaaatcattttctagcatttgcgtgtcaacattacatttcgtgttgcagacggtgcatcttgacttaatttgccaggagattaatttcaccagatgacccaatataatcttggagatgggggcatgtacgagatctttgctgtttcataaatgttgatctctgtttggtgtcctgcagcgtacgaaattcagatagaccggcctaccacaagctagaaacatctggagaagcagctagctgaattatatcttttctgaacttgtgacggctgggagattcagagtttcgtttgatggtggcactgacaaaacctgaattctggttaattacaggtaacgcctaaaccagaatcgctggctcaccacctgtacacatttgtgcagcatatggtctaaactctgaagataatggagcgatttgtttgatttgcaagccggcaggcagctgatcggaatcagacgatacagacaaggcagtctgcagtccgaccaaccagtttagctggagcagttcggcgttttgcagaagctgcaggagaaattcgagaccttggatgtctcaatccgaactcactgttgaaaaccattttctaaattttgccacaaatcacggattaaatctacgtacgtggcgtgcaaatcctgtgcagaaaaaacggtgttccctgttcagttgcataccggcgactgagcagactcgctcctgattgggggaaaaaaataataataatctgcagccagctgcagtgcactcgcagtcgattttccgaccgaaaccgtacgtggcgttcacttcaccgtgggatcgaatcatccaaaaacatcaattcgatatttcgagagaaagcctggaaaatttaggttgacagctctgctgcccagagaaaaactcgtaacgaactctgctgaaatccaaaagcggaagtccaagtcaagaaatttatcatttagtacaccaaataggtcaggctgctttctttctctcttttttcccttttttttgtgagaataggtcaggatgctttgactaattggcttggtgataccgagtactgctcccttcgttgtaaattgtaagaaatatattttttatataatttttaatgatatattttaaccattaacgtattccatattatgtttttaataaaatataaaattagcatcacacgaaagtacttttaaatatgaatctagtcatataacttgtataataattagcatatatatggttagtttgattattagagcttttcttagaaaagaggtcgtcgtttaatttggaacgagggagtactaacaaatacgtatacgtacttagcattgctgatgttcttttcgaagaaattcagacatcccgatgttggctataaatacttcctctcaccaattgcccacataactcaccaagaccaccagacatgaagcttcacgtcgtggcagccatcctgctggccgtggccgcgtcgtcgtcgccgccgcccgccgccgccgtcacctacgaggtgagcaacgaggcggcgagcaccgccggcggccagcggttcgaccgggagtacggcgccgggtacgccaagcaggtgctcgccgccgcctcctccttcacctggagcatcttcagccagccgagcgccgccgaccggaggcccgtcgacgccgtcgtcctcgccgtccgcgacgtcgacggcatcgcctccaccagcggcaacaccatcacgctcggcgccggctacgtcgccggcgtcaccggcaacgacttcaagacgcaggtaattaatagactccggctcatccatgttgactgactaaaattttgaccatccaaactatacacctagactgtgtttagactgtgtttagtttacgtcaaaattaaaagtttggttaaaattagaacgatgtgatgaaaaagtttaaagtttatgtgtgtagaaaagttttaatgtgatggaaaaattggaagtttgaagaaaaacttcggatctaaacatggtgacaatcaacgataatatttacggtgttcctactaagacttcgttcggcaatggctaaattaaagagagtaaaactatttcgttttctgcacgcacgtcccaaacattgtgtttatttttaaaaagttctagaaaagttatttttaaaaatatatcaattcgttttttaatttaaaataattaatgcttaattaaatcatacactaattgctcatcttgttttatatatcttctcaatttttctctttcccatcatcttaaacacacccactttaataaatgtgaccatagatgactagaattccaaccccgatcgatgtccccaaacaaaattaaatctaatcaaccacaacttttacgacaatctctagtttttccaaataatcaagttattttttctcataggtgaccggagtgttgtaccatgaggtggtgcacgtgtggcagtgggggctgcaggattacggggcgcattcgtgggtgtacgaggggatcgccgactttgtgcggctgcgcgccggctacccagcggctggttgggtgcagccggggcaagggaacagctgggaggacagctactccgtgacggcgaggttcttcgactactgcgacagcgtcaagccagggttcgttgccgacctgaacgctaagctgaagaatgggtacaacgtcgactacttcgtgcagatcaccgggaagaccgtgcagcagctgtggcaggattacaaggccaagtatggaaactgatgatcgatcgacgcagagaatgaataagacaagagattaccatcattgattgatatagattgttgtaactcatagctatggagtttacacaattattgtattgcttacggatgatagaataaagggacgctgtctagttttcaatcacatgaaaaatacttgcaaattttagtcctttttcaacggtctagattgcctcaagatttatgcgctacagtaatcataactaatctttttctcttcctctccctctctcctcactgactggcacaagcgtcagatcgaaaatgccctgtcgtcgagagccacctgtcttccccgccctagcacgtctcttttccttccctctcttcctcccggctccctaaggcctcctttggcagcccgggatcccggtgggatccccgcccattcccctgggagaaaggcccgcggtgaaaattttcacgggcttatttcctgtccatttggaagcccacgaggcagggatttcccagcccaatccgcggggaagccctagggaaaggaccccgacctccggagatcgggaatttttcctcgcgcgatccgccgccgcttctctctcgcgcggagtctcttctctcgcgcgcaaccaatgttgggcgccgccgcgcctcctcctccggcgagacgcgccaccgccgggactcctccggcgagacaccaccagcactgccaccgtactagggtaagccttcttctctttcccctcctctcctcctcctcctagggtttctgctcttctcctctagggtttcccctcagatctttggctcagtggctcaatcctctcttctcatcttcccccaacagcttctctagaacagccaccgtcaatcttgctcccacctgaagcaacacgacgcgctctctccagtggcagtgcgccagtgccccatcccccaggtcaacctcgatagccaccaagagcggttctccagtggccgtcactaagcatcgccagcaccgtgactcagttcgactggttcgtgtcctttatcccaaatctgtgctgtgattgtttatggttcagtttggtttgactggaaatttaatttttgcatcttgtgaatgtggaactaatgagagaaaccacggtttgtgtgaatgatctttgcaaagacttgttaagttcttgttttttggtagacatgttcaggctcagaaaagagttgatctaacgaaccgcaggagaaaccaatgctttgctttcttctggagtgtgaaatttgcatgcaaaaactgattagtaatgtctttgcacaggaaatttgggaccatcagtagagcccaggtctcatcattgcaagttttaacagacaacatattattcttattttgggaatctatccatcactagtacatgtccaaaagaggatagcattagtcagtgcttagagcttacagtcaagatggacagtaggttatcgtgcatgtgtgatgacaatttacaattgtgcaggttcatatgctttaacacataagctacgtggtaaattaaacaacattgattaagaagggaacacacgcgttcactgcttcgacagatcaactacaagaattgtcaagtatgcctccttgtacttcctctcttgccataatttaatttaaatttaatacgcaatttgcaaagggttattgtactttagcatgcactggtatgtaaacctcaacttcttcactcaagattactatttagttttttttctctgctccgtttggtttcccttttctcatctctagctctagttttaccatgattctgtgaaatgaatatttttagatctaacagagaatctttttttactggacagagaatcatttttgctggagttattaggaacattttatgtttagcaatagtatatgttctgatatcttcatgaaattcattattaaactgacaacaacccttcaaagctgaacactatatcgctcatccattagaccagctaatgctactactatttttttttctgaggagccaaattgctgcataggtatgtctgatggccctacaatttaacttgaaagctctgctatttgtatacttgattcaatttcagcagatgtaaattttacaactctttgtattcagttaatctggtttaattcttctctattcttgatggtcctagcttagcttaattctgattaattattgtagtctctgtcagggaaccgtataattagtgattaatttagcatgcatgtgagactaaataaatggtaaaaaacagatttttgataggacctcgctggccaaacaaagtgacctagtagtactaattaattaaaacaacaactactactactaattagtactgctaagtgctaaccataactatctacactaatgacagtgtttgtgtgcttgcttgggggcataaaactaagagacagagttagctggagatggccacggtccgtctgaagcattgcgcattaatttgcatctcaaactgtagtagcatgaggctttaatctgtctaatcagtttgcacctaaacagcagctcaatggcactgcagttcagctgaaaatgttgcaaaagtttacctaatgaggactcacatagggggtatatatatgagatgcacttcttttccttgtcatgtccataatgataattgtcctcttgcactcttcctcttgccatgattcaatttgaatctctggattggcataaacaaggattgtcccacacagagctatactctagtctgcattttctatacaagaagtacttgaatgattttttttctaccaacgctacaggttgcacccttacttgtgtttttaattcttggatgtaggcaacaggccttgcccttgtatattcagccttgttctcaatttggagcagcgatggagatagttgatgcttatgaatgcaggaggaaaacacatccaagatatttgtaaatgataattgtatgattatatcttgtatttgctgaaagtgatatttcttggatgctcatataatacttggctaaatactgtagatggtagctcaatttgatcatctcatgaattaagttgatgcttgtatctataatgttctctattttacctagaatttattgctctaattggagttcatatgatttttcagattttttttcttgcatttttaacttaattattctatttttgtgctcagttatgtttatttagacattttttttatcttgttgtgtgtgctccaactagccattatttggtagagtaggctcaaaaattaaaaaccctaatcatcccccagtcccgtgagctgcttccaaatggtagcagggaaatctcccctagcgggaagtgcttccctagatattttggggggattcacttggtacagggaaaatccctgtatggggttttttcccaggggttttctccccgtgcatccaaaggcagcccgggatcccaccgggatcccagcccattccctgggagaaaggcccgtgggggaaattgtcacgggttttattccatgtccatttggaagcctgtggatttcctggcccaatccgcggggaaaccctagggaaaggtccccgacctccggaggtcgggaatttttcctctctcgatccgccgctgcttctcgctcgcacaaccggagtcgcttctctctcgcgcgaacaatagcgggtgccgccgcgcctccttctccggcgagacgcgccaccgccgggactcctcctccggcgagaaggataagcccttctcctcattcccctcctctcctcctcctagggtttccgttctcctcctcctctagggtttccgcttcctctagttagctcccaatctcgctctctggtctcagcgcttgcatcgcaggcaccgacgcgtggcaccacggcagccggggcaacgacgacgaggcgacgcgccggcagcgcgggcacacggctccaagcaggcggggacagggggggatccaaggcggcgtgactcaccggcagaggaggcgctgaggcgcagatccgcctcctcctcctcgctgcgcgacacccaccggcggttgcccggctaggtttgtgcatgcccttgtagctgctgcttgattcttgggggttcgttcagtacttcagttttcttggtgtatgtatggtatgtttcttgatttggtttgggagagttgtaatctgttctcctgttctttctaatacattgtagtattgtaccctgcagtagcatttcattttgttatggaagcgattcagaaggggatatgggtgggcgtatggtgctcttgttttagatcatgaatgagttttggtaagatgatgttctaatttgatggagtaggttgtgctctggttttttctgcagtgtaattatcatgcttagtgcagtctaaatatgtgagatcaatgcaccagtcccaagaaatgaggaattatcacacatgcagtgaggatcattcaactggtgaggtatatgagaaattttagtctgcaaaccagtaacagttttttgcagttaattagagatgcagttcttttagttggatgctgtcagctctgttaacctagaggtagatcttagtactggttgagctgctagcatcaagtttttttttctggaggcattttttagtctaatccattcttgtagtctctgtcagggaactgtagaattagtggtcaatttagcatgcatgttgggactaaataaatggtaacaatcatatttttgataggaactcatacttactacaaaaatgaagtcttttatgctctatacttatacattagtctaaactttagtttcatgtcatgtatcaccagcagaaaatgagcaaggtggcattgtgcattcaaaaaacacaagctttggcagcaacctatatacaaagacacgcacacacaggtatttcaatctcctctctctcactcactgcacaatacactggccaaacaaagtgacctagtagtactgattaattaaaacaacaacaactactactacttttttttccttatcatgtccataatgataattcataattgtgctcttgcattcttcctcttgccaggattcaaaggattcaatttgaattgcatgctcaacttactttcaaatatggacttgaaatagagtattgttggaaaactatcaatacaaaaacatggacttcaaattgtttgatttaaaaataatggtgtgtatctgcatgtagggtgtttgatctaaaaagaaagtgcttataccaagagtttgtttacgctgatgaagctgacaattgcaatatgttggttgatgtgcatgcattttttcctaagctagtatcaatggccgtccttcaaatttgattgctgaagtatcactattttatatttattacttaaatttcagattatctttttcatcctggcagatttattagaacaaatgaagatttgtagaagagatgatgaagaagatagaagagataaagatttaaattgtgttcttgatcaagacattgtaaccctatataaatatgatgtacagttctatatttgtggatgcaaggatgattccaaagattctaaattttgtatgatatggatgattctaaagtttgacttatgtcatgtcacgaagttggtttccacataaactaatctatatttctttgttttttctgaatttctaatacttgttgattttttttatgtttttattttttttttctggaatttttttaggttgtttcctatttatatggattttctatattctttctatttttcctgaaatttctataatatttctaaagacatgttttgttgttcaaacactatttagcagtttgcctctctaaatcccccttcccccatcaaccccctccccctactcccaaatggtagtagagaaaattcccctaataggagtgattcctctggaggtggaaggggatcggttggtacaggggaaaatccctgtacgggactttttccctggggtttcctccccctgcatccaaaggagccctaaggcattgttcggttacacaaggattcgttccgggccaggaatgataggtataacaagaaatttataataggtataacaagagaccgggatttattccagatcaggaaccaatttacttatattaggtacaacaaaatatccggattagttccacacctcttaactggtggattaattcccggtctcttattgtccctatcatgagcaaattagtttccggcccaaaataaatcccgacctctcgttgtatctatcataaatttcatattatacttgttattcccggcccggattgaatacttgtgtaaccgaacaagggttaaaccggcgatagcaccattcctctacgccattctcttcgatccccgtctctagcagcgagccgcaggattcgtcatctcctaactccacagcctcccttgcaccctatcatctcattgcccaaggctattcctctaagcttaaaaccatcctctcccctcccctcccaccctggcccttacccaaaacctaaaaccttattagcataaatcatctttgaaaatacacagtaaaacatgaaggctagctagaaccgtgatacagtaaaataatatcttctcaagaacagtaaagcatctgttaaaaagagagcatggtgtgtatatctttcatgcatgctcctttgatctaatctatggattagaaggaaaatataacatcagcacttatattttaatgagaaaattactctcgtctagcttgcggtgatcaaaactctcaatagctgtattttaactgcaacaacgttaagttctgaacactcagcctctttttctcgaactaacaaattacggtacttttcatgcgagatactctggatcaagtcacaaatcgtggctcaaatgcatatacgcacggtgacgtgcatgcaaaactgcagatcatgggaacaaaatggtgttctctgttcagttgcagaccgagtagtgtgcaacaagcaagtatatattgaggaccaaattaaacacgacatgagactcgactcaactcaactcaaatacctcctgattggacaaatctggaagccagctgcactgcacattcagtttgtccccatcaatcggttgctatgagctgattataagctaaagtggcttatatacatgttcttagcggtttagaaataatattctaaaattaattttaaaattaagatcctgcatgtctaatgtaaatgatgaggctggttgtctatatattttccgacagcaagggcgtggcatccctttcacaagggaatcaaacccttccagaacttccagtcctgtgagaaaaaaagcttggaaaaatcgggctgacagctgctgcccagagaaaagctccgcactctgccaaaaatccaagactccaagtcaagcaacttatactgaagactacttatactgaccaacaacgacgtatatatacgtacacgtttgcacatgcaggacatcttcgtgtgcctataaattcgggaaatttaactatttgtcacttttacgtttggcaattagtcaaataccttttttagatttgtacttaacaatttgccatgggaaagagaagcttttgtatttttttttgccactttgtgcactgtagagcgtcacctgtgcatgccagcatggaactgacgcaaaaaataactaatctacccctgctagcaattggtactgtcctgagttgataagcttgaacacattgaatcttagtcataattttaactggagagataacaagagaaatcggcaacatgtccaatctatcctttttaaatttgcaagacaacaagatcaatggcaccattccggttacatcagttcatcaacttgtttaatcgagctaagtttgggtggcaccatcccaacaatgccagccaaattaaataccgtttttaatcttaggcccagttttttttttcaactacaaattacaacttcctcggtttccattatcacgtttttcaaacggttaaatagtgtgtttttataaaaaaaagttatgtaaaagttgtttaaaaattcaaatgaatccaatttttaattttgtaacaattaatatttaattaatcatgtgctaatgagctttctcgttatatgtgcgctggaaatttctctctcaactgagagatcgaacaggtcctttgatgtgtccaagacccgggcattttttgttggagaaatacaagtggccgtgcaggagcaattcaaagaatatatatatataggttcggttcttgtaccgataggctaattaaccaactatcattaatagggtcattagcggctggattacccaagtaattagtacattttactatctgccctgtaacaggggaggaatttttgtgttgttctgttgagagttctccaggaaagctgatggcgatcccatctgcgaattgacattattgctgccgctgtgaaggttggagaagaagctaggtctggagattattttcctggtcttgctacttggtacatgttagtgccctttcttctgatcgtgtagaaagcacgggtagaggattattttatctagggtttggtcttcaactgttatacgccgagctcttgattatttggtttgtttgctgctgaattttatctatatatgcaagtctggttaatccatcagtgttgagattaattactggagttgtgatttttattagctgctgattcagatcgttggtgacctcacgctgcctggcaagttcagaaagttaatttgttaattgctattggtaccgtaaaagagagggataaaattagggtactcggtgttgggtaatcatcatccttacccataacatccggtggatatatttcttcaaatattggttcgttattcgacttggcggtactcgatcttttatacaaggacgagcaggttgtcctcggatcatcaatgaccacctcataacagtgaacaacatccatccagattcagcctataaaatacagccaattgctagcaggggtagattggtcatttcacgtgcctggtccaccctggcatgcatgtgtggcgctgcacagtgcaggaagtggcaaaaaattacaaaagcttctctctagtggcaaattcttaagtgcaaacctaagaagggtatttggttaattgtcgaacgcaaaagtgacaaatagttaaatttccctataaattctgcttcaccacactcccttaaatcctacactaaaatttttcactctatcacatcgaacatttcaacacctgcatgaattattaaataaaggctaaaaaaatatcgaactacgtagattgcgtctaatttgcgagacgtttaagcctaattgctccatgatttgacaatatggtgctacagtgaatattggctaatgacggattaattaggcttaataaattcatctcgcagtttataagcggattctgtaatttgttttattattagactgcgtttaatactttaaatgtgtgtccgtatatccgatatgacacgttaaaactttgcacccctgaatctaaacaccccctaagaaatcctatacttttcttaaaatacattcagacgatgatatgccatatttagaaaatgcgcaaatattttggattagatatttgatctggtctccgtcccacatggcactaacgtggcattagaattaaaaaagtatacgtaggactcatttgtcattcacataaacaatattatgggacccactgacatgtaggtcatcatctttctccatatcttcttccttctctttccctcttccttatctccctgtctcctctttctattcaccttcatctggcagcgacgagggtagcggctcgacggcgatgagggccgcacggcggcgggcatgagggcgatggagcgacgatcgcggtgggcaggcgaggccctaacaacttgccatggccacccaccaccgcagccgctggcgtagaccccggagctgtggagcgacttagtcgctcactcgctcgccatggcgctctccttcgcagtgatggtcacgcggcgtccgcatcactatccgtaagtccgccgcgaagcgcaagccatccacctctggcagcccgtggtacggacccgaccgcgtcttccgctccaccgatccggctaggcacgtgcggagcccggcaaggaggagagaggaagatgggggcggcctccgccactagctctctccccgccagccaccgtcgaccgccgggctctccaccgacctgccatcactc

SEQ ID NO: 6384 - DNA, 15377 bp, Oryza sativa
tggtgtttccgcctgcacggctggcctattatgccgccgttgttgggcgtctacgtcttcaccgaccggcttgccttcgccgccgccgactggtgcttccgcctgcacggctggcctttatgccgccgttgttgggcgtctacgtcttcaccgaccggcttgccttcgccgctgccgactggtgcttccgcctgcacggctggcctttatgccgccgttgttgggcgtctacgtcttcaccgaccggcttgccttcgccgccgccgactggtgcttccgcctgcacggctggcctttatgccgccgttgttgggcgtctacgtcttcaccgaccggcttgccttcgccgctgccgactggtgcttccgcctgcacggctggcctttatgccgccgttgttgggcgtctacgtcttcaccgaccggcttgccttcgccgctgccgactggtgcttccgcctgcacggctggcctttatgccgccgttgttgggcgtctacgtcttcaccgaccggcttgccttcgccgctgccgactggtgcttccgcctgcacggctggcctttatgccgccgttgttgggcgtctacgtcttcaccgaccggccgccgcatccgccgctgactggtgtcaccgcctgcacggctggcctgttataacgccaactgatgctatcttcttcacggctggctacatcgctgtcactactaataggcatcagtatcttcaacacaagctgcctacgtttgccatggctgccgactggtgtttccgcctgcacgctggcctattatgccaccgttgatgggcgtctacgtcttcaccgaccggcttgccttcgccgccgccgactggtgtctccgtctgcacggctggcctattatgctgtcgttgttgggcgtctacgactccaccaccggcctgcctccatcgccgccgactggtgtttccgtctgcacggctggcctattatgccgccgttgttgggcgtctacgtcttcatcggccggccgcctcgtccgtcaccgactgatgtttccgcctgcacggctggcctattatgccgccgttgttgggcatctacatcttaatcgccggtcgtctcgtctgttgctgactagtgcccttacctctacgtctggtttatacagctaccactactgatggacatcatcatcttccgtcgccgactgattatgccgccgccgactggtgcttttatcttcacaactgcgcgtcttcactaccagtttgcttctgttgccgacgactcgtgttcacttcatcacggcaatgcaactttgtcatcatggtagagcgacttcatctttattatcttcggcactggcaaactctattgctgctacttcgcaagttttgctacttcaccaaccacgacgtctttgtgagcctcgacatctcggcatgcgatgccatgttattttactacaacaagaggctctccaatattcaggatttctacttggacatcttcaacacatatcttcaatcaagcaatgactacttgacgacaagaagctataattctcgactctatgttcagttgtttcccaactaaccaaagagtcgggggctacacaaatacaaggctcaaaatttgacaaattttatgtcaagctgaagaaatcaattcatcaaccaacgagtcaacttcaggagtcattatcttcatctttgattcagagcagacattctacttcaacaacttcaaatatttcggtttagacgagttgggcaacaacatcaactctcctccaattatttgtcttcacggttggcctactacgcaaccgccgatagaggatctcatcgttatcatcggctgctacatcgctattgactggatcaccgacatcgccatcttcatcaacatcttgtcaagcctcatcaacatagcctactctgctgccgttgatgggaaacttcatcatcatagtcggctatctctattgccgctaatcatcattaccgtcggatgcgtttgtcgccgccgattattttcttcatcttcatgattggtggatttcgccatcaccgttgatgcgtgtctacgtcttcatcgtcggtttgcttttgtcactaccgactgttctttcgttgttgttgggcgcctacatcttcactgctagctgacctgactgttgccgactggtttcttcgcctccatggttatgcaacttcattacatttgattggtggcatctttactaccactgacatcttccgttacttctgatgagcaatttcgtcttcatgttggtcatttcatctccatgccgactgcgtcagctattgccaatagacaattttgactatgacagaaggacaagctatatgctcaggagctcatcaactcaagcgtgaggattatatctctaatttggacttgttccggatacatgcaacatgaatttatgatcatgggtctattttctatgctcaaagactggactatttattattccccgtaagggttatcaaccgaatacttgcgccagtcgggattcaatttttatatctattttggagtatcccataagggataatcactcagatcacatggtctatatcacccgggagcatgttacatgcgtcatcctttaaagggtatcgaaggcatattttttggcctaggcctaatatgtctgcagcccatattttcaggtgtggcctgtcacgttcttttagggacttaggcactttttgcttaggccaaagtgcgcgtgatcaagtgcccaataccttaaaatccttttataccgcagttactcaactttttaggagttggtacaatgcatcttaaaaggtgtcaaacagtaaagctttatatagctgccccgctgactttttaatatagtcatggtgctgtttgggtttttaagcaattgattggatacaatatcgttgctttttgccacgtaagtgtgcatttttattgaccaatattatggcttaggctgattatatattgtggtcatttttctaggcggttggtaaatcctttatgagtttatttactcggattttacaccacatatgccatatatttccaggtgtggtgaaaccatgtgtcttttagggactaaagcacgtctgttaaagcagtgtgcgcatggcgtatgcccaatactttggaaatttctttattcacaacatccaagcttctttatagctattttgctatgtgaattttcaatgatgtagccaactttaggttacactcatcatattttacaaagcagtcggtatatcacttggatcatattattcggggattcacaccgcatatgctatatattggtatcaagtcacttggttgactacgattatcaaaaccactcagttggtgcatctattagatacatctattcgatgcacctgactttatttttcagccctccacagtcttcatatttggtaaaagtactcgggagatcatggtgaggatgattgaagcactcggctttggagtaatctagttcgagaaaagattatctttccgactgtgaaggtctcaggggctactgtggagattatgggtaccccatacccacacggcatggttatccgactagtaataggggataacatatatctatggaatatgtaaccgatcatgacttgggtattacgtttccttttatattatggagcggcctaaagtcctgattcgataatattgtaaaatagatttaggaaaccgataccgtattggttaaggtttctatcttgtaatcctgccccccatcctatataaggtgggcaggaggccctctagggggcatgaaacaacctgatcgtcagatcaatacacactcggcggattcaaatccccaacaggagtagggtattacctctcattgagagggcctgaacctgtataaatcatttgtctcggcatccatccactttaggtctcgtccgctacccccttttattattgccgaattcatgtttcgacaggtagaccatagattcaagatttgatctaatactaacaaaaacttgatcaatatttaatgagataattttagttattatcttttctcatctatgtacgtgcatggctaccaaaaattaggagcattcggtctgtttgtttcctagtcctttccttgcatatggccgtatacgtaagttggacatgatttttttggggcatttgcaaatttgccactggttttttcaatattgcaaggatgccactcgactgacagatctagtggcatttttgtaattttctagtagcagtcttacaataacgattcaaattagtagtaaatttgcaattgcccctttttttcctattacccgacaataatcaggccatgcaatccggttcatagagcacttggagtcatgttgatgtaaaaagaaaatacacactggcctaggagatctgtttagctctagtgcaggtccaagatgttgatgagatgcgggtgtgtcagtcagtttgatcctgcaactgacaagatatgtaaacaatatatcagatagccgatcgcctgacaagccgatggagtaattccagccgatagccgatactaaccgatgccgattccagccgatgtcaatagggttttgagcaatcggctatatgttcaatgtagataataatgcaaagataatcggctgatgataataaaatatagttataatataaaccaacaaaaaccaatgggctaataataatatgataggataaatactgatccgatggttaaagcatacatcggctggaggtctgatgctataaaatccacaagagtagattaaacaatgaaacctttgttgtcatcagctaaatccaatttatatatgcaaaccttataagttgatgcaacgtctagataactcatcgattgaaaccccgataaaacccttattggtagtcaataagcaggctagagattatggttctaagcacgacttaatagattaaacttaactgatgcatacactaagtatgaaaagaaacataatatctagacgatcaagcccttgactgattttcagggtgataaatgccttagctaatctaatctagtaaaacaacttagccgatacaggcagaaacactaaagcgagaggcaaccgatagagctaaattgagatactaagactagattaactaaaacatatgataaattggcaaacaaattgttgatgcgaaaaacacacactggcctgggagatctgcttaactccagtgtaggtcgtaaatcttgctcttgggttcaaaggcatgccagttgatttgatcctacaatcaataagaaagaaaaacaagaaaaccaaggttaaatccataaacgatagccgatcggctaggggccgatgacatatcgtcgaacattgagccgatgttattggtattagatcggcaatgaagaataaggcaatatagagttaaatctactcgatcggctgtagacatcaacgatatataatcattttctcaaaatatatttaaaccgagtgattgggatagatcgaacagcaagtcaagacagtataaatcacttatgtttaaagatactttaagataacgattatatatatgtttatagcatagccgatcaaatagatctaacatatatcggctaatactccgataccactccatattaagatattaaatcagacaaaatatatcaaataacaagcctaatatactttaatgcaacaatatcttaatataaagggcagatttagcatatcaagtaagcatacaaagtataaaatagctaaatcaggtaagatcggctgaaaccccgatactacctctattggtggtcataaaacaagctagatattgcaattatgaatattacttaatagatcgaactcaaccgatgcagcattaattaagcataagaataaatacaagatctagacaagatgatgaaaacctctaaaagatggtagatatgctatacaatctagattaacaataaaatctaactctatcggctactctctagtaatagatgttagccgactgaaggttagattatgatagtaataaagattacaaggcatatatgataactcgacgatttacataaacaagattagagtgttataaagatggaagcactaatcccgagaacgcaagccgtcatgacaaattttacctcttgttgaagatcgaaatcgatgcagttcaacccgaaagcaagaacttgtcgaaacaatgaaagtagaaaaagggcggcgatacaccgaaagtgttattgaactatcgttgtaaattacatgggatcgggttatatttatacctgggatacatggctagtccttgccggacaagactcttatctctaacaaactctaagatacgaacaagtctttacagcagactcttaccgaaatatatctctaaagaaactatttaaaatatcctaattaatagatataattgcctatcggtgagcttatctccatcatggcaatccttgtgtagcacgttgatcgatcccaaagacggttatacaaccatctcaacgaaatcggctacatcggctaaatcggctatcttctatccgatccatctcatccgatgcagtctttagccgacacccttagctaatgcgcactgttcttggaatatgattccctgccaaatccgctttgattccaatgttgaacgtagttcatggcttaccaaatttggtcattaacccaaatatatcatccaaaccaaagcaatccaagaggtcgaatgtactgatgcagccttgaacaacgccaacgtagatgatacaattgcctaagccggcggaacattggacttacctcttcgccggagatcgagaaccaatgcagccccgtatcaggtgccaagttccgccgtgataaataaaaaggtagaaaaggtaaaaggtggcgatgcgccgaattgtactgatcgtggagataatttacaatgacctcgggtgtacatatttatacccatgggtagacactagtccttgtcggacaagaaagaaactttcctaaagataaaagaaaaacataaagttcttattggacactaaacacactttcttaaagataaaagaaaactaataaactcttcctaattactagataaattgccatgccgcatcctcctcgaacttggtctcttctggataagtttccttaaatagattaatttccttaactgaatgctacaagaatccgactattggcgacatgataattctcggcaaaatctagatcaagaggcctctcgttttagtgctaacgagagatcctatctagatgccttaactgtaggactagtccccatcaattaagtagaaaatatattcctatcacctatgtttcaaatgaaattttctcttaaactactcatccgatttatgatccaattacacggttgtgttcgtaagaattaaatctttacaacaagatctcacatgattatattttgatgaaaaattacaaattacttttatagtatatctaaattacttttagatttcactaaattacttcttagacatataaaagtaatttcagtaaagcttaaaaataatttattatagaagtaacttaagacaaaaaggaagtaactttgtcatgacattaaagtagatccgttatggaggtaaaaacgtgagtctatctaaaaattaaatttaatcagcacgaattatggaattgactaaaaaagataataaaataaacaactcacaacattatggttgtataataagtaatttaatcaaatcgaaaagtaatttatatatatgataaaagtaacttacatatataataaaagtaatttacaacatagatatttcttttatcaaaatatagtcatgtaagatattgttataaagatttaattgcaacgaacacaatggtgtaatcggatttgatgttaatgaatctagatagatatatatgtctatattcattaacatcaatatgaatgtgggaaatgctaaaatgacttacattgtgaaacggagggagtacttctctgtttatatttgaaaccgggcaatgaattgaaaagaaaagggaacagaacggccttgtgaacgcggccaccggagccgccagcgcccggcaggacgatttgccgaccagcaacggaaggcgatgtgccgtcgagtagccaagcgatagatctaaatgtacaaaaactttttttaatgaagagtggataatatcctaaataccaaccttacctctaatcactaagttagtaaagtactaaaatgtccttatgaatcaacggttcaaatcaattctactagttgtataatactacgagtagagagtaccgagcatcgctctttattttttgggaatgctatgaatctggaatcgcatattaggtttcatttatacatctatagtcaaattcatgtacacacaaaaaaagccgaccctaaaaaatatgattgaattcccagttagatttgtatttatctatctgtatagattttattttagtggaaaggtcgcaaggacccggcctatattgaaagccaaccacgagcagagtttttgctgcggttaccagctttacaaaatggagcacagaaagcactcggagatgattaagtaccaacagacaaggggtatattaagggggtgtttaggtgagagaaggactaaactttagtccggacttattttttttgtgagagggaccctctcacccaaacaccccctaaacctctaaagactagacggcagcaatctaaaacagaccgaacgccaaagcattgcacggggctagcaagatcaaccaactcctattctattttgtcttagagcagctcctccctccttaaacctctttaccagcttctctagatcactcttattcatctccagccgatgcagaggactacactgcaataagaaaagacaatttggaaaggtagtattaggggtgagtaaacaagtttatccctgaacatgatgttgtttctcgttgtccatatatagagtccggcaaatggcagcaagcagggcatttttcacaactatatgtttaattcagctctaatgtcagcaaggataaagtcatcaaggttaagaggaacatgatcccagttcagcacatctctacagaaacaccaaacaaaatgcgccaaagggcagctaaagattatgtggtttgtagtttctagatggatagtggagaaaaaaaactaattttaaaatcagtaactagagggtgagcgtgcatacggtacggggtcgaccacgggccacggccggcggggagcacaacggctacagtttatacttattttagtgctagaggagacacagacagtaatacacgctacttccttcgtttcataatgtaagtcattctaatattttccatattcatattgatgctaatgaatctagatagttatatatgtctagatttattaacataaatatgaatgtggaaaatgctagaatgacctacattgtgaaacggagggagtagtatcaattatttgaagagttcagtgacattgtaccataaggacgaaacgaatactccactttagtggcatgtggtttgacttactcttgtttgtcgtcacgcgccagcccgagaacgggtccaatggaggatacctcaaatacagactcagactggcagtataggaagttgtgtcgttgctcctccagcaggagaagccgatcagtacacagtactgatatcacagtactgtatcagtatcaccttgcacacgatcgatcgacgctggctcgccggcggcgatggccgtcttttcgttgatcacttgtgctgccgacctcgtcatcttcttctccgtctgctacattcagcctccggctcatttcgccgccttgtccttcaactaccccaccttcgcctcctcacacaaccagtacatcgaaattgaaggcaatgcctctgtcagcgtcgggtatatcgacatcagtgcgaacagtgtgggcaacaacgtcggacgggtgttccacaaaccgccagtgcagctctgggacgccgccaccggcgaggtggccagcttcaccacgcgcttctccttcaacatcatcccgggaaatagaagcaaaaagggcgatgggatgaccttcttcctcaccagctacccatcgaggttaccagagggcgacgccggtggccaaaacctcggcctaacgaaccagacggtcggcgtctcgaccggcgagaaccggttcgttgccgtcgagttcgacaccttcgtcaaccccttcgaccccaacgcaaccaacgaccacatcggcatcgacgtcaactccgtcgtatctgtgacgaacgagtccctaccaaacttcagcctcatcgggaacatgaccgccaccgtcgactacaacaacaattcgagaatactgtcagttaagctatggataaatggctcgacgacgccttacacccttagctccatggttgatctcaagagagccttgccggagaacgtcaccatcggcttctcggcatcaattggctcagcctatgagcagcatcagctgacttcttggtacttcaagtcgacttcgtcgttcgagcagaagctggcagcagaagtagcatctccaccgccgccgtcgtcaccgtcaccaccaccgacttccagacgtggcggagttgtagcgggagccacagttggcgtggtaatgttcgtcatactcctcttcaccatggtacaagtccttgtacgacggcgtcagagcaagaaaagaagggaggcacaggatggaagctggcacggcagtgacgacgacgacgacggcgagctcatcatggagatcgagatggggacgggaccaaggcggttcccgtaccacaagctcgtcgacgctacgaagagctttgcgccggaggagaagcttgggcaaggcggtttcggtgcagtgtatcggggctacctcagagagcttggcctcgccgtcgccataaagaggtttgccaaaaattcctctaagcaagggaggaaggagtacaagtcagagatcaaggtaataagccggctacgccaccgcaatctggtgcagctcattggctggtgccatggccgcaccgagctgctcctcgtctacgagctattccccaaccgtagcctcgacgtccatctccacggcaatggcaccttccttacatggccaatgaggtttattaattaactcattgatttagtaattttcgttatgtgcaatcgacacctttgaaattcaattcatctgctaacttggatgttgccacaggatcaacattgttcatggactcggatctgcactactctacctacatgaggagtgggatcaatgtgtagttcaccgtgacatcaagccgagcaacgtcatgctggatgaatccttcaatgcgaagctaggcgatttcggccttgcaaggcttattgaccatgccgttgggatacaaacaatgactcacccctcagggacaccaggctatcttgatcccgaatgcgtaatcacgggcaaagcaagcgctgagtccgatgtttatagttttggcattgttctattggaagtggcatgtgggaggagaccaattagcctgcaggacacccagaacaattgcctcttccgactggtggaatgggtgtgggacctgtacggccaaggagccgttctcaatgcagcagacgagcggctcaacaatgaatacgacacaactagcatggagtgtgtcatggctgttggactctggtgtgcacatccggaccgatgtgcacgtccatctatcagagctgccatggcagttctccaatccaatggaccactacccgtgttaccagctaagatgcccgtgccaacatatgcaccgccgatggcctcagcggaggggcagccgttgtcgtcctcaagtttgacactaacgtccatcacacctcgctaggtttgcaagttttctcactcataggatttgtatagcgagataatttttgtcatatttagatttttatccatacccacaagttggtttggaggactcatcttcgttaattgctccatacaggagtattagtcatgtttagttcattttacttgttctacatttacaagggatatgtacagctcgtgaggcaattggtttgctctttagagagctgcctaattggcaatgtgagcaatgtgtttagtttacatgatgctgtctattttccaagcatttatttattttgtccagaaaacttttcctacaatttcctctgtccaacaatccaatcaaacagtccatatatctaactgatatttgttacatacttttcttgttttcagtcgatatcctagtccttacagagggcctggaaatgttggagttgtaagaaactcagaaatattaacaaaacagaaatgatcgaaggcaccaacagaagagacctcttgcaagacatgtgttcattgttgatagatctcatatgatattcagctaatgctgtccaatgactgcatagattactaccgaaacattgttttgtcctaattcatccccatctctggctgagatctagaatggtcaggggcggatccagcaacagaaaattggggggcctcaagtacgttgtttctctaacctttagccatctaaagacctttagtttattatttatggtgaaaaaaattaaagaaggtgctctgggggtatccatgggtcttgtgggtgtaggggggactcgagtccccacgttggatccgcccctgagaatggttagttacttagttcagtctaaaagatctaaatgtgtataacatgatcacaataatcatataagtatactaaaattcagaacaatagatctcaatttgcagaatactttggatacactgctgctatgctctcgtttcgtcaagcaaccagcgtaacaaagataggtgaactggaacttttagtgcagtttcgaactggtcatcttctccaatcttcattaccccgtggaagaacaaagtcttaaagtgtagtttcaaagcaaaaaaaggaagggtacaataaagagattaggattctctgtacctaggtgtcatgacacccaacatttatgtgcgacttaaatagttattgaaaaaaaataaaaaaattagtaacatcaattgtgatgatataagtctgtacacaaacatgcaagtttctatttgatctacaactagaaaaataaaaataataaaatttgttaattttatttcttcatgtgtctgctagggaactcatctttagtcctttagtcctgcttcacagcccctttaatcccgggttacaacccgggactaaagatgcctattattagtcccgcttgaaataaccgggactaaagatctatcttttgtctcggttggtaatttttagttccgcaccaaccggactaaaaattgtagcgctaaaatttggactaaaaataaaataaaaatctgaaattagaaaaatatcaaagagagttcaagtagggttataattttgaaacaactaaaatcgaaacaataattaaggaatattaaaagaattatccatatagaacacaaaacgagattaattaaaattctaaataaaaataaaataaaatatgaaatttaaaaagaaaaataagagtttagttaggaatacaaattaaaaattcataataaaaaattaaatctattaaaagaagagaccatttaaaacacatgacgagatcaattaaaattttgaataacaaataaaataaattccgaaaatagaaaaatagttagatgaacattttttagatgtatttgtgaatttgcggtgtccatttgatatgtgatgttcaatatgtgaatttgagtatgttcattcgatctgtgaatttgtgacgttcattcaacctgtgaataacaatgaaaaaaaggccaatatgcaaacagcaaaagacaatgaaaaaagaaaaaaatgttcttacatggacttttctttcaatattacatattttaatttcgaattttagttattttttactttctagcccactaaccgccattacagtgttgcttaacgacttgcccgtagttcctcttcttaatcatcgttgggattctaaaaatcgaacctaatcatcttttcggttttgttaatagttttcatcagatgtcccattaaccgtcaccacactattgctttataggtctgttgttcctcttctctttattatcatttgctattattgtatttttttaatggactattgttttacaattttgtattttttcattccttttttatttgaaaattttatttctacgtgaactcttatttttatttttctattttttggagcttattttattttttctgaattttagttaacctcgtattctattctacatgtatgttcttgcaataatcatttttattttaaaggaaaaggatataattggagagaaaagtgaaaagaacagtagaggataaccagcaaaatatcaggttaggaaaggagaaggataaaattggagagaaaagggaaaagaacagtagaggataacatgtatgttcttgcaataatcatttttattttaaaggaaaaggataaaattagagagaaaagggaaaagaacagtagaggataaccagcaaaatatcaggttaggaaaggaattggataaaatggaaaaaacgaagagatcgatggaatcgaactcatgaactattggtcaaatgtttcagtctaaccaattgagaatcatcgacattgtgctacattgtgtagctacattttaaaaatatgggtaacgttagtgtgtccgcccctgcaccctatacatgttggagcgcggtaaagaaaaaaaattggtatggacccgcccacctatcgaaccttatctccttctctgaaatcctccacctccgcttctcagttctctctggtcgctttctccgtctcccgaatccccgtctctcctcctttgccaacagccgagagttagagagagcgccgcgccgccgcccccgtctcttctcccaccggtccctctctctccctctcgtctctcccttgccggtagcagaggaggtggcagcgatggcttcagctgctcccgcgggccggatccgggagtggcggtggagtcggcggctactattggcggatccggtgacggtggcggtggcggtgtttccggcaggcggatccggcgggcgattctctaccacctcctcctcaccctccacgcccaagcttgtcctgcggcagcggcggtgacatcggtgctcccgtgggcagatccagcagaagtggcggcggcgttctttttggtgggcggatctagtgtcacgcaatttctatccaaaattccaaacgcttacatgtgtgtgaaccctcgtccaggaatcagccgaggcaca

SEQ ID NO: 6385 - DNA, 34550 bp, Oryza sativa
tattatgccatcctttggtatcctgggcacttgcatatttgctgcgtggcttgctgagtatgtcatatactcaccttcaatcattcatcaaaagaagagttctacaatgaggctgatgggggggaggattaggtgtagccctggtcaagctgcctgtggagtggaaccgtctgcgccgtttatttattttccgctgcttaaaactttattgattgagaggaactatctacctctgtaatgacattttattcgcttattaattagagtaatatttgtactctattatcaatttgttattgtgtgcctcggctgattcctggacgagggttcacacacatgtaagcgtttggaattttggatagaaattgcgtgacactagatccgcccaccaaaaagaacgccgccgccacttctgctggatctgcccacgggagcaccgatgtcaccgccgctgccgcaggacaagcttgggcgtggagggtgaggaggaggtggtagagaatcgcccgccggatccgcctgccggaaacaccgccaccgccaccgtcaccggatccgccaatagtagccgccgactccaccgccactcccggatccggcccgcgggagcagctgaagccatcgctgccacctcctctgctaccggcaagggagagacgagagggagagagagggaccggtgggagaagagacgggggcggcggcgcggcgctctctctaactctcggctgttggcaaaggaggagagacggggattcgggagacggagaaagcgaccagagagaactgagaagcggaggtggaggatttcagagaaggagataaggttcgataggtgggcgggtccataccaattttttttctttaccgcgctccaacatgtatagggtgcaggggcggacacactaacgttacccatatttttaaaatgtagctacacaatgtagcacaatgtcgatgattctcaattggttagactgaaacatttgaccaatagttcatgagttcgattccatcgatctcttcgttttttccattttatccaattcctttcctaacctgatattttgctggttatcctctactgttcttttcccttttctctctaattttatccttttcctttaaaataaaaatgatatggcaagaacaaacatgttatcctctactgttcttttcccttttctctccaattttatccttctcctttcctaacctgatattttgctggttatcctctactgttcttttcacttttctctccaattatatccttttcctttaaaataaaaatgattattgcaagacatacatgtagaatagaatacgaggttaactaaaattcagaaaaaataaaataagctccaaaaaatagaaaaataaaaataagagttcacgtagaaataaaattttcaaataaaaaaggaatgaaaaaatacaaattgtaaaacaatagtccattaaaaaaatacaataatagcaaatgataataaagagaagaggaacaacagacctataaagcaatagtgtggtgacggttaatgggacatctgatgaaaactattaacaaaaccgaaaagatgattaggttcgatttttagaatcccaacgatgattaagaagaggaactacgggcaagtcgttaagcaacactgtaatggcggttagtgggctagaaagtaaaaaataactaaaattcgaaattaaaatatgtaatattgaaagaaaagtccatgtaagaacatttttttcttttttcattgtcttttgctgtttgcatattggcctttttttcattgttattcacaggttgaatgaacgtcacaaattcacagatcgaatgaacatactcaaattcacatattgaacatcacatatcaaatggacaccgcaaattcacaaatacatctaaaaaatgttcatctaactatttttctattttcggaatttattttatttgttattcaaaattttaattgatctcgtcatgtgttttaaatggtctcttcttttaatagatttaattttttattatgaatttttaatttgtattcctaactaaactcttatttttctttttaaatttcatattttattttatttttatttagaattttaattaatctcgttttgtgttctatatggataattcttttaatattccttaattattgtttcgattttagttgtttcaaaattataaccctacttgaactctctttgatatttttctaatttcagatttttattttatttttagtccaaattttagcgctacaatttttagtccggttggtgcggaactaaaaattaccaaccgagacaaaagatagatctttagtcccggttatttcaagcgggactaataataggcatctttagtcccgggttgtaacccgggattaaaggggctgtgaagcaggactaaaggactaaagatgagttccctagcagacacatgaagaaataaaattaacaaattttattatttttatttttctagttgtagatcaaatagaaacttgcatgtttgtgtacagacttatatcatcacaattgatgttactaatttttttattttttttcaataactatttaagtcgcacataaatgttgggtgtcatgacacctaggtacagagaatcctaatctctttattgtacccttcctttttttgctttgaaactacactttaagactttgttcttccacggggtaatgaagattggagaagatgaccagttcgaaactgcactaaaagttccagttcacctatctttgttacgctggttgcttgacgaaacgagagcatagcagcagtgtatccaaagtattctgcaaattgagatctattgttctgaattttagtatacttatatgattattgtgatcatgttatacacatttagatcttttagactgaactaagtaactaaccattctcaggggcggatccaacgtggggactcgagtcccccctacacccacaagacccatggatacccccagagcaccttctttaatttttttcaccataaataataaactaaaggtctttagatggctaaaggttagagaaacaacgtacttgaggccccccaattttctgttgctggatccgcccctgaccattctagatctcagccagagatggggatgaattaggacaaaacaatgtttcggtagtaatctatgcagtcattggacagcattagctgaatatcatatgagatctatcaacaatgaacacatgtcttgcaagaggtctcttctgttggtgccttcgatcatttctgttttgttaatatttctgagtttcttacaactccaacatttccaggccctctgtaaggactaggatatcgactgaaaacaagaaaagtatgtaacaaatatcagttagatatatggactgtttgattggattgttggacagaggaaattgtaggaaaagttttctggacaaaataaataaatgcttggaaatagacagcatcatgtaaactaaacacattgctcacattgccaataggcagctctctaaagagcaaaccaattgcctcacgagctgtacatatcccttgtaaatgtagaacaagtaaaatgaactaaacatgactaatactcctgtatggagcaattaacgaagatgagtcctccaaaccaacttgtgggtatggataaaaatctaaatatgacaaaaattatctcgctatacaaatcctatgagtgagaaaacttgcaaacctagcgaggtgtgatggacgttagtgtcaaacttgaggacgacaacggctgcccctccgctgaggccatcggcggtgcatatgttggcacgggcatcttagctggtaacacgggtagtggtccattggattggagaactgccatggcagctctgatagatggacgtgcacatcggtccggatgtgcacaccagagtccaacagccatgacacactccatgctagttgtgtcgtattcattgttgagccgctcgtctgctgcattgagaacggctccttggccgtacaggtcccacacccattccaccagtcggaagaggcaattgttctgggtgtcctgcaggctaattggtctcctcccacatgccacttccaatagaacaatgccaaaactataaacatcggactcagcgcttgctttgcccgtgattacgcattcgggatcaagatagcctggtgtccctgaggggtgagtcattgtttgtatcccaacggcatggtcaataagccttgcaaggccgaaatcgcctagcttcgcattgaaggattcatccagcatgacgttgctcggcttgatgtcacggtgaactacacattgatcccactcctcatgtaggtagagtagtgcagatccgagtccatgaacaatgttgatcctgtggcaacatccaagttagcagatgaattgaatttcaaaggtgtcgattgcacataacgaaaattactaaatcaatgagttaattaataaacctcattggccatgtaaggaaggtgccattgccgtggagatggacgtcgaggctacggttggggaatagctcgtagacgaggagcagctcggtgcggccatggcaccagccaatgagctgcaccagattgcggtggcgtagccggcttattacctttatctctgacttgtactccttcctcccttgcttagaggaatttttggcgaacctctttatggcgacggcgaggccaagctctctgaggtagccccgatacactgcaccgaaaccgccttgcccaagcttctcctccggcgcaaagctcttcgtagcgtcgacgagctcgtggtacgggaaccgccttggtcccatccccatctcaatctccacgatgggctcgccgtcgtcgtcatcgtcactgccgtgccagcctccatcctctgcctccctccttttcttgctctgacgtcgtcgtacaaggactgctaccatggcgaagaggagaatgacaaacattaccgcaccaagtgtggctcccgctacaactccgccacgtctggaatgcgacgttatcggggtcagggaaggcggtggtggtgacggtgacgacggcggcggcggagatgctacttttgctgccagcttctgctcgaacgacgaactcgacttgaagtaccaagaagtcagctgatgctgctcaaaggctgagcccgttgatgccgagaagccgacggtgacgttctccggcaaggctctcttgagatcaaccatggagctgagggtgtaaggcgtcgtcgtctcatttatccatagcttaattgacagtattctcgaattgttgttgtagtcgacggtggcggtcatgttcccgatgaggctgaagtttggtagggactcgttcgtcacagatacgacggagttgacgtcgatgccgatgtggtcgttggttgtgttagggtcgaaggggttgacgaaggtgtcgaactcgacggcaacgaaccggttctggccggtcgagacgttgccgactgtctggttcgttaggccgaggttttcgccaccttcgtggcccactggtaacctcgatggatagctggtgaggaagaaggccataccgtcgccctttttgcttctatcgctcggagcgataatgttgaaggagaagcgcgtggtgaagctggccacctcgccggtggcggcgtcccagagctgcaccggcggcgcgtacaccacccgtccggcgctgttgcccatgcccgacacactgttcgcgcttatgtcgacatacccgacgctgacagaggcttggccttgaatgtcgatgttctgattgtctgaggaggcgaaggtggggtagttgaaggacaaggcggcgacaggagccggaggctgcatgtagcagacggagaagaaggtgacgaggccggcagcgcaagtgatcaacgaaaagccggccatcgccgccggccagagccagcgtcggcgcgcaagccgcaaggtgggttgatcggctggcttgacttggagcaacgagtcgatgcacaatgcgtacactgcttgtagtgcactggcagtgaatggtgccccttctccctggaaaaaaaacccttctttttgatggagctatgtgaatgtggaactatggaagctggactacaataattgtctttgtcgagctgaaaagaacaataccccaaaaatcaacgatgctgctacaatctccatgatccatcggagagacggagaaacatgcataattgtaagtaaatcgtaatgttcagacttgagagatattcagggttgcctcatgcagtcgtttgacgcagaacaagagcccagcggtcagtcaatggcccagcttatctgaaactatattgtgccaactccactgatcgatcgatggagagtgatgcggatcgcagaaagactttaaagactcccctttggccgtggagtttagtctccgcaaatttgagctttgttgtcatctagtacaaccgatcgaagaccgaattaagtgctgagttccagcttgcagcatacacgcacacgaccgtcaccgtgttgaaaaagacagtgaactctctactgacagtatgagctttcaattacttttcgagaccttttacggcaattgcgaggtatttaaaggtatctggaggtggaacaacgtgtacccttaatcaagagaggggcaaggtacgaaacaaaattattgtaacatgatggcaatggagtaattaactagtaaaacatgggcattatacatgaattgaatacctatatccatcgatcagtatatcattgtgcagattggtatgtcgtgaggaaaaaaaagtaaatcacggatacaccgttgatttagcagcgatcaattcgatctgtaccaaaataaacagaaagatcgcatctcctttcttctctcccttcgcttcgttcttgttctagggtttgaacggttcaacggaaggagacagaggaaaaagcgtctgcatggttgagggttgaagaggagatgaggtagcccggtcgatgactaggcgcaagctagcgcatctaaaagttatcctatgcttattcacacagttgtttagttatttatgtagtttataaactccttatataaggtactggaatttctgtgggatagtaaatgagatctccgcctatggtgttcttctagtgtttgaacaggtgcactcacgaggagacacggtcgaggaagaagatctggcatggtcgagcatttgacaggaggcaagacctgattgacatgtgcaggttataagaacacaacgtaaatctagagaaaaacacgtaaaagagaacatcaaagaacggtgtaactctagataaaatgatgcaacttaagaacctgtaatgctagtgccgactaaacgacttaactcaaacacaacgtaaatcaaatctagagaaaaccacataaaagagaaaatacgcaaataataacatgtaaagctggtaccggggaaattaatgttaacttcgtacgggagtacctacgcggtaccgattctaattttggagacaattctaccctttttgctctaatagtaaaattatatttttatccttagtacttaagtacctataccaatagttaaataccttttacatgatacctatgattgaggagtgttggatcttataccttttttggaatgcaaacaccgtaaaaaagcctatcagattttgttgaggaaattgcagcagtaaagccactgctgaccctatcagaaccaactcttctctttcaaattttggcttgatcactctgtgaagtagcagagatgtcaatcttggacgatatgcttgctgcatgaatctcttatgtcttaaatctggcaattggctgctgttatttttgtgtgttaacaattttgcttcgatgttctcgattccgcgttcaatcaacaccggagtactgaacataaatatccacaatttgagacgattgcataagaactgcttcagtagaaaatgattggaggctctttgtgctcttgtttacagtagctagagcctatattctatttattttattaaatttagcttattaattatatctaggttcctgttgtttatcgacgaaaagcctgtgatggtagtgttacctatcttggttcctcttgttaacgccattgtgttgcatgttgtttttcctctttcttgtgcctttacttttcggattgagctttctcattttgtcttgaaagttgaaacaatactttagactttgttcttccacggtaatgaagatttggagaaagggaccagttcgaaactgcactgaaaattccaattcacctatttctattacgctggttgcttgacgaaatgagagccaacgatagaagcaacatgaatgaaacataatgtatcaaaagtattctgcaaattgagatatattgttctgaattttagtagtgtgatacctatatgatttttgtgatcatgttatatacatttagatcttctagactgaaaccattctaggtgttagccagagaagggaatgcattaggacaaaacaaaagtttaagtgataatcaatgcggtcgttggccagcattagctgaatatcatatgagatctatcaacaatgaacaaatgtcctgcaagaggtctcttctattggtgtcttcaatcattttttttttgtttatgtttctgaatttcatgcaactccaacaattccagaccctctaaggactaggatatccacttaaaacaagaaaagtatgtagtgaataacagtcagagatatggacggtttggttggattgttggagaggaaattgaaggaaaagttttctggacaaaataactaaatggttggaaaactgaaagcatgatgtaaactgaacacaattactcatgttgccaattaggcagctctctaaagagcaaaccaattgcctcatgagctgtacatcctattcaagcggcaacttgtaaatatagaacatgtaaaatgaactaaacatggctactgtacggagcaattaacgaagatgagcccttcaaaccggctaaagtatgcgaaaggaacttgaggtgtagggatgcaagtagttcgacttgttggtatggataaaaatctaggagtaaatttcacaaaactacaggtattttgaccaaattatcacaaaactacagatttaaagagctgtatcacaaaactacacatttaacaccaaatttatcacaaaactacagattttaggttaactatcacaaaaatgcatatttaatattgaacttatcacaaaactacaacttttagagtttaaatccctagcactattgttatggtggagctataaacattattactttgtgattaaattgattctaaacctgtagttttattataatttagttactaaacgtgtagttttgtgacacttcatcttaaatgtgtagttttgtgataaatttggagctaaatgtgtagttttatgatacaactccttaaatctgtagttttgtgatagtttggtcatagtatctgtagttttgtgaaatttactcaaaatctagatatgacaaaagttgtcttgctatacttatcctatgagtgcgaaaacttgccaccctagcgaggtgtgattgatgttagtgtcaaacttgaggatgacattcctgtcgatgatgaaagttgcccctccgacgaggccataggcggtgcatatgttggcacgggcatcttggatggtaacactggtagtggtccattggattggaggaccgtcatggcagctctgatagatggacgcgcgtatcggtccggatgcacacaccagagcccaacggccatgacacactccatgctggttgcgtcatagtcattgttgagccgctcgtctgcagccttgagaacgactccctggccatataggtcccagacccattccaccagtcggaagaggctattgttctggttgtccagtaggctcattggtctcctcccacatgccacttccaataaaacaacgccaaaactatagacatcagactcagcgcttgctttacctgtgatcacacattcaggatcaagatagcctggcgtccctgaggggtgggtcattgtttgtaccccaacggcatggtcaataagccttgcaagaccgaagtcgcctagctttgcattgaaggattcatccagcatgacgttgcttggcttgatgtcacggtgcacgacacattgatcccactcctcatggaggtagagtagtgcagaaccgagtccatgaacaatgttgatcctgtggcaacatccaagctagctgatcagttgaatttcaaaggtgttgattgcacataatggaaattatgacaaattaatgagagttaattaaaaacctcattggccatgtgaggaaggtgccattgccgtggagatggacgtcgaggctacggttggggactagctcgtagacgaggagcagctcggtacggccatggcaccagccgatgagctgcacaagattgcggtgacgcaaccggcttatcaccttgatctccgacttatactccttcctcccttgcttggaggaatctttggcaaacctctttatggcaaccgcgaggccaagctctctcaggtagccacggtacacagccccgaagccgccttgtccaagtttctcctccgtcgcgaagctcttcgtagcgtcgacgagctcgtggtacgggaaccgccttggtcccatccccatctcaatctccacgatgggctcgccgtcgtcgtcatcgtcactgccgtgccagcctccatcctctgcctccctccttttcttgctctgacgtcgtcgtacaaggactgctaccatggcgaagaggagaatgacaaacattaccgcaccaactgtggctcccgctacaactccgccacgtctggaatgcgacgttatcggggtcagggaaggcggtggtggtgacggtgacgacggcggcggcggagatgctacttttgctgccagcttctgctcgaacgacgaactcgacttgaagtaccaagaagtcagctgatgctgctcataggctgagccaattgatgccgagaagccgacggtgatgttctccggcaaggctctcttgagatcaaccatggagctaagggtgtaaggcgtcgtcgagccatttatccatagcttaactgacagtattctcgaattgttgttgtagtcgacggtggcggtcatgttcccgatgaggctgaagtttggtagggactcgttcgtcacagatacgacggagttgacgtcgatgccgatgtggtcgttggttgtgttagggtcgaaggggttgacgaaggtgtcgaactcgacggcaacgaaccggttctggccggtcgagacgttgccgactgtctggttcgttaggccgaggttttcgccaccttcgtggcccactggtaacctcgatggatagctggtgaggaagaaggccataccgtcgccctttttgcttctatcgctcggagcgattatgttgaaggagaagcgcgtggtgaagctggccacctcgccggtggcggcgtcccagagctgcactggcggtttgtagaacacccgtccgacgttgttgcccacactgttcgcactgatgtcgatatacccgacgctgacagaggcattgccttcaatttcgatgtactggttgtgtgaggaggcgaaggtggggtagttgaaggacaaggcggcgacaggagccggaggctgcatgtagcagacggagaagaagatgacgaggtcggcagcacaagtgatcaacgaaaagatggccatcgccgccggcgagccagcgtcgatagatcgtgtgcaaggtgatactgatacagtactgtgatactagtactgtgtactgatcggcttctccagctggaggagcaacgacacaacttcctatactgccagtctgagtctgtatttgaggtatcctccattggacccgttctcggcctggcgcgtgacgacgaaacaagagtaagtcaaaccacatgccactaaagtggagtattcgtttcgtacttatggtacaatgtcactgaactcttcaaataattgatactagcatatattactgtctgtgtctcctctagcactaaaataaatatagactgtagccgttgtgctccccaccggccgtggcccgcggtcgaccccgtaccgtacacgctcaccctctagttactgattggactaactgtatttatggcgtcatatttttcattaaaaaatagtcgatatgtatttatattgtaagtctctaaattacatatgtaattttaatgtatttacaatttaagttctaaaattgcatatgtaagtcttaaaattacatatgtaaatcttaaaattacatattaaccatatgtaaatgatgcgtaagtggggtgtaactagtatgtaaatttgtataaatatataattacaacaataaagtcaattgactgctacaaacccatagcaactccggatcaacaaataaagtaaaaaaaatgcaaagggataaacaggtggagaaacggatgtgcatcgtgcacacgatgtccagcgcagcgcataccagccgttaaaatccgactgtactcagccacataatgtggcgtcactttttcagcaaatccgttttaaaattagttttttttctccactatccatctagaaactacaaaccacataatctttagctgccctttggcgcattttgtttggtgtttctgtagagatgtgctgaactgggatcatgttcctcttaaccttggtgacttctttatccttgctgacattagagctgaattaaacatatagctgtgaaaattgccctgcttgctgccatttgctggactctatatatggacaacgagaaacaacatcgtgttcagggataaacttgtttactcacccctaatactacctttccaaattgtctctttcttattgcagtggagtcctttgcatcggctggagatgaagagtgatctagagaagctggtaaagaggtttaaggagagaggagctgctctaagacaaaacagaatacgagttgattgatcttgctagccccatgcaatgttttggcgtttggtttgttttagattgctgccgctttttttttaacgagacggtgcgaagttctattgatagagcaggaaaaaattacaagattacaaccttggaaggtcgtaaccaggaaaaaggaaaaaaaatatactaccacccacacaccgacagcgccaacacacagatccgggagaaggctagcaccggaccggccaccgctaagcgtgaccgaccaccgctaggccaacaacgggacatagacgagatcgcccaaaaacgcccttacaaccaacacaaagcccgactctattcacgtcttccggatttaaggagagggggtgagagaaaagaaggaacacctctccccctagggcctccgacgtgaccaacttgtaggaactaggatgctgccgcaagaggatgagaatctagagcgtgcttgcaccaattgctcgagtgatttcggcaaggggatacctaaacgacgtctccaaggagagaagcgatggaaaaccaacgccaccatccgtcaaggtctcaaaagagccaatactgggcttttgcccggcaaccacccttgaggggtgagacggcacgacaacgccctcaggagggagaatgacactcgagcactgatgctgggttttcacccaccgctcaccacctgcgagtccacggctgacgcaccgatgctccaccgaccgcccaacctctccgacatgtgggaccactgcatcagcgccccctgcacagaaaaatcgattttcgtgtgcaggcctcttaactggaacgcatgcgaaaatttcaattttcgtgtgcggctctttaagaggaccgtacggaaaaatcgattttcgcatgcggtccacaaatcgattttcgcgtgcggtcatattaagtgaaccgcacgcgaaaatacctctccctcgcactcacttcaaatttttcacacctcctctcccttcctttactttttattttcactcctctctctctgtctctcactttccttctctatctctttctccatctctttctcttctccactccactcctctccgtggctggcgacgaggcgcgtcgaccgggtgggcgcgccggcgagcggcgaggggcgacggcaaccggctcctaccaggatccggccgcggcggccgtcccccgcccggatccggtagcggtggcagtcggcgcgacggtggcggcggcaggcgagctcgacggtgacgacggtttcgacggtggcaggctcgatagcgatgacggttgcggcagcggcggctgggtgcggcggcggcgcgacgacagcgacaacgccgggagtggcggcgggtgattccagggttagggttaggattttttatttttttattttttttttgtgcgtgcgggcggtataatttgaccgcacgggataatcgattatcccgtgcggtccacttaacccgaccgcacgggaaaatgattatcccgtgcggttgggccgcccgcacgtgaaaatattgattttccaagacccctgagtgcagatgggcaaaacctctgtacggaaaaaacccatttttaccgcacggaaaaatgcttttcatagtagtggctccgcgtgaccgcaaggacggcggcagcggggcttcgcgcaccacgcgcttgtggcggccgggggagcctccggaggtggcggcggcggtagctttcccatccagatccgggccggcactggccagatctagcggggcgccgggagctagcggttggcggtgggggaggggttggcgccggggctagtgacggcgcggagactggcggcaggcacgggtggcgtcgtggtgggtgggcagaggccactcgcgccgaagttgcagcgtcggcgtcggcgttcgtctgcgcgggtccacagaggtggcgctgcgcaggcaggggctacggcggcgtggtggttgcggcgacgatggacggctgtggcgcgcggacgtcgaagccggcttgctccaccctggatggatctgagcgttcgtggccgaatccgtcgcctccgcgcttgatctggccagggcagccagccagcggggcggttgcgtgtggtggcgttgcatggctcgggtgagctccgatgagctcgatggctgcactgcgtcgcctaggcaggttccagtggggttgctcgctggcgacgagcctcttgctcgcgatgtgcggatgtggagttggcgggacgttggcttgcgttggcatgaagcaggaatggggcttgacatccacggcggtgtcttcctcgttgccggccgagtgttctccctccttttggtttccaccttctttggccagaccctgttctggttgtggggaatgctagggggagggcggaggctccaacttgctgtaggaatttgcagcggattgatggcgtttcgagggtggccaagggcacatccttgccgttggttacggtcaaagtatgacttcttgtgagacgccatggacttttctgtggccgtcgatgtgggggtgcttgtgtgggtgatatgaagacactagtgaaagccttgtcgtgcctttggccagttcgacgatgacgacgcccgtgggtgccgtttcccttcttggaggcgtcgtcatggcgttctttcatatccctcacaaatcttcaggtgaaaaaattgttccggatttcggacgagcggcggcggaattacgcgtcgtgtcctccttggaggcatcgtttcggagaagttcctatgcatcgacgattgttgatggcctttttcggttcaaaagctttgatactttaatgttcggcgaggccttcgccttcttaggtccgcttcgttcttgtggtgggtgacactctcttcggttgtttctactgatgaagtcggagctgctcgctgatgaggtgcggtgacgcttggcaacggtgacatgttacagtctcttccaaggagttggtgctagtcgtgtgaaggaagtggctctttgatggcttggctgatgtccattgttggataacggagctgcttttcgatcgctttggcgactttcgtggtttcagtgtcgctgcggttgtgaagtcggcgctgctgggtcgcttgggcggctagctcggcaacgataacacctcttctgcaatgtcggagctgtggtatcgcttttgtgtttagcttggcagcgatgtcctgtgtttgggctctgccgtcattgttagttgtgtagctaggtctcttgcttttttctctacggtgggtttcagccgatttcccataattaaccatgtagttgtatggtttttgggcccggtttcccttataaattaggtcaattctcttcttctaaatatacaagctgggacaaagttccacctcagttttgaaaaaaaaaacaatgccgcgagctgatcgcgaccgtaatttgtccatgcatttgtaatgctcggactcgaactcgagagatattagggtgttaaactaatgaatgtccatttttcttcagggatgtaaaatggatatttctcttaaattaatgatgtctatgtagagagcagaccaagaaaacatagggttttgattacgccacaagtgaaaattaaactgattactgtatcaccaagacacgtactcgtaagaattagccatacaaacaacaatagtactagttgtatgcttgcaactccctacagttccacgaagataccacaaatcaagaataaaggggttctttggatgccactctgtttattctatcagcaaatttgacaatgccacacttgtggaaaattttgactaaaaaatgatcaatttaggtgtgggtgtcgatggattatatctaatacaagaggtatacctgatccgtaatattgacagtcctgattgtcaaaaaaatatatgacatattattaatgtagtagaaccaacaaacgctaggttaagttagttaaatgtgtataccacaagtgtaacaaattaaagttttgcactcaatcaaacaacgcctaaggacactattggatcaagagtgatgtgggaatgcgcccccctgggtgtgaagaaaatagtcttccgctaatttgcgcgttgtttgcaatctggaaactgaagaccgggagtgggtccagcttaagtcaagggtatttagataaatactcaagattttgtatttaaaaataataggtagatagatatactatgtgatgcatgtgtaccaaaacaaaggttgtattcaatccaagaggttatattaaactcataatacgtatgtgatatatatatatatatatatatataggacactcatatggggctccatggtgcccaggcaccatggtatgaaatacacaaattcgcccaaatttttcaaaattttcaaattgtgagtatatatctagttataagtattcgattcatacctatacctagcaataaaacaactcaaatttatctttatttcataatccaatattacatacctaactaattatatgtttggatgttatatacctagaatcaaaatctaacatattacatgtttaaattcagttcaaacttgtttgaactagttagtaaagtagttaatgttaatacctaaacatttaaaaaaaattcatgctcatttgaattgagtatatactcaatttgaatcatggagcccgggcaccatggagcaccaaacaaatttaatatatatatatatatatatatatatgtatatgtatacatgttatattttttttgcagggatatatacatgttatattaggcttctgcctacaagtttattttaattaccccctcatattttgaataaacaattaaccttagaatcctaacccggtcctgctaaagaccgaaacgcttagatctatactatagctttggagacttggacagcgttcgtttgggtgagtttgagggagaaaacgtatcgttttccgcacgatggtacgtttttttaaaaaaaaatctataggaatgttgctttaaaaaatcatattaatctatttttaaaatttaaaattgttaatactcaattaatcatgagctaatagcttacctcgttttgcgtatcttcccaatctcctcgatttccttctcctcgaacacacctttggaagagatgagtcaaaatacatgtatacagtaagtccgtccgtacgtgttgaaaaacaagaaatggcctgttgggccatatgcctgaacgaaatactccaaacgtggcctgttccgctttttgcgcctgtcactgcgggcgaaatgcaaatatgtaccttcaaactgctggccacttgaattttactttccagttttatcactgctggccatagctgcatgttgctatagtggaggagtataatatcgttcacttgttgtggcgattggatcagcaaatcaaggagtaccaaccatccaaattaatcacgcgctcactcggggtcgtagctgttgctgtttcgtgttgagcaagagaatatccagactttaatattctcttgtttgtgaattgtgatatcacctgccagctgggtcttgtcaggtcttgagcaagctcggcatcatgaaacgccttgttgtttaaatgatcgatcgaacactgtctttgctaatgtacaattgtgtgtataggaaactcggcgagttcacatgcgagtgccaggatcactgcatcgctataactgaacacctgaaaatgcatagatccattgcatccgttgcctctactctactgagcggatgaaagttaaattggcgcacgtaaaaaaaaaagctattagcacataattaattaaattttaattattacaaacttgataaatgtatttatttgatattttaaagcaactttttatatagaaagttttcgcacaaaacgtaccgtttagcagtttgaaaaacgtgctaacgaaaatcgaggtaaaatctgtatgtgtgaaaaatgctagtggttgattggttagaattaatggtactgctgtttgtttgcatatttttttcttgtctaatgatgaaatcgtttgctttgttcgtgagagaatttatatgtgctacatacccaatttggtgccgaatgctcattaacttgcctctacggctctacctgtgatgttccggtggccaaattatattttttaacgaatcgatatttagatggtgccaatttcatttaatagagtagaaaaaatatataagaaaaggaaaagaaagcccgaaaccaggtagcaatgctgcgaggtgttttgctaccccggacccaagtcttagcgaaccatattttgtcgcgtttgaacttaattacgtgtacacaatctcccacggcatttctctcaactttttcaccaggccgaccaaaagttgacagccagcgttttgcgccgatcatcgtatgagatctatcaacgcgatgaatatgtagtcctgcgagaggcttcttctcttgataccttcaatcatttttgttcttttgtttttgagtttcagttattgcaacttaaacaataaatgagttaacccacagaattgctaatttgccatgtagatctctgcctgagggcgaggaagagaagaatatattcttaccttatcattgactctagacaaacgatgaaggactctaggtacaatatatgcaatgaattttttttaagcgaacgattgcaggagctctgctggaatttttagtaagtgagaaagttcaggttaaaaaaaggttacagggatccggagtaaaaaacaccccttttagaacaactggagaataccgcaaggtaagctaagaaaaactatcgacgaactaggcggttcaaaaatgaaatgttgctctgccacgatgaaggactctagatacaatatacgatgaaaaaatatatatgatgaaaagatggtacaccgaagtaaatttggaaatgatggctatatttgtggaatggttccttgtgtaatgtggatgacttaggaatcgagtcaagctcaatatagttgaacatgccctaaggaataggacatccactaaaaacaaaaaaagtatgttgagaatgacagcatccactgaaagaatgaataaagcgtagagagaaaatgacaggaaactaaatggttggaaaattgaaaagcatgacgtaaatgcatgtacgtacattactcacgtcagcactaggcagctctaaagaacagattaacggggtcacgtgctgtacataccattcaacgatcaactctaaaataagagcaaatcaaatgaactaaaaaaacatttagcaccatcttttcacttatgattatgtatgtaaaccaaaatttaaattttaaaacttagtttttttaaaaaacaagtgtgttttggttttatttgtgatggaaaattggtgagaaaattggaaaccatgtaatggtttttggttgaaaatttggtttggaatattggcgattatcggcgtgagtgctgcaatttaaatctctaagggtttgtttagattggtggattatcacgggatttttggaggaatactattcataggattgtttttcccttttaataccattcggatcacaaaaaccaatcataagaaggtcgcaggaaaaatttcctttacttttgcttccatgggagaaacatttgaaaatatccatccactctaatctcttttttcattttcttcgtgttggaacgaggcaatcaagcattaacaaatgcaaagaacagagaaagaagaatcagcgaagaacagagaaagaaaaggcagatctcacatgattggaaacatatcctatgcacacaagcttccgtatacactccatgcacaccaactagcagatgtcacagaaaattttagaaaaaattggacacatactcataatagtattacacatatctgcaaagtctcatattcaaattcattatattttagtcgtaacaataaagtgaaaaatctgacagtttttagggtaaaaatctgtcagaattttgtttttttgttacggctaaaatataataaatttgaagataagatttcacacgttggtgtaatactattggaagtatgcgtccaattttatctagaattttatgtgacatttgctagttggtttgcacggagtgtgcacggaaagcttttgtgcataggatatgtttcccatatgatttctttaaataagttccgtacaggaagcaaagcccatacgacaaagaatcccaagagcaaacaagagcaaagaggtcacgcgcagaggtcaccggcaacggtatcgaggtcagcttccagtgtggagctaatgcggcgcgtggcgtgcggaggtcgccggtgacggattgaggttggcttcggtcatggataccgcgcgtgaaagttgccggcgacggatcgaggctggcttctggtgtgtagtggatgccgtgcgcggaggttgacagcgacagatcgaggccggcttctagcatggagactggagtggatgccacgtgcggaggtcgatgatgacggggatcgagagcagcaggccaacatccagcgtggagcagcaggctagcatgaggtaccggtatctcgaggtactttttgttggactggagcaaaatctttttctcctatcttacgtttttcctatgctataatccgaacaagccctaaactagatttcaccacgatagcaagatctcaggccctcctgagaaaggatccctgcccatagctaggtatccacaattttctatctaatctgaaataagaacacgaagtagaaaaaaagtgcacttataattaaatgatgtggatcaatgtgtaccatgagtgggcaagcgtacatccctaacgaggtgtgattgatgtttgtgtcaaacttgaggatgatattcctgtcgacgacgagtgctggccctctgatgaggccaccggcggcccatatgttggcacgggcatcttggttggtagcatcggtagtggtccattggattggagaactgccatggcaactctaatagatggacgagcgcatcggtctgggtgagcacaccagagcccaacaaccaagacacactccatgtctgtcgcgtcgtagtcaccgttgaggcgctcgtcggccgctttgagaacggctccctggccgtaaaggtcccatacccattcgactagtcggaagaggccattattctggtcatccagtaggttcattggtctccttccacatgccacttccagaagaacaatgccaaaactgtacacatcagattcagcacttgctttgcctgtgatcacacattcagggtcgacatagcccggtgtacctgaggggtgggtcatcgtttgtgctccaatagcatggtcaatgagccttgcgaggccaaagtcacctagctttgtattgaaggattcatccaacatgacgttgcttggcttgatgtcacggtgcacaacgcattgctcccactcctcatggaggtagagcagtgcattcccaagcccaagaacaatgttgatcctatgacaatatccaaggtagttgatcagttgaatttcaattgacatttgttgattgcacattgcaagaaataaaaaaaataaaatctgaaatattaatgagagttaattaattacctcattggccatgtgaggaaggtaccattgccatggagatggacatcaaggctgcggttgggaacgagctcgtacacgaggaggagctcattgcgaccgtggcaccaaccgatgagctgcacgagattgcggtggcgcagccgacttatcaccttgatctccgacttgtactccttcctcccttgcttggaggagtctttggcgaacctttttatggcaacgtctatgccgagctctctcagattgccacggtacaccgcgccaaaaccgccttgcccaagcttctcctccgccgcaaagctctttgtcgcgttgacaagtatgtggtatgggaaccgcctcggccccgtccccatctcgatctccacgatgggatcgccttccgagtcgtcctcctcttcctccctcatcttctttctctgacgtcgtcgtacgaggattgctaccatggtgaagaggagcacgatgaacagaattgcaccgacggtggctcccgctacaactccgccacgcgaatgttgtcctgtcggctgcttctgctccaacgtcaagttgaagtaccaagaacgcagctgatgctgctcaaaggatgaacccgtcgccgccgagaagccaacggcgaccttctccggcaaggcgctcttgagatcaatcttggagctgaggttgtaaggcgtcgttgagccatttgcccatagcttcaccgacatgatgctcgaattgctgttgtagtcgacgatggcggtcatgttgccgatgaggatgaagctaggcagggattcggtcttcactgaccggagggcgttgacgtcgatgccgatgtggtcgtaggtggcgtcggggtctaggaaggagttgttgtaggtgtcgaactcgacggcgacgaaccggtcgccggcggtggcgttgtcgaaggtctggctagtgaggccgagggcgccgccgtagcccatgtacggcatcctcgacgggtagctgacgaggaagaaggtctgttgcagttattcctggtgtggcccgagctgatccggacgacgcgggaatgcaacggtgtgtaacggtgtggcgagatgcccgggcaaaggagatcggtggcgactagttcgtgcagcgcaggaagcgcgatgaagcagagtgcatgacggggagtaacctcgtcgtttccacatttgtaggatcaaagttgttagcctataaatagttggtggtaacagaatttgtacgcgcgcattcagttttcatttcagttcgaaataaacaccgaaagttgcccaaatactctcccaagttattttgttcttgttctctgcattctctgaattctctgtctccctgaaagtttcttcagtctgctgtgccggatagctacaggacgcccacaaggtgttcgattggtgttcttcgccaacaagtggtatcagagcactcaggttgagggctgatctgacaccatggcgttggttccggcgggagccgcagcggatccggcgagggggagctcagggagtgcgttctcctacccacaactcacggcgacgaattacaccagctggtgcattcgcgttcaggcaatgatggaggaccagggcgtgtgggacgccatcgagccggcggccggggtggccgtcgacccaagaagggacaagaagtcgaagtcccatctgctgcagtccctcccggaggacttgctgatgcaggtggcaaagaagagatcggcaaaggaagtgtgggattgcttgaagacaaggttcgtgggcgcggaccgcgttcgcgaagcgcgcctgcagacgttgaagggtgaatttggtgccatggtgatggagccgggggaaactctggatcagtacgcgggccgcatcaccgcgatgagcgtgcgtcactcggtgttgggctcgacactgagtgattccgcgatagtgaagaagctgttcgacacggtgccagagaaattcatcagcctcgtcgcaggtattgagcagttttatgagattgataatatgccatttgaggaggcggtgggtcgtctcaaggcctacgaagaacgagttcgcaagaagaaggcggccgctggtggtgtcaccgccgacggtcaagtacttctcactcaggcggagtgggaggcgcgtttcaggaaggacggcagcgagtcgtcttcgccgcagaaaaacaaacctcccagcgacaggggaaaccgtgcccagggcggacgcggtcgcggcagagggcacggtggaggtggtggacgcggcagcgcgccgcggaacagtggcgctggtggctctggcggcggtggccgtgacaagagccacatcaagtgctacaactgcgaagaattcggccactactccacccagtgccctcatcccaagaagaagaaggtggaggcccatctcgcgcaaaccgacgacgcaaaccctgcattgttactggcggtgaccgaagacgagccggcgagcgggctggtcgtacacgaggagcgtgtgtggccgcagctgctgttggctgacagcggagcagccaccggggacatctggttcctggacaatggggcaagcaaccacatgacgggtgatcgtgctaagttcagagatctagacgtatcaatcaccgggagcgtcaagttcggggacgcctcaactgtgaaaattcaggggaaagggtctatcctgttctcctgcaagaatggggatcaatggctgctgcaggatgttttttatatccctagtctgtgttgcaacatggtgagcttgggccagctcacagaaacggggcacagagtggtgatggatgaagatgtgctcgaggtgttcgacaaaagtcccctgcggctggttatgcgggtgaggcgcacccctaatcggctgtaccggatcgagctgaagctagccactccggtgtgcctgctgacaaggatggatgagccagcatggctctggcatgcacggcttgggcatgtcaatttccaggcgatgaagctgttggctgacaagggcatggctggtggcatcccggcgatcacacatccaaaccagctctgtcaggcatgtctggttgcaaagcagataaggcagccgtttcccgcaacggcgaacttcagggcggaggagccgctcgagttgctccacattgatttatgtggaccgatcaccccgacaactatggccggtaatcgttactttatgctaattgttgatgatttctcacggtggatgtggatgttcgtgatcaaaacgaaggaccaggcactagaggctttcaccaagttcaagccgctggccgagaacacggccgggcggcgcatcaagacgctgagatcggatcgcggtggcgaattcctgtcgggcgaattcgcgcagttgtgcgagcaggcgggcatccagcggcatctgacggcgccatactcaccccagcaaaacggggtggtggaacgccgaaatcgttcggtaatggcgatggcacgatctctgatgaaagggatgtcagtgccgggcaggttttggggggaggcggtgcgccatgcggtgtatctcctcaaccggctaccgacgaaggcgatgggcgatcggaccccgttcgaggcatggacggggcgcaagccgcagctgggacacctgcgggtgtttgggtgcatagcacacgccaagatcacgacgcccaaccagaagaaacttgatgaccggagcgcgccgtatgtgtatctcggcgtggaagaaggcagcaaggcgcaccgcctgttcgacccgcgttgtgggcgtatccatgtaagtcgtgatgtcatttttgaagaaaatgtaccttggcaatggagtgtagtcgcaggggagcaaaactctaccgagttcacggtggaggaggatggagttgatgcaccgccggcaggagcgccggcctacccagtaccgcggtaccgggcgccatccccggcagtcccgcaatcgcctccggcaagcccggtaggggcgtcatcgtcattgccgacttcgccccagtcatcaccgagctctacaccgccttcaacacctgctaccggctctgccgggccggtggcgtcaccaggttccggcggcgaccttagaagcgatgagggtcccgtccggttcaggagtcttgaagatatcatgcgggaggcaccccgcgtggacctggtggaggatgaacacgatggggacgcgctgcttgcagagatggaggagccatcgagctaccgcgaggcagctggccagccggcatgggagaacgccatggcacaggagctgcaggcgattgagaagaattcaacatgggctctcactgcattgccggcaggacacaaacccattggcctcaagtgggtgtacaagctgaaaaagaacactgccggcgaagtaatcaagcacaaggctcgtttggttgcaaagggctatgttcagcgtcaaggggtggattttgaagaggtgttcgcgccagtggcgcggcttgacacagttcgtgtcatcctggctatcgcagctgatcggcggtgggaagtgcaccacctcgacgtcaaatcggcgttcttgaatggcgatcttgaagaagaagtgtacgtagcccagccagagggttttgtgaaacgaggagaagaacacttggtgctcaggctgagcaaggcgctctatggattgcgccaggccccgcgggcgtggaacacgcgtctcgacaagtgcttgaaagaactcggttttgcacggtgcacgcaggagcaggccgtgtatactagaggaaaggggcaagctggtgtaatcgttggtgtgtatgttgatgacttgattgtcacaggagaaaatccacatgagatagccatgttcaagcagcagatgatgggggaatttgagatgagtgatctcggtcttctctcttactatctggggatagaagtaattcagggggagaatgggattgctatcaagcaagctgcgtatgcgaagaagattctgtctcagtttggtatgcagggatgtaatcccacctcaatccccatggagccacggtcgctgctgcacaaggatgctgatggaaatccaattgatgcgaccgagtaccggcgtgtcatcgggtgcctgcgatacttgttacacaccaggccggatctgtcctacgccgttggcgtggcgagcaggttcatggagcggccgacaacgatgcatctcaaggcggtcaagatgatactcagatatctaaaggggacgctggactctggtctggtgtttgcaagcggcagtggctcgttggacatcacgggtttcactgacagtgacttggcaggtgacatggatgaccgtcggagcaccggcggcatggcgttctatgtgaacagcagcttggtgtcttggtgttctcaaaagcagaagacagtggcgctctcgtcttgcgaggcagagttcatggcggccactgcagcagcatgtcacgcgctctggcttagggcgttgctgagcgagatgatgggtactgaagcaaagcgggtgaaactttttgttgacaacaagtcggcgatcgccttgatgaagaatcctgtgttccacgggaggagcaagcatattgatacccgctaccatttcattcgtgaatgtgttgagagtgggcagattctgattgagttcgttcgttctgaggagcagcgagcagatgcaatgacaaagggactgccggcggcgaagctggcgactgcacggcacctgttgggtgtgcgtgatctcaggccacgccaagactaagggggagtatgttgcagttattcctggtgtggcccgagctgatccggacgacgcgggaatgcaacggtgtgtaacggtgtggcgagatgcccgggcaaaggagatcggtggcgactagttcttgcagcgcaggaagcgcgatgaagcagagtgcatgacggggagtaacctcgtcgtttccacatttgtaggatcaaagttgttagcctataaatagttggtggtaacagaatttgtacgcgcgcattcagttttcatttcagttcgaaataaacaccgaaagttgcccaaatactctcccaagttattttgttcttgttctctgcattctctgaattctctgtctccctgaaagtttcttcagtctgctgtgccggatagctacaggacgcccacaaggtgttcgattggtgttcttcgccaacaaggtcatcccgtcgcccttgttgctcttgtttttcggggtgatgttgaaggagaagcgcgtggtgaagctggcaacctcgccggtggcggcgtcccagagctgcaccggcggcgtgtacaccatccggcccatggtgccgccgctcgacaggttgttccctttgcctttggtgagctcgatccattcggcggcggcgccggcgagcgccgcgctgccctggagggtgatgttcttgctcgcgttgctgaagctggagtagttgaaagatacagtagtggtagcgacgacgctaggcatgacgagcaagcaggctagagcagccatgaacggttttgtcatgaggacgccggcggccatggccggtctttgagcggaatcagcggccggacaatactgccaatgccaaaaacggaaaactactagtagtactcaaatcagcaggtggccagtcgccagtcgccactcagagagaccagtcgagatcttaaggactctgctaatttaacaagttggtggttggcaaatcaacactaggctccatgagaccatgaccctgacagctctggctcctcggaaggtgctgaaatgtatcatattttgtctattttgctaatagatgacgaagttaagcgtaagttccgtttcttgttggtatcttccctttttcttcaaatacattttcaagaatgataaaatcctttttatatatatacatcaagctggtttatatatatatatatatataaaaggtgaagctttggacgtcattggcctaggcctgcggattgtttgcaattttttcgtcttttttcaccaaattttataaaaaaatgtactccctctgtttcataatgtaagtcattctagcatttcccacattcatattgatgctaatgaatctagacatatatatctaattatctatttagattcattagtataaatatgaatgtggaaaatgctagaatgacttacattgtgaaacggagtaagtataaaatttagctgctcccttacttgatcaaatatccaaagaaagaagatctaaaatcttgatggtattttgcatagttgactagggctaggttcgggaggtggagttccacggaaaatggggttgtattccattaacacgtgattaattaaatattagtcttaaaaacttgaaaaatgaattaatataattttttaatgcaacttttctatagaaaacttttacaaaacgcacaccatttagcagtttagaaagcgtgagcataaaaaacgagagagtagaagttgagaaagttggaaaaagaacagcctaagaggactaactaaacaatgtataaaaaaagggacttttagggtacaatatacgggtagtatatgttgctagtatgaataagattgtgttgggaatttctcacaaaataggaaatgatctttagttatttcgtgttagatcttaactcggatagtaatcctaattgatcatgtgttagatcggattactgaccggatacatttgatttgattgtgccatctattcaacatatgggttaaatacatggaaaaataatgttcctcctttaatttatcgataccaggtttggagatattagtaaattacgttgttccttaatttaatgataccaaattctccttgctttccacgtttttcaatttgagggtcaaaaccgggggctatgttggtagtggtggtatcagtttttttttattattattttcaggcaggtagtatgagtaccagagtactccctcggtactaaaatataagtattcttaaatacttttaaataaattattggaagtttttttttggttaaaaatagaaaataggtgtacaatttttggaagtttatgatttgttaaaaatagaaagtaggtgcacaaattcaatgagagactgttattattcgttgagatgagaagataaagaagaaataactatattttttaagataaatttaaactctaaaagtaattatactactcaccggactaataatacttgtcgttttttacaggaataagatcaaactttaaaatcttcaactataataatttttaaaatatttatcttaaaaatatggggactatatgtatagagttgttttaaaatatactttaataatatcatttatttgttatattgtttttatatatattataatataaaatagtgtttaaagttgttttctatcggttggagtacaatgattgtctcgaattcgagggacgagccaatatgttgatttgatactagtgccactggcagtcgggcagtggcacacattcgagttggaaatgcataaatgcatgtgcatgaacagaagaaggtaccgccgtgcttctttggttcttcatcttcgacgtgacttgttttggcttacgcttaccccacttgccttactttctggatgtcagtgttatcgaaagaggtgcggacaactttgcgacagtattatatgtattaactaaacccactggttagtactagtaactcatatactctctccttttctaaatatttgacgccgtttaattttttttaacatgtttgaccattcatcttattcaaaagcttttgtgaaatatgtaaaactatatgtatacataaaaatatatttaacaatgaatcaaatgatagaaaaagaattaataattacttaaatttttttgaataaaatgaacggttaaacatgtttaaaaaagtcaacaacgtcaaacatttagggatggagggagtatttgcaacagtattatatgtatgttctgcataagtgttactccccctatcctctgatataagggattttaacatttttcttgcactgtttgatcactcgtcttattaaaaaaatttgtgtaaatataaaaaacgaaaagttatgcttaaagtactttgaataataaagtaaatcacaaataaaataaataataattctaaatttttttgaataagatgaatggtcaaacagtgcaagcgaaatgccaaaattccttatattagagaatggagggagtagtattttgtttttaagtgcttaagaatgaaaccgatagttttgaatttttgaaattggtaattacaatatcataggtatatagaataaaatctaatacttttaatcccttattttctgctacttccttaagttagggcatgtttagttcgcaaaaagaaaatttttgagtgtcacatcggatgtttgaccgaatgccggaaggggctttcggacacgaatgaaaaaactaatttcataactcgtctggaaaccacgagacgaatcttttgagcctaattaatccgtcattagcacatgtaggttactgtagcacttatggctaatcatgaactaattaggctcaaaagattcgtctcgcgatttcccccctaactgtgcaattagttttttactttatttatatttaatattttatgcatgtgtccaaagattcgatgtgatgtttttgggaaaaagtttttggaactaaacaaggccttaatacacacttcgaaattactgaaaataatttttttattaaataatatgaagctttaaattaataatactgagttgtacttgttatgatgtcttacttttttagtatttttcttgataaaggattttctgaatttaggattgataaaaatacaatattgtacattttctgagttttcatggtgttgtctaaaaggacaaacagtggtttctaagtgtacacaaagaagtaaatatatttattgatccttaaaaactcacttacaatatatgttctcttggaggggtctatttataaccttagagttaggtatgcattttttatatttgtcagcgaaatcagctatctatatcgctgaagaacctaatttaagttagttttacaagttggtggtctagactccttgtattgcggttcagagatgcgatttaaactcggtggaaacataagggatgtaaagttgatttaatccattggggataggcacgtagatcaggcttttcctagcggctgtcccccaacccaattcgttctgtaggcaatggcccatgaggaggatggcggccaccccttcaattgtaatgggccgatcgtttaattcgcttcaattgtagtgctgctgcagtacgtagcacctatcgttgcccatctccctcactcgacttattctaatgctggaacagaaaatggccggacagatctttctagagaaactacagtgccataagattcatggcataagtacacatacattactcaaatcggcaattaggcaacaccaaagaccaaatcaactctaaactaagaacaagcaaattaaaaaacaaacactaaacactagcactgatgcttgagcaatgaagacgagtccttcgaactggttgaatcggagggaaccgaggaccacgaggtgtgagtagcatggccactcgtcgtcgatatggacgacgactgcgtcacacctgatgacgacgacatccctgtagatgacgcaaagagcccatgaaacgaggccatcggcggcgcgtacgttggcacgggcatcttggccggtagcaccggcagctggcctccactcgattggagtatggtcatggcatctctgatagacggtcgcacgcttggatcagggtgcgcgcaccagagcccaagagtgatgacacgctccatctccgcagaatcgtagtcgccattgagacgctcgtcggcggccatgagaacatctcccttgccatacaaaacctaggcccactcaaccagtcggaagacgccattattatggctatctagtaggctcatcagtctcctcccgcatgccacctccagtaggacaatgccaaaactgtaaacgtcggactcggcactcgctctaccggtgatcacacattcagggtcaaggtagcccagcgttcctgacatggcggtcatcgtctttataccgatggtgtggtcgatgagcctcgcgagcccgaagtcatctagcttggcattgaaggattcatccaacatgacgttgcttggcttgatgtcacggtgcacgacacattgttcccactcttggtggaggtagagtagtgctgatccaagcccgagaacaatcttgatcctgtggaaacaaccaattaagcaagataaaaatagaattagatttgacactatcgaaacagttgagatgagaaagttaacgccgagaattaataacctcattggccaagtaaggaaggtgccattgccatggagatggacgtcaagactgcggttggggacgagctcatagacaaggaggagctcgttgcgtccatggcaccagccgacgagctgcacgagattgcggtggcgcaaccggcttatcaccttgatctctgacttgtactccttcccttgcttggaggaatctttggcgaagcgtttaatggcgacgacgaggccctgctctcttaggtagcctcggtacaccgagccgaagccgccttgcccaagcttctcctccgccgcgaagttcttggtcgcctcgacgagctcatagtatggcaatcgccttggccccgtccccacctcgatctccgtgatgggctcgccattgtcactatccgtgctcgcattctcctcatcctcggcctccctcctcttcttgatccgacgtcgtcgtacgatgatagttgccgtggtgaaaagcagcacgacgagcagtgttgcgccgacggtggctccggctacaactctgtgtcatgccagcgcc

SEQ ID NO: 6386 - DNA, 53474 bp, Oryza sativa
  unsure (1)..(53474): unsure at all n locations
tcgccgacgtggtgtaccacgagaaacgcggcggcggcggcgagagggcggtgtactgcctcgcgacgagcggcgacgtgcacgtcctccgcctccacgacgccggcggcgcgttcgagccgctgttcgacaggggcaacgcggcgttcgacgccgccgccgcgttcgcgccgccgtacgacacgatccgccactgcaccaatgccaagaacctggtggtctgcgacgacggcgacatgtaccagatctggcggaacaacacctgcaccaggatggggccattgcccggcgggggagagtaccgcgtggagtacaaccagatgttcgttctgagataccaccctcgccgccggccgtgctgggtgccagtggaggatctcggcggacgctcggtgttcgtcgggaagaacaattcggtggcgctgcgcgtggacggcggcggcggcggcggcggcgtgccggggctgagagctaactgcgtgtactggactgacatctgtccagctcgggccaaggtattcgacatggtttccggcaagtcgacgctgtgctttcatggcgtagaagaccaccgcgccatctgctggtacttcttggcgtagcagcagcaagaagcccaactctaggttcagcttgtcagcttccggaatcggattgagaaagtttgattgaattggttatgtggtattggaagtttaggctgaattctgtgataagagacagaagttttggctgtcttcgttgctgtcattccgatggtaaaaaaaaaatgagatgcggaagtaaattttcagtgctgtgaaaattaaacctgtttttcattgtttcagattaaaatagtttccctgtttttgagtgtatctgattgttgcttctgtgatacaataatgtagctgatcgaagtttctgaggccaaaagcatggccatatggtttctgatgaattctggtggtgtagctagcaggtagacttgtggataaacttttcttttctccaacaaaagttggataaacttttggatacttgtggcatgcttttcaaactgctaaattgtgtatttcgtgcgaaaactttatatatgaaagttattataaaatatcaaattaatcaatttttcaagtttgtaataattaaaactcaattaattacacgttattactatttcgttttgcgtgaaacacttaatctttatcttcatcttcatcttcaggatattcaaacaccacctaacagtgatatattacagtagagttagatgaactgcaaagagatgtgctgatcagggcaaagccaaggaaataattctgtcatccattcttagaggcatcaatctttattgtagatgaaaaatgcagtgtccatattcaggcagatgtatctttgtgcggattgattttctgaaaatttgatcgactatatgtagcattaccacgagagcattcatgtatgaatttatcataagctgaaaggttggatgatggacaaggatttttcagacgggataagattgattgttaaagaaggtgtcgtgcaacaacgaaatgcagagaccagtggatggatgggttagttgtactctctgaagattgaaaattttcagtgcaagccgctggcaaatctttgtgcgtgaattaggaaacggagggggaacaaaatttcatgcaccgtgttcacatcatcatcaccctgtcatctccggcatcctttgagccactgttcgacaaggccagccgcagggtgttccaccccgccgtcgcgtttgcgccgccgcacgacatgatccgcgcctcctccaccaattccaagaacctcgtggtctgcggcgacggccatctataccagacatggaggtgcgacggcgtccacatactcgttctccggtaccaccctcgccgccggccgtgctggctgccggcgaaggatctcgggggatactcggtgttcgtcgggaagaacaacaatgcggtggcgctgcgcgtggacgacggcggcggcgcaccggggctgagaggtaactgcgtgtactggatagaccattgcagtgatgaggccaaggtgttcgacatggagactggcaagtcggcgccatgctttcccggcgttggcgctatctgctggtgtcatatgcagagcagcagccgtaatacaactagtgtggcagcttcagcttatcagcttcagaaagggctcgtcatgcgtgaatcggcctgagttctccgagactctctctacacctagcagcttccagttcgctttatataggattacatagtactccctccgtcgaataaaaaaccaactattaaatgttaacacattctattacaacaaatctaaacataccatatatgttcatatcctgtgctaggttagagtttttttaaaaaaaaaaacagagagagtagctattaattaggggtgttaggatatccttaatgcattttcagtgagtggataataaggtgggacctactccctccgtttcaaaatataaatatttttgaacttcgacatagtatttgagatattactttgaccaacaatatctataataataataataagatgttttaaataaaaatagttgcatatttaagatagtttgtttaattataaatctagtaatatcaattttagattgtttttatttatttgctattaatagtcaaaatttaaaatgtttgacttgacactatgctaaaaatgattatattttgggacggagggagtataaaattaagttatactctcttcatcccaatgtaatctcatcaaatcctaagttattatgggatggtttggtttgtggcataaatatgtattaccaaattttgtcaatgccaaattttagcaagttttgacatggctaattttggtaaggcaaagttttgtttggattgaagccaaaatagcctaagttcactattgaaatggcctattttcttagacatgccaaaatttggcttcaaaccaaatagacacagaatactattgaaattgccaaatattggtaagtctaatttagacctcaaaccaaaccagccctatattttaggatagatgatgtgttcatttaattctaagttcatcttatagacactcctccccaaccaacgtagcgtgccacacccccaatcctctccccaaccaacgtatacattgtaatagtctatttaaaggattgccagattacaaaagttctgactcgaacttcacctattcaatttctaagtccaaccttaaccagattatttgaaatgtgtttggattattacactaccaaatttagtagggttaaaaattagtagcgaagtgaacaggtcctgtgaatttcgtagcacaaaattttgttttgtgctaattatagagggaatgccgattgatgatttcatagtacaactatctttttgcgccgaacacaagatggaatgtcgattgatgttgtagcacgaggaagccggcggcacgaaggtggacctctatagagatcaggaaggtgttaagacaaggagaccggcaaagtcggttcagtgttctcccagtttgccttttgcattgaagaggtagcataggtagaggtagcactaaccattaacattgagagcaaccaacaaaatcctcttctagctgtcaacacaaattcacaatcaaccattaaccagtatccaacacaactgaatcgcaaaggccacgttattctggagtaataaacattgagagcaactacgaaagagcaaactaagctgatcatgagacgttgccctacacgaccaaacaaacaagcagaagtgaagaggtagcacgaaccaaacacaaagcccatatatgcaaccagcataacaaaattacaactgcactggacggcttatattcttcacaagcaaaaaagtagactcaggtccatatcatcagcatcgttacaacttacaagtaggtagattggaaaacaaaatgcaactcattatcccaactagcattaacagagggggtgggtcctgatgaacaccgtccacgttttattctcagcatagacaaagcataccggtatctccggctcggcggccatggaataccatggcaagcaaaaggattctactgggtcttggccatgtggcggatcaggtcgatgacacggttgctgcagaaaatagttcaaaaaagaaagatcagtaagagcaaattgggcatggagtattgtacatggttaatagtttgaactgcaagtggctcacctgtaaccccacnnnnnnnnnnnnnnnnnnnnnnnnnnnnnnnnnnnnnnnnnnnnnnnnnnnnnnnnnnnnnnnnnnnngatgctcgacctgagtcaaagatgagtacagagaatgaatgatagcatacaggagatagttcgtccgtaaccacttagtttggagcagatctgcattacagatttcttacagggcctctcaagacaaaaaggcatacctgctgtcaccaacaaagtcagtagaaaccaggtcttcctcaacatatcctatgattcccttgagctttccctctgatgcagacctgtaaaacaattagcatattctcgtcagggacacactactaacttaaggataacttgtgcagttctgcgcccaccaacacacgtaactacacttttctaggaatccttcacatgtatgtttcagtaacatacatcactgagcggtatcccctgccacaagatgcagttctagcaacagtgcgcaaaatgagatgtacattccccttgcgttggaagctatatacttacttgatagcactcttgatagcatcatatgaggcagccttctcgattctaactgtgagatcaacaactgagacatcgacagtgggaacacggaaggacattcccgtaagcttgccattcaaatcaggaagaaccttgccaacagcctgcaatgcattgatgttagaagtcattaaggctgcagtcccattttactaacaaaacatgctttcacaaccaaaaactaccgcccacatgcacccccttttccctaagcaggccagaaacaactctgaacagaagcatgaacagcaagcaattcgtcataggacatgagagagaattcatacttgaataaagacagcgcacatgctcatttatcaacaaaaactctagggctgaaatcagcaagcgcgccatttgtgcagttacttgctattatcactgggtcttctacttaacattcccaaataaagtcaaaaagaaaactatacgcagccccataacacaggagaatacaaaattattggaactataaagaggattttgaactgtggttgtgcatgcacaacattgaagttcatgacgtactttggcagcaccagtgctgctgggaatgatgttaaaactggccgccctgccacccctccagtccttgctggacggtccatcaacggtcttttgggtggctgaaaacaagtacatcagcgttagctattacagaacatctagatgttcatattagctgccaaaaagccaagaaagtcttaccagtgatggcatgaacagttgtcatcagaccctcgataataccaaagttgtcatgaatgacctattggatgataacgagtcaattaagaaccaaaccaaaagtccaactgaaagtagaaaattgtcactcggaaagaaaaataccttggcaagaggagcaaggcagtttgtggtgcagctagcatttgagacaatatcaatatctgaagtgtacttgtcctcgttgacaccgcagacaaacatcggagcatctttgctcggggcagagatgacaaccttcttggcaccaccctgttttcagaacagccatgtaagcataaaaaatgcaccgaaatagctaacttatgcaacaagggagatgcacaacaagtacttttcagagtaaaaataaacaaggcatcaagtaataaaaaaaactaaattgacaacacaaagccataagttatatatgctaatacttaagaaattaaggcaaaagaattaggagctgtctgctttgtgatgcatcatcctaactttagaagacttaggtagtcactcttaactttgcaggccaaatctttttgggtaaatgcaaagaccttgacatatatcactggggttcataaacttcaaattttaatgagctttccccttgtggcacatctctgcctacatttagttatgcataatcaaaaaccatggattgcttagtttcttttagttagataatgatgcttttacacaaaggtgtccatcattagcaaaatcgtgtaagattttgtaatctaactacatccattaattcttaaaaataaccatagcattatttacttgcttgtatgcaatcccatgggaacaatatgtaacaatatgccaatttgttggaatgaaaagcaacagtgataataccttcaagtgagcagcagccttctccttgtcagtgaagacaccggtggactccacgacatactcagcaccagcctcagcccacggaatctcgtcagggttcctttcaaattgcacaggatcaaacatcagttccacgctcgctaccataaacaagttactttcatctaagctgtaatatcaatatcaagttacctgatgccgaaaacggtgaccggcttctcgcccaagagcagagtcttggagtccttgatcttgatgtcgctgtgcttccattggccgtgcacggtatcgtacttgaacatgtaggtctgcaaatcacacgaccaacatagaattcatcaatcgtgagcacaccacacgaaaatcaaagccatatgcagtagcaaacagcataattcagcaactaaacatgcgaaaaaaagtactcagatctgggaaaattaactgccatatctcaatcaaaacaactcccaaccactaaacatctctttgagcgagcacgcaaatgtatatctgagctaaaaccactgtagaaccctacaaacgactagatctgcacatgaagacggtgaaacccacagatcgaagagcgtaccatgtagtcggtggtgatgaaggggtcgttgacggcgacgagctcgacatcctcgctctggagggccaccctggccacgagcctcccgatccttccgaaacctgaacaaaatcacaatcccaaacacacaaaaaacccccactcaaatcaccacaaatccaacgaaaccacacccagcacagcacaaactcgtagtaattcagatagcaaactcaccgttgattccgatcttaatcttgcctgcgtccccaaaaacaccaccagaaaattcaccaaaaaaatcagaaaaaaaaacatcaatcagatcaggacgcgaagcaccagcagtaatcaaacgggggaattaattcgattcggaggtgagcataattacccatggcgagtggagatgcgaggacgacgagacagagacttgagattagaggaggagagaagcgtctggaagccggatatggagaggtggagagggtttaagcgctctcttttataaagccaagaggaaaaagtctaattaattattaataaagccaaatggaaccgagaaagcgtgaggaaaaaaaattaaaaataaaaatggaaacaaataaattaagcgcgaggtgcgtgggtgacctgtctttctttaccttttctccagaaggcgcagccggcgcagcgcaggggcaggcaggtgaggtgtcccgctgacgtgtgggcccgggcatgggcgaggcccacgtgtcattagctagtgacgcgcggcgggtagagtagagtacgtggcaggttgtggtttgtcgcccaagaaagaatcaggggaggtgaaagaaatagaaaagggcatatttgctccttcttgcttctgcaataatgcggggtaaagaaaaattgatggaaaaggatgtgaaattttgaaaaaagagaaaaaaaaagttgaactgatcgtgttgtggtgtggtgtgacatgggggtgttcgtgtcgaggtgtttctggctacgtgtcgtcgtttggtaacatattttaagaaaataaaataagaaagagaagagcagcgagctaaagatttgtagccagctgtagcatggacttcaagagacagtgtatgtatgacaggtgggatcaggtattaatagtgtagtatgtaactattgtatgaattaactattaagttgactatatgtgatttggagttagtagttggctaaacttgggccctgtttagttcacagatttttttcctaaaaacattacatcgaatctttggacacatacatgaaacattaaatatagataaaaacaaaaactaattgcacagttagggaggaaatcacgagacgaatcttttgagtctaattagttcatgattagccataagtgctacattaacctacgtatactaacgacggattaattaggctcaaatgattcgtctcgctgtttccagacgagttatgaaattagtttttttattcgtgtccaaaaatctatttcgatatctagttaaacgtccaatgtgacattcaaaaataatttttttttcttgaactaaacaggcccgtgctctaacagaaagtagccggcggcggcgacgggcgatggcgccgcatactgtttgtccggcactcacctgatcgaatccggatcctctgatgggtgtttgtctctgacctattggctattgccgattattaagagctaataatattcataatgacgtttaagttttgtccgaacattacattagtgttgttttgcagtatattccaaaaagaagaaacagtagtactaatattctacctcaatcaatatgcaccgtccattttatatttactttgtataacttataaataaaatcccaattcctaaaccgaggaagtattcatctacatcggttgtcaaaatagtctgtaaactttttaaatactccctccttctctaaatatttaacgtcgttgatttttttaaacatgtttaactgttcgtcttattcaaaaaatttaaataattattaattatttttctatcatttgattcattgttaaatatatttgttttacatatttcacaaaaaattttaaataagacgaacggttaaatatgtttaaaaatgtcaacgacgtcaaatatttagggacagagggagtataacgaaaaaaggttacaaacattcttacaatgcaagtagattgtttatcatcagcctcatcgtttggcatatttttttaaatatgccaaatgcatatttgcaaacgaaaatcattttgtgaataaaacttttatatatgtgttcttagcgatctaaaagcaaaggctgaaaataaacttcgatgaaaaaaccccaaaatcagctccaaatttaacgttgaaaattcaaattttggctgataagcatatgaatatgccaaacgacgaggtctcatgtgttattgccaacattccggaagggcctcatgtgttattgccaacattccggacttccggtggcaacaagacaagggctgtgtttagatccaaagtttggatccaaacttcagtatttttccatcacatcaatatgtcatacacacacaacttttcagtcacatcatctccaattttatccaaaatctaaactttgtgctgaactaaacacagcaaaggtgaaaaaaaaacacccggttgcaataccaatcccaattcccaatcgtccatccacgtgaaaaaaaagagagagagagagacaacaggaatggtgaccacggatgatccgcagatctcgcagctacgagcatcccgtggcgccgccgggggcccaccacgcagcggcggcgataatatcgggaatgccacgggagcgaatataccccagccacacaaacccactagcttccagattcttctgccagcttattcatagagcaagttcaatagtatagctgactactagctttaattaatttatagtcaatttaatagcttatttatacaatagttacatactacactattaatatatggtcccacctgccatatacactgcgtcttgaaattcgtgctacagctggctataaatctgtagcccgctgttcttatctctctttatttatcttcttaaaatatgtttaccgctggcttatagcctagtattgtacctgctcttaagctggtcgtcatctgtgtacccggggggtttggaaaacgtccacgtcaccgcctgtcaggtctcgcaaaaaccggcgaccgctcgcggcggcggccggcgttggctgggcggtcgccgtcgactcctcttcgttccatgttttattgtttcattttctttgtcaaacttttcttttagaagaagtaagaactctagaatctggagagtagtttgttctggaggcataggaagaagaaaacaagtcgagccgtcgaggagatgtgataatatgggtttttttttaacttattactccctccatctacttttgatcattatatttcatcttggcacacagaaaagtataagtaattctacttattatccatttaaacatgctactagttatttctcgtaaacaagctattcattaatattacatttctcgatgtccatggcaatcttgtggggaagaatggagagtcacgcattaaatccgagaaagccattaagaagataggttgttggattgaaatatgactatcaaaaataaaattttcagatttggaaatatgactatcaaaaataaaattttcaaatttgaaaatatgactatcaaaagtagatggagggaatatcatttttaaccctatcaatatatggtgttaccaaaatatgatatgttttggtgttatcaaattcggtagtatttgatgcattaagtttaaagtcttaccaagtacttattggtagagttttttaaaagtgaaaaattccggattttgtaaatttttgtatggttgcaatgataacaatgtatttggacttttaacctattaaaatttggtaatacaaaaatttagttatgttaaaattggtaataaattcaacaagtcctatactaagtatttttttttaactttatgacaagagttgatctcacacgataccaaatctgaactaaccactcgcgattactagtactgaaaagcttaaagatttccttttttttcttaaaaaagaggcgaggcttgagaagttgattgaccacaagattgctgttgcttcgcttcgattgtacacgggttaacttgaatacatcgcacagcaattttccttggaaaacaaagataagatagggcagggattgcagaccatggagcccaaaaggccacagagcagacgatatcggcaccatcctgtttcgaaaattggaaatttagaataagttcaccggaggtcccccaacttaacaccgagactttttgaaattccttaatcacaaaatcagaaatatgtacccctaaactatgtaaaaccataaaaaaatagatcccgaggtagtatagccgcccgctttagctgatgtggcatcctaatcagaaaaaaaataaaataaatatgtggggcctacatgtaaatgagagaaaatggtgtgggccccatatttctcatttctttttttttctcttctcttctcttctctcccgattctctcgagtggacacggcagcagaggggagaaaggtggccgacggtggtgcgggggcggtggtagaagggggagagagccggctggcgcaacgatggcggcggggaaaaggagaggaggcggccggtgcgacggctgcggtgggagaggaggaggtcggacagcgcgacggcagcggcgggagaggaggataggaggcggttggcgctgtcgaacgcgcacgggatgtggcggacgatgccgaccaggacggggtcctcatcatcatcttcctcatcgtcgtcacgatcggtggctgccgggcggaacagtttgggagggagggggaggcggctggcgagcccatctgagcttgcccagcctgcgcatgacccgccctcgccatagcttggtgcgctgaggacgacgacgaggaaagagggagagaggaatcgatggccgacaacaacgaaagcgggcgagtgtggcgccaggctgctcacgctcaccggccaggccctccgctccaccgcactcgcctgctgccctccgcccaccgctcctccacctgtcgctcttgcccgccgctcctgccgcctctctccccctctccggccgccgccggcgtgctcgctccacgccgcccactagccgcgcccgcgcccacctcctctccccctctcccgcttgttccccacgcgctgccgagcctgctccgctgccgagcgccgcacccgcatctgcccgcctgctcgtgaatgtgcagctgacatgtgggccccacataccatttttaatttttttttggctggctaggatgccacgtcagcgaaaccactcacatatactgccataggaccttgagtgcacggtttgtgtgagtttaggggtacacatttctggtttgtggttaagggtcaaaaaaaaaaatctcgttgttaagttgagggacctccagtgaacttatccctcgaaaattagatagttacggcccaaacatgctttctccaaaattcgcagactcacgtgcccaaatttgatcgccagccgaaagcccgaaaaaagtaataagtctattccaccttcctcaaaattcttgtgtacgccaagatacactccaacaacatggcagggtacatgagccccaactatcaataccatataatacttttgagatggaatttcatatttgacttgaaagtttttatgatttttgaggtgaaaatttcaaatcttttagttggaagttttcatgcttttaagatgaaagtttgcatactttgatttgaatgttttctggctttaagatgaatgtttttgtggttttaagatgaaagcttgattcgagataaaagttctctgattttttatttgaaagttttctaatccgaagatgaaagttttggactcgggatgaaagttttcagacttcgatttgaaattttcatgttaagacgaaagtttcatatattttcaggttgtgttgtgtgtttagttcgcgccaaaattgaaattttggttgaaattagaacgatataacggaaaaattagaagtttgtatgtgtagtaaagttttgatgtgatggaaaaattagaagtttgaaaaaaaagtttggaactaaactcagccaaacttccaatctctgatttttagttggaaatcaccaattgaaagtcttgacttcggagtccgatttcccctgatggagcacagcgttaaacgtctggaaaaagtctacaaaaagtagaatggacttataaaaaatatgttgcctaggcgtcttcttcaacggtcacggagcaaaaatgggtactgtagtccgtagacatcttcggtctacgcatcgtgcttctatgcagatgtcttgtttaagaaaaagaaatcaatttccgtttccggtacaggtagataggcgtacgctacgcgtcttttgtccaataataatacgatgttctcctaactgacttccatcgttccatgattagcgttaagctcaagcaaacgcaacgaactacagtagctagtagtactattgtgttccaaaatgtagtaaaatatacagaagccaaattagcagttaggaaacatagagtcgaaatgtcaaattcctacatgtccttagccgcgtcgcgccggttgaacgcacagttttcaacttgacaagaatgttaggggcatataaatttggtttattgttagcataaatcttatcaaagttcggtctatagttattttactccctacgtcaaaatatctggacacattactagctattccctccgtcccaaaaatatataagcatttttagaatagtaaaaagtcaaacatttttaactttaactattaatagcaaaaaaataaaaaaagatcaataacgtaaaattgatgttacaaaatttatcattaaacaaactatcataatatgcaactccttttatttaaaacattttacttttatagttattgttggtcaaagtagtatctcagagaccgtatcggagtctaaaaaatacttatattttgggacggatgtagtattatgcatgtaggtaaaagaatgtgaaatgattgtttgattttgagagttgcgagaaacgtctagtggtattccggctagcttcacaaaatggtggcctagatggcttgggttcgaagctcacccattctaattatttgaaaggcaaattttgctacaggacatcgcgactttgtggaattagctccaggacactgcacgaagtgagttttgggggaagacactcccaaaacatggctatttgccagaggacaccgcgtctatttgtttagtatatttgcgctgactaggcttgagggggcccacattttgacgtgatcggaccaaattgcccctgcacatattctccatcctctcccctcgccgtgacgctgccctggccacattgctgcggccttgcctggccggcctccttcccctcaccttgctttgcctccgccaccatcaccgctcaccgccgaccccgtggtatggcggtactgccgccacccgcccttgcccaccacccaccgtcgggttcgccgcctcccaggctatccctctaaacccaatcccccacttccccctcctagcaccgacctcccccacccctaccccgaaaccttaaccctcaccccgcccctcgtacccccaagctttgtcgtcactctgtaagaaaccgcacgcgacttttcttcctgacgtgtgtgcgccaattataattcctgttccatgtgatcttaagagtacgaggccacacatcataatgatgcctgtgtaaatttgtgtgttacagctaatagaaaattttgatagtacaaaattcagtacaactcccttcgtttaaggttgtaagacgttttgactttggttaaagtcaaactattctaagtttagcttacccttaaaaaatattaatatttacaacactttcattaaatctataattgaataaatttttattatatattttaatattttttttacaaaattaattaaacttaggttagtttgattttaaccaaagttaaaacgtcttataatcttaaacggagggagtagtaattattatgtggacaaaccgacaaacttgcctataaatacagatcaaacgagcagcagacgcacagaccagccattcccaatttcccattgcattctgcaagatccaactatccaagccaagacgccaccgtccgtccgatccacgataccatggcatcggcgggaggccgctgcgacggctgccacggcgacttcggcctctgggagcctcccttgacggcggagtgctcgcacaggttccacctccactgcgtcgtctccggcgccgacgtctgcccggcgtgcaacgcgcgatggaccaacgcgccatcgaacccgccgccgcaacccgccggaggcagcacgacgccgtttggacagacgacgggctttcccatgcgcgtccggccatggtcgtcgtgcgacaaatgccgcggcgtcatagaccacagccagcccaccgtcacgtccgagtgcagccacacgttccacctccgctgcttctccgggagcgtcatctgcccggcgtgcaacgcgcggtggcgcgacacggtggccgtgccaaacccttcgccggcgccgccgtccaccttctttcccgccggcgttcccgcgccgccgccgaccttttcgcccttctgggtgagccaagagtatgacgacgacgagccggtggagccgccggtagcggcacacggtggcggcgtggcaccggcgagcaatggggcgctcgtcgtcaggacgcactgcgagcacacggccgtggcgaggagcgtgatcagggacaatttcgtcgtccttgtccatgccaaagctcctagcatcgccgtggcggaggcgacggcggcggcgcgcgcgccggtcgacctcgtcacggtgctcgacgtgagcggcagcatggaaggctacaagctcacgctcctgaagcgcgccatggggttcgtcattgataagctcggccccggcgaccgcctcgccgtcgtgtccttctcctacaatgcgcagcgagtgatccggctgacgcggatgtcggacgacggcaaggcgtcggccaagagcgccatggaatccctcgctgcgggcggcggcacgaacatcctcaagggccttgtcgaagccgccaaggtgttcgacggtcgccgctaccggaacgccgtcgccagcgtcatccttctctccgacggtcaagacacgtacaatgtcaacggcgggtggggcgcctcgaactcaaagaactacagtgttctcgtgccgccttccttcaagcgctccggcgaccggcgcctgtcggtccacacgttcggcttcggcaccgaccacgacgcggtggcgatgaacgccatcgcggaggagaccgggggcacgttctccttcatcgagaaccaggccgtcgtccaggacgcgttcgcgcagtgcatcggcgggctcctctcggtcaccgtgcaggaggcgcgcatcgccatcacctgcccgcaccccggcgtccgcgtccggtcggtcaagtccggtcgctacgaaagcctcgtcaatggggacggccgggccgcgtcggtggacgtcggcgagctctacgccgacgaggagaggcgtttcttggtgttcgtggacgtgccagcagccggcgccggggaagacgtcacagaactgatcaaggtgagctgcacataccgcgacaccgcgagtcggcagcagatggtcgtcgccggcgagcacgccgtagtgcaaagaccagtggaggtggccaccaacacggagccgtccattgaggtggagcgcgagcgtttccgcgtggaggcaaccgaagacatcgcggcggcgcaagaagcagccgagcgcggcgcgcacgcggcggcgaaggcgatactcgaccgccggcaggaggcgctcgcccggtcggcgccgggtctcgccggcgacgccaggtgcgcggcgctgctgtcggagctgcgcgagctgagcgcccgcgtggcgagcaggcgggagtacgagcagaccgggcgcgcgtgcatgctcgccggcatgagctcgcacgcacagcagcgcgccacgtcggtgcagctgtttggagcggcggcgccgacgtggtcaatgccgatgtgtggatcggcggcgccgccatctctctctttcggggggtttggagggttcgcgacgccggcgatgcggagcatggtggagtcgtcgcgaaagagaagaaagggcggcgacggaagcttaagctttttggatctggtccgaactgaggaagaagccggcagctcagatgacgagaaggagaacctgtaatactccttccatctacttctgatagtcatatttcatcttgtcacatagatcaaggataagtaattctacttatcatccatttaaacatgctactagtcattccttgtaaacaagcgattcattaatatttacatttcttaatgcctatgtagccaatcatgtgtggaagaatggagagtcatgcattaaatccgaaaaagtcattaagatgatagattgttgtattgaaatatgtctattaaaaataaaattttcagatttggaaatatgattatcaaaagtagatggagtaagtatttcagttgaatttactcatgcattttactaccgcatggtgaaatgcttcgaaatttggtttgtctactatgtcttgcgtttgtccatcgttttgcgcaactttggatatggtataaagtaataataagaccatgtatagtggagaaaatttgttataattaaattctcgcatgattatattctagagaaaataattatgtgttttaacggttgaatttagatgtttcacatgtaaaaaacaaatgttttaagtgaaactaaattgtgttgcaacacattttttttagtgttgcacgctttgtaatttggatgtttcaataagtccttttttaatgtttcacttgctcatttgtaaatgtttaatattgttctttagatattatatcaagtattttgtgatattttagtttttataacttaatgttttatgtatttttattattataaataatataatgataagggatattgttgtaaagattcaattgcaattaatacaacaatgtagttagataatttaggagaaaatttggtttaaagtttgaaaaatatgttgttcggagaaggaggtaaagtaatgatggctaatgccaaggagtagaatgcatgcatactccaggcagctagtgagttgacggcattgccatctttgagcaaccgatcagggaccctaaaagttaggagtttcaatttgttatattttaatctatatattgatatatttaatgacatcttatttcattttttaaaagtttcactcttacttattttatgatttagcttgatttcttcagctccaataagtgttcgatggtaatcatggccaactcaaagggctatagctcatgacgatgatttgagcgtgtgttctagacattaaatattttagtttttcgcctaataaaaaataaatcactaaatcatgacataacattttagtaacattttttttaaaaaaaatctccttccgacttaggtagagctccaccgctgatttattctttattctttctcatttttctgggcctcaaattgtgtttcgtaatggacctcaaattcctaggtacggccctgggtgatgaaatatgaggagtgtgcaaatgggccgatccgtttgcacttgaatctgggcaaatttaattgttttattttgagatgaagtataagacatgcacagacatgaaaattgcatgttttagatggaactatcatcaaaatgtataattttctgttcagtcaatgtattcagctttaataaacaatgtggtacttgcttaaaggggtactgttaactaaatataatttggtaaggaggaactggaatggtagtttgagatgttgtttctgtatgaaaaatgaaactattcaatatcttttttatggaatgctattttgcaaagtttatttggagagcagttcggttttcttttggtctttaccctcctaatagcatatctcatatttttgatgattggcttctgggggtggacaagaaaaataggaaatttattctcataggagcttctattatatattggattctatggttgagtaggaatgacatggtttttgacaaatcaccatctgtttcatatgtgtaggtaattttctcggcgacatatttgttcaggtcttgggcactgctacaaaagtgtgatgaagagggcgagtgattaaaagttgcatgtcgtaatcttgagataacaattatgcaacagtttaccaattttgaatggagattcacaaacagaattcaataattgtgtactcattatctttggttggtagtctttagtttgctttttcttcatggttagtgttttttttgtgaactttatcttttttgtgttatactgtaataattgactgtagcttgttgagcaaaggacaagatattctattccattatttaaaaaaagacatgaaaattgcgcccaaataaaatgagacagcctgagccggggaacgcatacctttaattgaacaaacgtatgaaatgaaacacatgttaattcagactcaaacgtacttgaccaaaagctctagacaaagacaatttaaaatttcaaacttaagattgacaaatccaaaccaaaaacaacctaaacttaacctaaaagcttcgacgccttcggtgttgtcttcttcttcagcttcagttgcccccgctgccgctctctcgtgccttccgcgacgactccaccatgctctgcatcgccggcgtcgagtaaccaaatggcacggcgccggaggaaagcgccgacgccggcgagaacagctgcaccgacgtggcgcgctgctgtgcgtgcgagctcatgccggcgagcatgcacgcgcgcccggtctgctcgtactcccgcctgttcgccacgcgggcgctcagctcgcgcagctccgacaccagcgccgcgcacctggcgtcgccggcgagccgccgcgccgaccgggcgagcgcctcctgccggcggtcgagtatcgccttcgctgccgcgtacgcgccgcgctcggcggcttcccgcgccgccgcgatgtcttcggttgcctccacgcagaagcgctcccgctccacctccatcgacggctccgtgctggtgctcacctccgctggcctttgcacgacggcgtcctcgccggcgacgaccatctgctgccgactcgcggtgtcgcggtatgtgcagctcaccttgatcagttctgtgacgtcttccccggcgccggctgctggcacgtccacgaacaccaagaaacgcctctcctcgtcggcgtagagctcgccgacgtccaccgacgcggcccggccgtccccgtcaatgacgctgtcgtagcggccggagttgacagacctgacgcgcacggcggcgtgcgggcaggtgatggcgatgcgcgcctcctgcacggggaccgagaggaggccgccgatgcactgcgcgaacgcgtcctggacgacggcctggttctcgatgaaggagaacgtgccgccggtctcctccgcgatggtgtgcatcgccgacgcgtcgtggtcggtgccgaagccgaacgtgtggaccgggaggcgccggtcgccggagcgcttgaaggaaggcggcacgagaacactgtagttcttcgagttcgaggcgccccacccgccgttgacattgtaattgtcttgaccgtcggagagaaggatgacgctggcgacggcgttccggtagcggcggccgtcgaacaccttggcggcttcgacaaggccctcgaggatgttcgtgcagccgtccgcatggagggactccacggcgctcttggccgacgccttgccgccctccgacatccgcgtcagccggatcactcgccgcgcactgtaggagaaggacacgacggcaaggcggtcgccggggccgagcaaccccatggcgcgcttcagtagcgcgagcttgtagccttccatgctgccgctcacgtcgagcaccgtgacgaggtcgaccgacgcgcgcgccggcgccgcctccgcggcgatgctaggagccttgacgtggaggagaacggcgaagttgtcccttggcgtgctccgcgcgatggccgggaactcgcagtgcgtcttgatgacgacgagctccccatcgtttgccgcggcctcgccgccacctggttcgcccccccccctcgacgccggcgactccaccggctcgttgtcgtcgtacgcgtggccctcctccgtgaccctcctgaagggcgtcgcaaaaaccgatggctgtgctggataggccaccggcggcgtctggactggtactggtgatggcgccggcggccagcacgaagtcagtggcctccttggcaagctcgtcgccgacgagctccacggcggcggtggcccagatcgtccaaacaagccgctcgtggtcgttccatgggcgggctgtggcggcgcgttcacggatgaggacgtcgcgaagggcaaggtgctcgacgccgacgacgccgcgggcggcgggttcacggatgaggacgtcgcgaagggcgaggggctcgacgccgcgggcggcgggttcacggatgagaacgtcgcgaaggacaaggtgctcgacgccgacgacgccgcgggcggcgggttcacggatgaggacgtcgcgaagggcgaggggctcgacgccgcgggcggcgggttcacggatgagaacgtcgcgaaggacaaggtgctcgacgccgacgacgccgcgggcggcgggttggtccatggccttttgcacgtcgagcagacgttggcgccggcgccggcgacgcagaggtcaaactcgtggaggcaggcgctgcaccgaaccctcgtcgtcgccatgggggacggagcaaagcttcggcggcgtctcgatcgtcttcaatcttgcaagatgcaatgcgcgatggctctctgtgtctcttctcaaatatctcgaactcgacgaactttgtttgatctcgcatttataggcgagtttggtggtcagtacgttgcaaaagaccctaaaccgacatgcaatttggtgatggtttcggtaagttcgaatcgtgaggtatcaaaatttgatgaaatttcatcaatttggtgtgatttgtgttttggtaataaaccaattaaccaaatatacctgacatttgcttctgtatatacggtaagtttacaaactgtgcgtacaaccgacgcgacgcggccaggaagcttagaattcggaagtggattttgatccctcaagaggatatcccctcgttgtttgcatgtcactcaaatagttatgaaaaaaattaaaaaaaattaagaagatgtattaacatgtgatatatcactccacaaacatgcaagtaaaaattcaacttcgacatctcgcaacgaaaaaacaaatttgactctgagtatacattaactagccgcggtttaatttgtttttttattacgatttgtagaagttgaacttgaacttgcatgtttgtgaagtgttatatcacatgttaatagacattcccaatttttttaaatttttttataatcatttaaatgacatgtaaataacaaggggatatcttttcgagggattaaaatagtttccctaagaattcgactctcttgtagtttgtgggtttcctaactgctgttgagtttgcttgagattgacgctgtcatggaacgatacagggcgtcgcaggtgctgactcagcgacagcggcggccaacttgacacgttagtaacaaccgtttccggaggagtcaatttgctacgaatcaagagcaagagatgagggaggtatagtagacttatttcaactacaataaatgctggcccaacagatcttccggcccaacagatctttctctggccaagcggcccaagatcgtgaataagcgatcagaaaggcccagagagaacagatgaaaaagaaataattaggagtgaggcgtcaaactaaggtcggctaatccactatctcgtagtcttagagctagccggaagaccatggtggtttctcagatgaagatggagaagactaaattcggtctatctaatctaagctagaggcagctaggtgagaaagcatcagtacaggcggcgaggcaggcgaggtagaagatggcggcggcggcggcgtcgccctgctcgccgccggccaagtagctccgcttgaacctcttcccgccgtgctgttccttggcgctgctgcactgcagcatcttcctcttgatcgccatgatcgcctccccaccacctcgcctgctcctcctcctgctgctgctgctgctgccacccgtgtcttcttctccatcgcctgcattttgcctgaacctgcactgcaccattttgcctgaacttctagtaatttttatgtgctctgtcactgaaggtcagatggccatatgcatggctctagctagatccttttatagagatgagagcagcagtgcagctgcaggggcggtttctgaattctgaataaatatagctggaccagcagggagcagggcgaccgttaacttgggatcgagcaatatttgcgtgatatatttaagtgtgtgtatagctgacattgatggattattaaagcattttttgcgaacccaaacgcaggagcagagcacggaacggtcaatggtcggtgcgtgctgatgcataaaattaggtgagattcatgcacaaatcgatccggtagtttgcatacttgcatatatatattttgcatgcatccgaagtaacagcagtagtgcatgtacatgttcaggttgaaaagtggattacttgcagcgcgtacaaagtgccccaagtgcccagcaacgcacataaattaattagtctgtgcttaatttagcatgcatatcctctacaagtttctgttgtctgtgacagcctttttatctctctgtatcccacgtatcctttcgatgacctagcttctaagagtgttgcagatgacctagcttctattgacgtgcaaagcttctgcattggaagaataaaaaagcatccatacatgatcgatgcatcaatccttacattttatagatttgctccgatacagtaaaaagtatctcgagttaccggtacctcacggtactaaatcgtttccgattattgaatctaactggataggatgagcattgttaaattaaaaagatcaaaaatgatttgataccgtgaagtacctgtacctctagataatttttattggataggagcagatatctacattttaagattccctgttgtgtacacgagttacggccggcaggcagcatgttcaattccgttctgccaagatcgatggcagctagtgacagaggaaatgaaatgcacctccagttgaatagagttaaaagggcaggtcccggtggtcttgaagcagtagcagtacacgcccctcgtgtgatcatggacgcgtttcgtgatttcatctgctactgctagtgctagtgattagtgatagcttaattgaggagctaagcgccattggtggccagcggcaagggcatccataatgtggattaaaagtgggtattagacattaaaatatctttactactgggtaagatacatcgtggaagtagtaaatagttactattagatcatatagctactaccgggcaacaaagaataagttatgttatttgtacagtgtcaatgagtatcaacgaattgttttctcgcagttggagtcatggcagctgatgattggtgagtttttatagtgggccccatgttataccctaccgtcctgcacatacaatgtggagttcatatgctgctactaccgcctgacgtacgggcccacgttactgcctaactcggtcataaacattgctgttgcccaaaatgcagtaaaaagttcgggactcattgggttctcgtactacctccgtttctaaatatttaacgctgttgatttttttaaatatgtttgaccatttatcttatttaaaaaaaattaagtaattattacttatttttctatcatttgatttattgttaaatatactttcatgtatacatatagttttacatatttcacaaatttttttaataagacgaacggtcaaacatgtgctaaaaagccaatagtgtcaagcatttagaaatggagggagtattttctaataattcaaaacggtttattgagaaatacaaattaataggtaaaacttttacatatttattcgtaatgacttaaacaccaacataaaaagaaattatattaaaaatataaaatcatcttctatatatttattcgtaatgacctatttgttcccgctcttcttttgtgtggttgaatgatataaattaagtccgaccaatatttaagagagttaaattggactttttccttatctgtgaaatctgcatctatctcatctcgagcacagttggttctgctgatcaacaccgcatcagatcagatgcaggtggtctaaattgctgagacagacagagagggaaacagacaaatagtgcacaagaaacagcaagtgaggtgtgattactcgatggttggtcctcaatttcttgatctaacgttccaaccggtgcaacaagaagtgaaacgctatttattactggagtagcaacattcagagacttttccttattatggagtaatattacatatggcctttaaataagttggccgggcctgtttaaatcacactaatcacctggaatattataagtacagtatttttaaaaatcgcgaaagtgaaacacgcccagcagaagaacctcggtatcttcttcagatgttttttttttttttttttttttgaggaaactatcttcttcagatgttcacccttgtcttttcaacacctgccaccactatctgccgacgtatttttgcataaacacgagaaagtctccagaagaccagaggatgagcagaaacacgagaaaaggtcaaaggcggaggtcagcatatcgctcatcagttctactccgtagtccgtagatgaacaaacatgcagattaatactcgtattagatagcagagagactctttccatcacgccaagcctgggagcaatttaattccgcgtaattttcgatttcttttctaaacctgaccgcgtcagtcagtgtagaccggtcgctgtttcagattaattagcctctggttcttgacctgaatgtgcgtggaattgcagagaactgcaagttttgtttgctacaagtagtaggtgtagacttgtagtagctgtgttctccggctgattcggccgccggcgatggccgctggtgagctcgtgacaagatcgtccatggctgctgcttctgcttctgccatagcctgcctgctgttcttgggattcttgcctagcctcgctactgccgtgtcgttcagctactccaccttcagcaacgggaccaagaacatcaccctccagggcagcgcggcgatcgccggcgatgggtggatcgagatcaccaccggcagcaacctgccgagcggcggcaccatgggacgcgtggcgtactcgccgccggtgcagctctgggaagccgccaccggcgaggtcgccagcttcaccacgcgcttctccttcaacatcaccccgacaaacttggacaacaagggcgacgggatggccttcttcctcgtcggctacccttcgaggatgccggacacggcggacggcggcgccctcggcctcaccagccggaccttcgacgccgtcatgtccggcgacaaccggttcgtcgccgtcgagttcgacaccttcaacaactcgttcgatcccagcgccacctacgaccacatcggcgtcgacgtcaactccatcgtatcggtgcagaccgagtcgctgcccagcttcagcctcaccgggaacatggccgccattgtcgactacaacagcagctcgagcatcctgtcggtccagctggtgaagacatggacgaatggctcgactacactttacaaccttagcaccaccgtcgatctcaagaccgccttgccggagaaggtctccgtcggcttctcggcggcgacgggctcatcccttgagctccatcagctgcattcttggtacttcaactcctcgttccagcagaatccaccaccggcggcgcagccttccccgaccacctctggtcccggacttgccggagttatagccggagccaccgctggtggagcactgttcgtcgtgctcctcttcgccatgatagttgtcctcgtgcggcgacgtcggagcaagaagagaagggaggcagaagaggcagaggaggcgagacacgtagggttggccggagatgacgacgatgacgatgacggcgagcccatcgtggagatcgagatgggcatggggccaaggcaaatcccataccacgagctcgtcgaggcgacgaagagctttgcggcggaggagaagcttgggcaaggtggcttcggcgccgtgtacaggggatacctgagagagcagggcctagccgtcgccattaagaggtttgctaaggattcctccaagcaagggaagaaagagtataggtcggagatcaaggtgataagccggttgcgtcaccgcaatctggtgcagctcatagggtggtgccatggccgcgacgagctcctactcgtctacgaactcgtccccaaccgcagcctcgacatccacctccatggcaatggcaccttcctgacatggccaatgaggtcagtaactgtcctctctaacttcatctcaacttctttggtgatgtcaaattaatcgacatgttcttgattttaacttgtcacagggttaagattgttcttgggcttggatcagcactgttctatctccacgaggagtgggaacagtgcgttgtgcaccgcgacatcaagccgagcaatgtcatgctggatgagtccttcaacgccaagctaggcgacttcgggcttgcaaggttcatcgaccatgccgtggggatgcagacgatgaccgccgtctctgggacaccaggctatgttgatcctgaatgcgtgatcaccggtagagcaagctcagagtctgatgtttatagcttcggcattgtcctattggaagtggcatgcggaaggaggccaatgagcctacaagataaccagaagaatggcatcttccggttggtcgagtgggtctgggacctgcacggacaaggagatgttatctcagcggctgatgagcggctcaacggtgactacgacgtgtcggagatggagcgtgtcattactgtggggctttggtgtgcgcatccagacccaagtgcacggccgtctatcagagcagccatggccatgctccagtctagtgggcaactaccggtgttacctgccaagatgcctgtgccaacatatgcgccgccggtggcctcagtggaggggctcttcacatcgtccactggaatgttgtcctcaagtgcaacacaatcatcatcgacaaccagtggctatattacccacacctcaagttcctctaacacatccacttcagctggttcaaaggactcgtcttcgttgctcaaacatcaatacttatgatgttcaattcatttgcattgttactgattttgacttgatgcttgaatgggatgtacaactcgtgagccattgattttccttttagagtagtctaattgccaatgtgagtaatgtatgtgcatttatgccatgatttaaattttactcccattttagttattctagatagatttatcctgccattttctctctaatatctgactactataaagtgcatacctggcttgttttcagtgaatatcctagtctttagagggcctggaattgtgaattgtcgaagttggaagaacttgttttaaaaaaaaaaacaccaagagaagataactcttacacacttcacatatagtttgcatgttttcacttttcggtgaataacgcaaaggtgtaaacaacaggagctaaatataataagctaaattcaatagagatggaatatggcctctacagactggagacaatagtacaaagactgcttattttcagaagttcttatgcagttgtctcaaatcgtggatatttatgttggatacttcggtggtggaatcaagaacatccaagcaaaattgttaacactaaaaaatagtaacagcataatagttcactcactatgatctgtagcttttcagctggttgttttgccctgtttttcagcttttcaaccaaaaggttgttctcccccaaatcttaagaaaaattcgggcagcactctttgtcggcccgaaaaaaaaaagattcattaaattagacattcatgaaataaacatatcacctaggattgacaactctgctacctcacggatcgatcaagacaaatttggaaacaaaagagtggttctgatagactcagtaatgggtttgctgctgcaaaattctcaacagaatctgatagaacaacccattggacactactccttccagaagaaagggaagatctggaaacattatatcatggcacagtagcaagtgacccattctctttcacattatgtccttagccatgatcagacgcgcttggtcaaacctaccaagatgattgacagaatagtaatgagaacgaattttgacaaagagaaacagttccagtgatttacgcattcggaattaaaaaccactacaatagttacagcaatttttcatccataaaagtccatgcatagcctcttttgaatgtccaagttagctattcaacattgatgcaggattgtgctgacctaaaatgaggttgaagcccttacattcttttgttaaggggacatcgatcggaagacgttaagaggctaaactaatactccctccgtatttttatgtatgacaccattgactttttaatcaacgtttgaccattcgtcttattaagaaaatttatgtaattatcatttattttattgtgagttgatttatcatcaaatattctttaaacataacgtaaatatttttgtatttgcacaaaaaattttgaataatacgaatggtcaaactttcgtaaaaaagtcaatggcgtcatacattaaaatacggagggagtaaatacgaacatacccaaccttagaggaaagttagtgttggacaccaaattgggcatttatcacatctaaattatctcaataaaaaaacaaaagaaattcacattatacaagacaaaataaaaaaaaacagcagtaccaatgtaccattgtgaccaatcaaccactagcatttctcacattaagttgaggttatgaggtaaccctcacctagtcacctattggaagaggaacctccagtaggacaagtcggcggcgatgcactgtcgcagcctagcgtccaccgccgcgctgtgcagcaccatcagagaatcagccctcgccgccggcgcgaagtgcctgacaaggtcccgccattttgggattaggatagttcccttccagacctagctagcagcaagaacacctgcgggggcgggaggcgtggaggagctacagtatactttgccgaccggaactgctcttcaccggagatctcggtcggcgcgcggccgacgactcgagtatggtggcggcggcggcgcggtagaagacgcttcggttgcggaaagaagaaaaagcttaaaccgagcatggctagttgggccgtgcaacgtcgggagaacattttttattgggctaaactcaagtcctaaaatgggccttgggccagagtttttggaagagcgggggagtatgttgggcccccattgggggtgggacaagtctattttgtgtcggagccatgaaacttggaggcccgtttgatctggcatgggaggacgacgatgcgaaggaatgggggaaggggaagatgaattggggagacctacggtgagcgttgccgccttcttcccatagtggaaaaagccggaccggagaatgacccagtgagctcatctattcaccggttcaccggtcggaccgccggttcatggctaactatattttaagtcataattgactttaaactgttaaataaaataggtattccattctgaatagcacatatctcttgcccagttggttaggtgggaaagtacaaggcttgtagcgcctcaagcatgtggtctggggttcgactccccttctgctcatactagaaatttatatttttccctgccggtcttttctgcaaaccgaaccgtggcatgcactggttccctttttttccggttgaaccggtggctgaccggttttttgtactaggcttcttcctgttggcggagctaatgtggtaaggttgggacgacggatcgttggcggagctcacggtggttccctttttttccggttgaaccggtggctgaccggttttttgtactaggcttcttcctgttggcggagctaatgtggtaaggttgggacgacggatcgttggcggagctcacggaggaggagctaggcagcagtgcagctctccgacgagatcgtaccagcctgtcgtctccatcttcgctgtgaggaggtcgtctcgaatttgcccacgtcggctcgagtactggccgtctcgagctcgccgcagtggacgacattggtgatgctgatatggggaaacaacaatacatggcgtcgctcgagacccctatgtcaagggcctattgggtccactaggtcttttgtttttaaaatttttcaactcaacgacatgcaggtcccgttaagtttttattcttttattgtagtgccatgtaggatgaaagaattccacatacatacgtgatcttcgctaccggcgccattgccgtcgccaccaaagccccgcaacttctgagcctgacgctgccgttgacgagctcctgagcgccggatccactgtccttgtcatcaccactgaggtcctgagcgccggatctgcctctgccgtcgtcatcgccgctagatgtccctgcagctcccaaggctagcgccagattcgttgttgttgtcatcgctgccgaggttccgagtgctggatctgcctccgctgagttcccgagtgctggatctgccggttcctgagctcccagcccgcacctaccattgccactgccaaaagctcatcaccgccttcgcaagcccatcgccccactgctggctcccgtcgcggcgccccgccgaggcctaacttcgccagtggatctagagggggagaagtagaggtggagaaaagctaagtgagagagggagagagaaggagaggatagtggatcacggtggggggatggttataaagaagagggttggctggaaagttgtttttgcatacaattcttttaagtggctctgtggagattatggttaccccatatctgcatgacggttatactttagtcggatatacggcactaaatatagatagaacatctttatgaggattcgggttggattctaaacttgtatctcaagaaaatacccgggatcctagtcggttacgattgtattctatctgtaatcccatgttccgttaggatatgggctgtactttgtaatacggatcccttcccctatataaggaggggtccgggttcctctcgggacgattcttttttctcccaatcatacaatcaataatacactcggcggaatcatccccggacaggagtagggtattactttttgaataagaaggcctgaacttgtataaaatcccttgtctctaaacccatccactttcctaacttgatagccacccccttttattattgccgaaatcttgtttcgacagttggcgcgctaggtaggggtagcgtcaagttctcgccgactaagtgcgatgggtttcgtttctggcatcgacgacttcgccttccctcccgggcatgcgttccagttcggcagcctcaacttcatcaccaacgacttcggcaagatctctctccttgactcggatttaaaccagtcggggagagaccaggtccctgtgccattcggtatcccgaactcggccgaggcctactccaagatcatctctcccgagtcagcttcaaaccactcggatgagatccaatctactcttccgcgaccagatcaagacgacgggtcctatcccccaatcctgatgaaacttcctgatgatttggccgttgtcttcacagtcaagacatcttccactcgaagatctaggcgagctccggcttcggccccgatccgatccagatccagggaggttggcgttatactccaacctctcgggacagtctcgacggaagagttggatggctacctcagctcccccggcgtcagttctcgaccaaccgagatcctcgactacgacgatttcggctaccactacgaccacggcgacctcgacaacttcgacgatagctatgaggataactacacgcccctctacttcggcgtattcatggctgacaatgaaacggaggaacagcgccaagcccgagaagcggaccaagatcgcgcacggcaagaagctgaacgtcgccaactggaggaagagcgacagcgacaagagcgagaacgactacagcgtgagcaacaggatcacgaacggattgcaaaggaggctgaagatcgacgacaacacgccttggaatctgggcggagagcgagagagctcattgggcaacaagacgtcgatgggacagcagtctttcgcaccccccagcagaacgcggttgcagcaatcactctcctcgacaccctcctcaaggaagacgcactcaaccaagccgatcatgttgtcaacatcttgaaccagacgaagaccatgatcgctgcctcggttccagccaactccacaagcacccgcaccccgactggtagccgagtcccccacttccgatctcatgattatcatcagccaagcctcagcatcatcggcacaggatctagtcgcaggagcaggggtcacgacgaacgatctgttcactcgcctcccgaacgtcacagggagagccgagtcgaacggcctcgctctccacctcaccgacgtcccgtcgaccttcgcgacacgatcaaccagcgccgtgcagcacgaagtcaccgccattcaccagatcgctacgacgacgacgtggacggagtagctgccttcactaatgacctgcgtcgagtggattggccagccggctttaagccgactggaatcgagaagtatgacggcaccaccaaccctgagtcttggctcaccgtatatggtctcgcaatccgcgcagcaggaggagacagcaaagccatggcaaactatctacctgtggccctagcggactccgcccgatcttggctccacggactaccctgtggcacgatcggatcatgggcggaacttcgtgatcacttcatcgccaacttccagggcacctttgaacgccccggcacacagttcgatctctacaacgtcgttcagaagtctggagaatccctccgagattacatccgacgcttctccgaacaacgcaacaagatctccgacatcaccgacgatgtcatcatcgccgccttcactaaaggcattcgccacgacgacctagtcggcaagttcggacgtaaacctcccaggatggttaagcagatgttcgaaaaagccaatgagtatgccaaagccgaagatgctatcaccgcgtccaaacagtcgggcaccacttggaagccaaagaaagacacgccgaccgtaggagggagtggaagtaacaaccacaaggattgcaagcgtaagcccgaagaacttgtggcgaccacctctccatcttcccgacaacattcccgcgtcaacatcttcgacaagataatgaactcccaatgtccgcatcatcccaactctaaccacgtggccaaagattgcttcgtctacaaacagtttgcggagcaatacgtcaagaacgcacgcaaacctgcagacggagatcagggcacatcaaagaagaaagatgatgaagacgatgccccgactggttttcaagatcatcgcaaagaacttaatcacatcttcggcggacccctggcttatgagtctaagagaaaacagaagctaacagaacgggagatcaatgcggttcagcctaacacgccccaatatcttcggtggtcagagacagcaattaagttcgaccgctcggatcatcctgactgagtggtccacccggggcggtaccccctggtactagacccagtggttcgcaatgtcaagctccgacggactctcatcgatgggggcagcgcacttaatatccttttcgctaagaccctggacgatatgcagattcctcgcacggaattaaagctgagtaatgcacccttccacggtgttatcccaggattgtcagctacaccactcggccagatcactcttccagttaccttcggcactcgggagaattttcgcacagaaaatgtttgtttcgaagtcgctgattttgagacagcatatcatgctatactcggacgaccggctttagccaagttcatggccgtcccgcactacacctacatgatgatgaagatgcctggtcctcgaggggtcatatcactacggagcgacatcaagcaagccgtcacatgtgacaaagaaagttgcgagatggctcaaacccatgagactactctcgcccgcgaagagatccgactggctgcgaccacggcaagcgagggagaagtgcctgcaaccaagctgacgaagaccaaagaaagcggtgccaagatgaaaaagattcccttagatccctcggatcctgataagactgctgtaataggcgctgagttagattgtaaataggaaagcgcgctcatcacctttcttcagaataataaagatattttcgcgtggaaaccatccgatatgcctggtatccccagagaggtgattgagcactctttacatgttaaggaagacgccaaacccatcaagcaacgactccgccgttttgcacaggacaggaaggatgcgatcaaggaggaattaaccaagctgttagcagcaggcttcattaaggaagtccttcatcccgactggctggctaacccagtcctggttcggaaaaagacagggcaatggcgcatgtgtgtcgattataccgacctcaacaaatcttgtcccaaagacccttttgggttacctcgcattgaccaggtggttgattcaacggccggctgcgagttactcagcttcttggactgttactcgggatatcatcagatccgactaaaagaatccgactgcttgaagacctcgtttattacgccctttggggcctactgctacatcaccatgccctttggattgaagaatgcaggagcgacctatcaacgcatgattcaaagatgtttttcaactcagattggtcgcaatgttgaagcctacgttgatgatgtagtcgtcaagaccaagcggaaggatgacctgattgcggatttagaagaaacttttacaagcattcgtgctttcaagatgaaactaaacccggaaaagagcatctttggagtaccgtcagggaagttgctcagatttatggtatctcaaagaggcatacaggccaacccagagaaaatcaacgccatcctcaacatgaaaccgccaagctcccaaaaagacgtgcaaaagttgactggttgcatggcggcgctcagccggttcgtctcacgactcggcgagcgggggatgcctttcttcaagctgctgaagaagactgacaatttccagtggggacccgaagcacagaaagcctttgaagacttcaagaaactcctcaccactccaccagttttggcctcgccacatccgcaagagccgctactgttatatgtgtcggcgacctcccaggttgtgagtacggtcctggttgtcgagcgtgaagaggaaggccatattcaaaaagtccaacgaccgatctattttatcagcgaggttttagctgactccaagacaaggtatcctcaggtttaaaagttattatatggtgtcttaattaccgtcaggaaattatctcactattttcaaagtcactcagtcacggtggtcacatcgtttccactcggggatatacttcataatcgcgaagcaaacggacggattgcgaagtgggccttagaattgatgtctttggacatatctttcaaaccacgaacttcgatcaagtcacaagctttagctgatttccttgccgagtggaccgagtgccaagaagacatgccagaggagaagatggaatattggactatgtattttgatgggtcgaagaggcttacaggcactggagctggggttgttttaatctccccgactggagaaagattgagctacgtattgtggatatatttttctgtgtcccataacgtggcggaatacgaagcgctacttcatggactaaggattgcaatatctctaggtattcgccgactaatcgtccgtggagactcacagttggttgttaatcaagtcatgaaagagtggtcatgtctagatgataatatgaccgcttatcgacaagaggtgcgcaagttggaaaataaattcgatggactcgagctcacccatgtcctccgacataacaatgaggcagccgacagactggccaattttggttcaaaacaggaagcagctccttctgatgtgttcgttgagcatctttatgaaccaaccatgcccagaaaagaagcaaatgaagccatggatactcgaggcataggcatgattgaagccgactggagagaacctctcataaaatttttgaccaaacaataactccctcaagacaaaaatgaagccgagcggatttccaggcgcagcagactttacattattcatgagactgagctgtacaagaaaagcccatcaggaatactgcagcgctgtgtgtctttggaagaagggagacagttgttgaaagatatacattctggtatttgtggtaatcatgctgctgcacggaccattgtcggcaaggcttaccggcaaggttttttctggcctacagctgtgtccgatgccgacaagattgtgcggacatgcgaaggttgtcaattttttgccagacaaactcatttgccagcccaagagttgcaaaccatcccgttgtcctggccatttgcggtctgggggcttgacatggtcggtccctttaaaagggcagtcggcggttacacgcatctctttatggccatcgacaaattctccaagtggattgaggctaaatcggtcatcacgatcacagcagataaagctagatattttttcatcaacattgtgcatcagtttggggtacctaatcggatcatcactgacaatggcactcaattcactggcgaagcatttaaagacttttgtgaagacttcggcattaaaatttgttacgcctccgtggcacaccgtatgagtaacggacaagtcgagcgcgctaatggcatgatactgcaagggatcaaatcacgagtttttgaccgactacgtccctatgctggcaagtgggtagatcagctgccgtccgtactttggtctttacgcactactcctagtcgggctactggccagtcgccgttctttttggtttatggagcagaagcaatgttgccgagtgaagtggaatttgaatcactacgatttcggaacttcaacgaggagggctatgaagagggccgagtagacgacatcaaccgactagaagaagcccgagaagcagctttaattcagtcgactcgatatttgcaagggttgcgccgttatcataattggaatgttcgatcgcgagcctttttagtcggcgacctggttctgaggaaaattcaaacaacacaggatcggcataaattatctcccttatgggaaggactgttcataattgctgaagtcactcggccgggttcttatcgactcaagagcgaagatggtactatcatcaacaattcttggaatattgaacaccttcgtcgattttacgcttaggcatttcgtttgtatctttcctctttgactgctaagttcaagttttttcctcgaagttttcagtcagggggctactataataataatggagtgtgatttatatcaattcaatttgcttacttgatgtatcattgccctgtttgatttcttggcttagtcaatgaggactgaaagttttttaacaacttttgcgggttttaggctcaacaaggtttgacaaaaacttttatgaaatcaggagctaagttaagatatcaagcacaacataaattcatcagtattgtacaaattgtgcctccatcatcattaatcatcaaaattatcggtacattaatcagtattagtcttttcatcatcagaattatcaggaccagtcggtcgaagatcggtatcttggaatctctcaactacatcagcagcaattttgtcagccactttctgcgcatcactgatgaggtcaagagcagcttcttcgctcgtcccgtctgcaaagccatcaatggtgtcaatatcaactctaggataaagggatttagtcttcgccaacgccagacttgctcccatacttccagcttctttgatgttcttgaaatatgtatccggagcaactctcagcttgtcgaaaattttagaagcatcaagtgcactcgggccattgttattgaagaacatcgcttgaacgattggggcggcagcgttagcaacctcatcccgggctccttcaagttttttgatcttgccaaccaggacgtcgaattgagcttgagatttgatcttgcggtctgcatcaacaggttcacattaataagtcagtatatggaggataatggcttttgaggtattgattgttgataccttcaacttcctttaaagccaggtctctttgttttgccagttctgccttgtcattttccagaatttgaatctgcttctccaactgagatatcttggcagcttgtactacattgattacggttaatcaagatggcaaagataacagtatgagtcagttgagcagagtttgtgcgtaccttttgatgagccactcagttcaaaatttgattcctggagatcagcgatccgatccctcagatcatgttcattcttcctggcaagttctttcgcttcgtgcaattgattcctggtggctttgagggtcccgagatgaggaactaacctctctaaggttactgttttggcttcgttcctaagatgaatcctctgcaagacagtttaattagcgcatgaattaaatggcaaacaagatggttgagatcaggtaccagagaacttacatttacaatgcgggttgcctgaccaagtgccttcttcagtaggcataactcttcgtcctctttttgcttatttatcacgatcccttgaggctgcatgttgtcatcccaccacttgaccagaatcggagggcgtgaatcctcagctgcttgtatccggaggatctcttcttcatcaccaattattggccctagtgtatccatgaacgaagatgaagcagccaaataaagtttgttggatcaaaatgatttcagatggcatgtctaactgtgatgattcccggtcggggacgaatggatcttggtgccttcataggagatctggtttctgattcattgtcagcatccttcccgagaggactgttcgtttgagcttcaacctcgggaatcttttggcttggccctgcatccgactggtttccagtcgggggctcctggttagcaccgacttcagcttcgactgactggttcccagtcgggggctcgttgctgggttctacattataggttgccggctgattttcactcggatgatcctcagcagttggtccggtttctttggaagagcttgtgtccatgttagtcgggtcagagtctttcccagacgggtctatatcagatggtttcctgcaaatttgattatcagtattatcgccgcaatgggtgtgcatcaatacaagaggaatcgttacatgagttgcacctggaagacttcctgatctttggcgcagggcgactggatgttttcttccttggagtagcctgttttggtagtttcttggtcgtctctcagtcttcaggcctcctggtggtatcgtcggcttcgtcgtctcttagaaccagcttcctctttcgagaatctgactggccgactggatcagaagcacttggttgagtttcagaccgaattcttggtcctccgctcccttgcccagtttggtggcggggagatcggcgtggagcgattggtggattcgacttcatcagagcaaattcctgggtgtaatatctttcattgttaattgattcaacaggaagacaagatcatattttgaggaaggttgaagtatatgaatacgcaccggtggaggaggattgaatgcgttgaacggtacgactggcagcaagtgtgagtagctgacaacgatggcgtttgagaagatgttatacatcctttccttcatgaccttgaagtcaagagaatccggatcttcacggtttgggtcatgcttgccgtcaaattcgaaggctgtgcgagatctttctttgattggagctaaccgacacttgataaagtgccgggtgatctgttctccttgaaggccctgttctttcagctttatcatcctctccatcagttctactgcttgagcagcttcatctcccataggcaatgagttccatgtatcctggtaaaccggaggaagacagcagtactcggggagtgcgggctcaggattctgaacataaaactagtttgcgtgccagcctttatttgaggtcttgaagggcatggagaagtatttttggcttagtgttcccctgagttggaaaccaacacccccaacgacgtatggtttgctcttatttggctggggcttgaggaagaagatgcggcggaacaaggcgaaatgaggcctaatgcctagaaaagcttcgcaggcatggataaaattggcaatatgcactatggagtttgggttcaaatgatgcaagctaatcccgtagaagtttaggatcccccggaagaaccttgaggttggaagagaaaatccgccatagaagaaatgcgcaaataccacgatttcgtgtgtgtcgggggtcgggaatgcctcgccgaacgccggtcgccacccgataatctcctttgtcgggagaacgccgtgcgccaccatctccttcagattatcttctgtcacatcggagggcgcccactgactctcgaagctttctctttcttccgccatgaatgtgaactagatgatttgatttagttcgagatacggctggaaagggatggggaatcggagcggtggatgcggggagaaatttcaggaagtttttgaggatggattggagcggattgatgaaccctagctttgttggcgcggttctgtactgtagcacggagtggggaatggcgagagtctcggcggggaagacgaagcgacgtttggacttcggtatttttagggtatcgggagtactaatgggcctaggcctgtacagtatttcagcccaattatgttttcagcgtggcccgttgtgatccctacggacttaggtgctttttgctttggcaatatgtgctcacaatggcgcagcccgatgctgttaaaatcctttttaacgtgattcaataattctttagaattattatgatgcacatgaaaaggtgcccgacagaaaggtgttataccatttttgtaagctttttaggctacaaaagctgttgggttcatttgagatgactggtttattaatggtcattcttttagcatgttatatgcttattttaattatggtaagagttatagcctaggctaatgaacttcttaattaccatgatctttatcatatttggtggatcattataagagtttcttactcggattcctaccaaatatatctatttttggaccttttgagtgtttatcactcggcccttctcgtattttttgtccttgatatattcagattgagaagcagttggctgggtatcttactaagtaccatgcgtgcttcgctataaaaccacttggttcttgactatctgtttagtttttcaactaatcacatagtcggggggctacacctaattaggtgcatctactcgatgcaccatgttttcgcccttcacagttttttagtactcggcaagccggagcaagttgaattgaagcactcggattattgttttttgtttcgagaagattattttggtcaactgcgaaggtctcgggggctaatgtggagattatggttaccccatatctgcatgacggttatactttagtcggatatacggtactaaatatagatagaacatctttatgaggattcgggttggattctaaacttgtatatcaagaaaatacccgggatcctagtcggttacgattgtattctatctgtaatcccatgttccgttaggatatgggctgtactttgtaatacggatcccttcccctatataaggaggggtccgggttcctctcgggacgattcttttttctcccaatcatacaatcaataacacactcggcggaatcatccccggacaggagtagggtattacttcttgaataagaaggcctgaacctgtataaaatcccttgtctctaaacccatccactttcctaacttgatagccacccccttttattattgccaaaatcttgtttcgacaggctcgtattcgaaaatcgatttttttcatgtgggtctcaaccaaataacatcccaatcttttcacatgcagatgttttttttgcccacctataactaaagtggggtgcttcctagtagtgaacctctccgtcttcaggtgattttcccttcagcttcctaaataatcctgattatgatgtagattcaaaggcacataaattacagaattcatgaaaaaaaatcacgaatgcgcaaaaggattgtacatcaatatattagaagaaaaagaatttgttacataacgcaattagctagaccggcctatgccaagggaagggagaaaaagcaaaacaaaagctcaagctggaaaagactactacgacggctaaacacaactctaaacagcggaaaggggtagagccacgctaacgctacactcccgagaaatctccaaaaacggcaatgctagctaaagactacatatgaccttctgagaggaaggactctagaaccactccgacagaattcagaaaaatgaagcagtagctttcagattctcactagctaaagctgcttcttaaacctccagctctttaaacagagccattgacttggtgctccaagctagagctcagcatttcggtcttcagtcccatatgaccatcaaacaatcgatcgttgattcagcccaatcttttctgaccccgacggtcgaaaactatggccggagcacagaaagaagtgccattttggcacaattaatacaagtggaagaactaatattaccaataaatcaacggcaagcttgtgttacaattccttgttagaccgagccggcttctcgagtctctgtttgctagtggtggctggcacaccagctgctcgagtgatatcgtggacatgagttgaataggctaatgggtagtagaggtgatccatccacctgtgtaatactccctctatcccataatataagatgtgcacatattttaagattttactttaaaaacatttgaccaataattattataatataaattttattttatttgctaaaattaatatcattggattgacatttaaatttactttaagatgattataattttgttgcaataaactttataatatatgagaaattataggtcaaagattagttttgaagactgtgccaagtttgactatgccttgtattatgagatggagggagtattaattattaaaaccattggattgttacacatttaacattttatcctttacttaatgagaatgttcttgaccatttatgccaaaacgaagtccatgacgaacattatttaagaaaaagagattaattatgtggcatcacttgtagtgttgctgtctgtctcattgtttagtgagtggcaattcttgttaccatttcttcaaactagttttgatgtcacatggttggagacctatttctggacatcaccttaccgggggaatgagaatgatattgccaatttatttaagtttttttttactatcgtcttttgctaccaccatatagttgttttgtgatacatctcggtctcttaactcttagaggcatgtggcaacgtttcttgaatgtgatcgaaatagttgagaaaaacaaaagctgacaacgtagattaggtttctatcaataacaaaaaaaaaaaaaaaggtagaccataaaaagtacaattggatttggattcacgcactacaacagatctagacttccctaacggattccctttgacaaacagggaatccgtcttgatttgtgataaattcgcaaaaacaaatatcgttgtaaagttcaccttcaaccgatcctagcgacaactagaagtcttggtcctaagatatgttctccgcgacaaacaggattgtcaagaattatggggatttcatcgttagcagctaggttatcatacgtttagatttgttgggagtacctttgtttctctatctagacaaaaaaaaataacttgatctattttttcgctataggaaatagtaagttacgttatcaatcactttaaagagttttataacctgacaaaatttgctctaggtaactctataattatgacattcactctaagatatagttttgcggtttgccgtatgatggtacagttttgcttctctttgccaaaatacattttggccattgctttgacatatcctcttcaaatgagagattttctaaaagaagaaattgcccttcaacctaccaagtgagcctgagggcaattttgtcttttcaaaagttctctctttccaattgaagaggatagggaaaaataagggactacctatataactcctgacgaataatttttagcgtacttataaatgtcaccataactataatataaatatagtgtacttatattttaactatagtgtatattagatgcaactgctatgtaaattagaatttgctttgtaacacagtgggagatcagcacgttcccacactagcttcgcatcacgatttcgacacgacgacacctacccacagcgcacgctatcaactttttattcttgatcatgcgcacgaatctcctagccaatccaacgataaaaatccaaaagtttttcctccacttttctacagtagtaaaatagcaagtatgtaaagtaataggtcaagtgtcttttggcaaaagaccgcaatcctgtgataaaaccgtaaaactagagtgccttagaatattgagaaaattggaaccatgtcattataatttgcaaaatttgagatgtaccatcctgactcacatgtcattgactcatgtgggtcctacatgtcattgagataccgatggcatatctcaaattttgcaaaattataatggcatggttccaatttaccatagaatattttatcttaggttataggctaactataaacaaatgtagaaacgagataaaaaaaaatagcttggatacatgcattaattaaatatataagtgagataaagattgtggataagaaaagcatggacaatgaaatagcttgcttatttatatacattaggtctaatactatttttgggtggacttagggcctgtttgtttagttcgcgaaaagaaaatttttaggtgtcatatcaaatgtttaactggatgttggaagtggtttttggacacgaatgaaaaaattaatttcataaatcgtctggaaaccgcaagacgaatcttttgagcctaattaatctgtcattagcacatacgggttactatagcacttatggctaatgatggactaattaggctcaaaagatccgtctcgtgatttctcctcctaactgtgcaattaattttttttaatctatatttagtgctctattgtatgtaaagaattgatgtgatgtttttagaaaaaaaaaagaactaaacaaggccttagtttgcttacgagacgttgtatcataataaggacgaaacgagtatacgtactagctagtagcgtttagtatccacatcatctgcttacctgtgttttgtcgtactcttctttcgtcacttatttacaggctggcgcaagcgcggtccaaatccgtccagaggtaaggccctctttagttaccacataaaaaatttacgtcttattatatcgaacgtttaagtatccctgtataaaatattaaatatagaattaaaaaataactaattgcacagattgcgactaatttacgagacgaatcttttaagcctaattactacatgatttgacaatgtggtacttgctaatgatggattaattaggattaattaggcttaataaattcgtctcgcggtttagtgacggatgttgtagttagtgtttttatcagtgtccaaacaacccatgcgacaccctatataatacccaacgtggcacaccaaaattttacaccgctgatgagggctgaccggttaccttaaatctgcgggactcccgactgcattgtcacgtaggaaggctgtaagcattgtctctcgtttctctccagctggtcaagccgatcgatcagtactggtagtatcgttgtcacccttgcgcgccgatcgatcgacgccggcggcgatggccgatgtttctttgatcagttgcgctgtcggcatcatcttcttctccgccgtttgctacctgcctacggctcctgtcgccgccttgtccttcaactacaccaacttcaattcaaacaacccgagcatcgaatatgaaggcaacgcctctttcagcgtcgggtatatcgacatcagcttgaacgaagccaacggcatgggcaacagcgccggacgggtgtcctacaagcagccggtgcagctctgggagtgggacgccgccaccggcgaggtggccagcttcaccacaaccttctccttcaacatcacgccgagcgataggaacaacaggggcgacgggatggccttattcctcggcagctacccatcgaagttaccagaccgcgccggtggccacaacctcggcctaaccaaccaaacaatcggcaacgtctcgaccggtgacaagaggaagacaagaggaagcccagcccagacgatccatgcgagatcggcggcccacgagcaagtatgtgtcgagtgagtggacccggtagctgtcgaccgggccactgtcagagagggagcgagatcttttggcacatcgctatataagatcggcaaagtagagagagaaggaatcgaacattgtagaaacaactaaattcccaattcaattcaaatctctctctctctctctgttctattgcttcctctgttcttcctctgtttctcttctcaattcacgaattcctcttcgaattcccatggtttcgtcatcgtcttggcgtgaattccacaagtgccgtgacatttggtatcagagcagcgatcctggagaaaccaaggtacacttctcgtttgcaatcgcaggttgaggcaatggagaagcagaatctcgatttcggcaagttgctcggcgacatccaggagtcgctggtggcgttgaacaacaagcaggcggagatgcaggtggcggtggcgaagttggacgaaggggttagtggatggcgaccccaagttgaagccgcgatcaaggacttgcgtgctgaggtcgacgaacttcagcagcagcatgatgccgccaacaagggaaagcaagctccatcagcggcactttcccctcgggtcccgttgacgggcgaggaaaggaaggtgccattgttgccgactcctccaccatcatatcagttgggcgcggcggaaggcgggggcaaactggccggtggccacggcgttccacaacatcactggaggagggcatctggagtggttaccactctgatcccaactccgggcaagggtacgttcaatgtttctcctgtgcctttgcattcctgtgaaaattttgattcgggatttggggaatttgatggagaggttgaggaacgtcagtatagccatagagtgcctaagttagattttcccaaattcgatggtaccgactcacaggattggaggatgaagtgtgagcattatttcgatgtgaataacacgtacccggggttgtgggtgcgagtggctatcatctacttttctgggagggctgcatcttggttgagatccactagagctcatgttcggtttcctaactgggaggatttctgtgctgcgctatctgataagtttgatagggatcaacatgaactgttgattcggcagatggatggaattaaacagtcgggaacagtgtgggagtattacgaacagtttgatgaactcatgaataagttgcttgtgtatgatccagtagtgaatatgcgttatctgacacaccgtttcactgagggattatataggaaaattcgtaatgctgtttacttcagagaccccgagacctcgagtctgctttggctgttgctttgttacaggaggaagtgctggagacagctgatgaagtgcctggaaaagaagttaggaagagtgaaggaaattctctaggacgttcagttgcaaatcttaaaggggcatatcctttgccaactcctccaatgaggtctgggggcatcaacatgggcattaaatctgaagaaaggaaggagtctgaagtaaaacgttcatcaggaatgaatgagagattatcttctcttaaggctcaacgtcgtgctcaaggtctctgttacatctgtgcagagaaatggtcgcctacacataagtgttctaatactgtgcaactgcatgctgtccaagagttattcacagtgttgcatgaatcagcagaggacgggttgagcacaacagatcatgttgttgagcaaacgttaatggcagtttcactacaggctgtgcagggatctgaaactggtggttgtatgagaatgctggggcaaatccaaagcaaagaaatcttgattttagtcgactcaggcagctctgccagtttcatcagtaaaagggtggcaagcagttttataggggttctagagcagcctgtgcatgtgcaagttaaggtggctgggggagcaatgttacattgttgttctgagattctgaattgtgaatggaccactcaaggacatgtgttctttactaatctgaaggttctggaattgaacaactacgacatgattttgggcatggattggttgatgcagcacagtctaatgacagtggattggaccacaaaatctctgataattgcttgtgcaggaactcagattcagttacatggtgtaaggtctgatactgagcaatgtgcccacataagttccaggcaacttagggaacttaatgacagaacaacagtgtcttagtccaattttgttcagttttcgcgttggagcaccaagagcagattcctaatgtggtgcagacagtactgacagagttttcttcagtttttgatgaacccaaggggttaccaccaatcagacaatttgaccatactattcctttgctgccaggagctgggccagtcaatgtgagaccctatcgatatactcatgtccaaaagaatgagattgaaagtcaagtgcaagagatgttgagtaaagggataattcaaccatgttcaagtcctttttcatcacccgtattacttgttaaaaagaaggacggttcatggaggttttgtgtggattatagacatcttaatgccataacagtgaagaataagtatcctttgcctgtgatagatgaactattggatgaacttgcgggagctcaatggttttctaagttggacttgcgctccgaatatcaccaaatcagaatgcatccagatgatgtgcataaaactgcttttcaaacccatcacggtgactttgagttcagagtgcttccttttggtttgactagtgcaccggcaacttttcaaggagtcatgaacagtgtgcttgctaccttacttaggaggtgtgtgcttgtattcgtggatgacattttgatatacagcaaatctttagaagagcatgtgcagcatttgaaaacagtgtttcagattttgcttaaacaccaattgaaggttaagaggactaagtgttcttttgcacaacaagaattagcatatcttggacatataattcaacctaatggtgtttccacagaccctgagaagattcaagttattcaacattggccagcacccacttctgtaaaagaattacgtagctttttaggtctctcaggatactacaggaaatttgtgcgcaattatggcattctcagtaaacctcttacaaatttgcttcgcaatggtcagctctatatttggattgctgaaactgaggatgcttttcaagctttgaaacaagcgctcatcacagctccagtccttgctatgccagatttccaaactccttttgtggttgagactgatgcatctgacaagggcattggtgcagtgttaatgcaaaataatcatcccctcgctttcttaagccgagctcttggactgcgacatcagggactctctacttatgaaaaggagagtttggccataatgcttgcggtagatcactggcggccatatttacagcatgatgaatttttcattcgaactgatcaccgcagtttggcatttcttactgaacagcgtctcaccactccctggcagcacaaggctcttaccaaactcttggggcttcgttataagattatttttaagaagggggttgacaacaacgcagcagatgcattatctcattatccaggctctgatcaggtggaactctcagctttatcagttgcagttccagagtggatcaatgaaattgtggccggttattcctctgatcccgatgcctgcagcaaggtacaaactctctgtatcaattctggagcagtaccaaatttttctctacacaatggggtgctttattttcagaacagactttgggttggtcacaatgtagaagttcaacagaaaattcttgctaatcttcacacaacggcagttggaggccattcgggaatacaagtcacttatcagcgcgttaaacagctgtttgcttggcctcgccttcgtgccactgttgttcagtatgtgcaagcttgttctgtttgccaacaagcaaaatcggagcatgtgaagtatcctggaatgcttcaacctctcctgtacctgaccatgcgtggcaaattgtctctctggatttcgtggaaggccttcctaagtcggcttctttcaattgcattcttgtggtggtcgacaaattctctaaatacagtcattttgttccattgactcatcctttctctgccttggatgtggccgaagcatatatgcaacatatccatcgacttcacggcttgcctcagtctttgatttctgaccgtgatcgcattttcactagtacattgtggactactctattcaagttagccggcactcaactccgaatgagttcctcttaccatcctcagactgacggccagactgaacgtgtgaataaatgcctagagacattcctccgttgttttgtccatgcctgtccttcacagtggagtcgctggcttgcgttggcagaatattggtacaacacgtcctttcactctgctctgggcaccactccctttgaagtactgtatggacataagcctcgctactttggtctttcagcttctgctgcttgtcgatcagacgatcttgttgagtggctgcatgaacgtgagaagatgcaagctttgatcagagatcatcttttgcgtgctcagactcgcatgaagcaacaggctgatcagcaccgttcagaacgctcttttgcagtgggcgattgggtttatttgaagcttcagcccttcgttcagcagtcggtggttaccagggctaatcgtaaactttcgtttcgattctatggaccatttcaggtgcttgacaaggttggagcggtggcatatcgcttggatctgccaacttccagtttgatccacccaattgttcatgtttcccaactaaaaaaggccttggctccaacggaacaagttcattctccacttcctgtgctggatccgacaaatgttactcacgtttgtccagcgcagattttggatcatcgcttcatccgcaagggttccaagatggtggagcaagtacagattcgttggaccggcgatgcaccagcagcaaccacctgggagaatccgcgcgagctccgtcgccgttttcctgcggcaccagcttgggggcaagctggaactcaaggaggggggaatgtcatgccagc

SEQ ID NO: 6387 - DNA, 25520 bp, Oryza sativa
  unsure (1)..(25520): unsure at all n locations
tctgatataatctcatacattacatttctgttaaaatatgcacactatttttttttcatcagccgacgccttacgcccagtgaggaggttcacaactgtgcaatacaagcgcatattcaacagtatctaactcaaaagccggcccaattatacttcaaaatttgtgaactcttgactctccattaatgcctgaggtaacaccagtccacaagtgtgccactcaccgaatctcagctcatatcctaacatctcatggttctcttagccagactgtaattccactgtctgtttaccggtagtatgaggctgtgatgtacagcagagcagcggtagctgctgtaacaatcaactcctggaagaaatcaccaggtagttagtttttcccttttttatatataatagtaggcaatggttctgaacagagttgatagatctacaaatctttgcatttgataaaaagaaagtgcatattcttttgtacctgatagtaataaacaatgcgtggagtatactgccatgaaaactcaatcacgttaacagctgctgtataaccctggaaagattcatacaaagaaaaccaaaccaaaaggcaactgataaatattatgataggtagataacatggcagcagcagatcaagaaaattccagcattgcttaccaatgacgcggcaaatacacatccaaatatcaaacccaaagcacggactactcgttttgccattcgtattccacgtccttcaacctcaccatactcctgcagaaaacaccaggatgcgatcatatgaccattgtctaatcatttcaaataacggtcataagattaatataaaataaattcatgatggtacccatcatcagtaagaaccacccccatttgaaaagttacaaaagcttttgggggacggaattctgcgcatcttcttttgtttaattgcctttcagtttacaacagaatcaggtaatggaagcgaagtcaaatgatgaaacaggttcagtaaaaatacattaattatatttgacaaaaaaaactgataattatggaagtagcaaacaacagcatggcactccacagtaaaatgtgcaaattacagtatcatgattcataaaaaggtaaatagaggtgactaagaaatattttctcacattatatattggcgttattggtggttcagtagcccttagcttttgaagtattctgtagaagaaagcaaaacataggaactgcaatggcttccagtccgcattgcccatgatagctatccaaacaacctgcagggtagtacaaataaaaatcttttgcaagaaaatcgtaaccattgagatagaggtatcctcaaagcattattgtctagaacaaaaacataggagtgttactcgcattgtctaaatagtgccaattctagctttacaaaaagaaacaacatgtttactcttattaattgacctcggaaacatatgaaggttttaaacaaaagtaacctagccgcgtggttatagataatccaataggacttatatacctttgggctcttaataagggcattcaagcagaaacattacctagataaatcaaaacaagaagtatctgaacaaaaacttgtttaggctaaagcagcatgacagcatctattttggactggagcacaacgatagaactatataatagtgcatgcattcaaactaacatattacaagaacattataccacacagaagcatgctcccaacttataagtaaaccccaaagaatcaatatctttaaaaatagatagattttgttataacaattatgatatagagcccttgcagatatggaagacagtgccacaaaattgcaaaaaaggaaaaaaaaggtcagaattatatcactagttgatataggcatgtgctaaatattaagagaagagctgcatacaatggctgctgatattcctaaattgatgcgcatgtcctttactgttgatttggaggatctgcaagaagaatatatcaaccactagttattggattcaaatggatgtttctgtttaatttaaataacaagcattctatgtgcatatccttctcaacaatttcgctgtccatgcagaactagaacattgggggcctcatcgtttggctttttttcgtaataagccaaaacggcttattagagaataaaaatgaatttgtaggtaaaacttttatatatgtgttctcggtgacttaaaagccaatgctgaaaaagaaactacgttgaaaatatctcaaaatcaatgtcaaaattaagtttgaaaatttaaattttggctttttctttggctgaataggccatccgatgggggcctggaaatttcactgctcatgtacaatgcttgtcctataagatggaaatgaaaacaaaacaccagctgaggaaagcaaaactgaatagggcaaagcttgtaggacaggcctgcctttcagcggcctcatccacttcgcaagagaaacagggcaattcaaatttcttatgatctctaccaaatcttcatggctgtgtttatatgaaagatagaagcttgttattttccataaacatgcatcacatcaatcattgacatacacccaaagagattatcgatggactaatgaaatatagtattctaataataaacttgattaaaaaggtacctaggtccccaaggaacaattggctggtcatcagcatacttgatatccttcgacacctgacagtggaaacaaaaaccagggcaccggtgaataaaatcataactggataatataattgtaattgtaggaaatgatgtagacgacttttgagctactagtttatcaatagaacaaaaaatgtttgtggataaactaactgtagtaggtgacttatgtctggatataataacaactgttgccttgtttgatcctctatccatttccaaagttctttatatattttcaatgcagtggtaactggtcccctaattttcataaacaccagtgcgagatggtgccattcatagcatgtgttttagtgtttagttacttgcctccatcttatgtgttataatcctgtgataagcactagtaaaccgaatactcacaaaacttgtttcttttgcaaataggatatgtaggaaagcactctaaaatcttgcagttttgggtgcctctgcatttatagaaatctgacctgaacagaaccatatgttactcctttcttcctatactgcagctgctgcatcatcacagtgtcgtatgccttctccaactgaaaccacaagaagtatatcatcagcgccgagcaacaaaataacagtaacattgcaagcccaaaaatacaatctctgcacaatacagaacctttgacaggtagtactgatctccattctcgtccgcttccttgtgcttcctcttgtaggccagcttcatgtggtcgaagctatcaagcggggtaatacccagaatctaacaatccaacagcgcaaaaaatcaaaacacaagtccaccgagcgaataaaagtttaggggaaactgctcatttcagcttccacctcgtaggggttctcctcgtcgctgaactccgcgccacctgccgccgctgccgcatccgccgccaccacgaccaacccacgtcgcctcgccgccgacgcgaagacccttcattccatgccaaaaaaaaaaaaatctcaaacttatccacaaaccaaaacaaccccggtccgaaaagcggcaaggtgaatttaccgaagcgatttggggccggcgcgacgagggagcgggaagaaggcgcggcgggacaagggggacaccagcgcgggcaccgccgccggggcggccgcagccgccgtcgccgtcgccgtcgccattggtgcgctagggttcaaagcctcggacgcgacgccatgggagagcaaagcgcaaggtctatctctctgggaggtctcgcggaaggtggtggggttgggccccacgcgacccctcatggacccgaacgagttaggcccaacatcataatgggcctactgggctttcggcccatgttaatggcggtagccgccgccgagggggtatacgtagtagggggcccagcacgcgtggggaaatctctcccccaatccgtttcgtcctcctcgcgagcgatccccacctcgccgcagttcgccgacttttcgccgccgcgtcgcgctcccccgaggtccactcctctcctgccggagaagcgggcctaggcgaagagcagcgccatggcgaccgcttcgggtaagttttttgctagcgtccttttaccggtttccgtaaccctagctcgatcctgcgcaaaaaccgcgtggatttggtgtagatttcgctggttttggatctaggggcgttgataaacgggtgattccgcttcgattcgacgggaaatagggtttcgcggggatccgtacggtctctgcgttgcctgaattggggatcgaggctgttgcgattggttgatgcgaggagatttccgcggatgattctcttattacggtgatttctccgttgctgcagtgtcgtttaagtctagagaggatcaccggaagcagctcgagctcgaggaggcgaggaaggctgggctcgcgcccgccgaggtcgacgaggatggaaaggagatcaatccccatatcccccagtacatgtcctcagccccatggtatcttaacgctgataagccggtaagttgacgcttgctctaacgaaaaaaaattactctgtacgagtcaggtgatttttggttagtggaagttctgacttcatgttgctttgatggggttcagagtttgaagcatcaacggaattggaaatcggacccgaactacaccaagtcatggtacgataggggtgctaagctttttcaggctaacaagtacaggaaaggagcttgtgagaagtaagtgcggtgttcatttcattatgccattaatcctaatcagcatttaatcataaagttttaacaatctatttattaagtcaggatgcatcaatatgtagaatttgatttgtcttgttattcagaatatatttgaatgttgttttgattccaaatagccttaccatatttaagttttttttggcctctattacttctattcccagcccagattgtctaacggagaattatctgtatgttccagctgtggagccatgactcatgacaagaagtcatgcatggaacgacctcgcagtgtgggagctaaatggactaacatcaatatagcaccagatgagaaagtggagtcatttgaactggattatgatggaaagcgtgatcgctggaacggttacgacccatcgacgtacacccgtgttattgcagattatgaagctagagaagaggctaggaaaaagtatctgaaagagcaacagctcaagaaacttgaggagaaggatggtgaggagggtgacgagaacgtggctagtgaggaggaggatgaagaagatggtttgaagatagatgaggctaaagttgatgagagtgctcaaatggattttgctaaggtagagaagcgtgtacgtacaacaggtggtggaagcactggaactgtgaggaatttgcgtattagggaagacactgcaaagtatcttctgaaccttgatgtgaactctgcatactatgatccaaaaacccgctccatgcgtgaagatccattgccagatgcagaccccaatgataaattctatgtggtaagtatgagacaccctacaagtttaatgctttacactgtgttatggcccatattgatttcttatcttgcaaagactactaggttcagtattctgatgtgttgtttttcacagggtgataaccaaaatcgacttagcggacaagctctggagttcaagcaactcaacatacatgcgtgggaagcttttgataagggacaggatattcacatgcaagctgccccatctcaagctgaacttctattcaagagttttaagatcaaaaaggagaaattgaaatctgaaaacaaagataagattatggagaagtatgggaatgctgcatctgaagaaccaatccctcgggagcttcttcttggacaaagtgaaaaagagattgaatatgaccgaactggtcgaataatcaaaggacaggttggtatacaatactagttactgtcgattacacttctatagcttcttgctcaatagttatttcttcctaggatgctaggatgtagtggtttcaacctaatcttctgtcatccttcaaatctcaagtgttttttttttgttctttgccagtgtaatgttgtcatagttcttcctttaatagtctatttccgtaacctgtcactatagaactctacaccatataagatgtgctgtttagctaactacacataataatctgtttctgagaacgctgtttagctaactagttccatatcgcatcagatgacaagaagcttaaggtttgttctaagcacttaggcagttgcaagttatagagaccattcattacaactgcaagaaacttaagaaatgtggaacagcacatgaatgtagaactctccacacgagtgtaggttttgtggagctcttataccagtttttcctattagctctatccatttctgggtcattactttaatacttttcagttgttcacattatctattgtcttttgcatgtattagttcatggattctcaaagttcatttcatacaggatgtagcccttcccaagagcaaatatgaagaggatgttttcattaataaccatacaaccgtatggggctcatggtggaaagatcatcagtggggctacaaatgctgcaagcagactatccgaaatagctactgcactggcttagctggaattgaggctgctgaagcatcggctgatttgatgaaggcaaatatggcccgcaaggaagctgcagaaggtaagctgttgagagatattttggctttctgtgtatgtcttgtcagtttacactacacatgatttaatattcatattgccagtttagtttatgtgggataaaaacatgtcttcgtgggttgcatagctatcatatcaatgtgttttcagaaaagtattcccctcaaagttgtcttatttatgatagcgggaggcctcagatgtcagttgcttcatgcttatcttgttcaatgatgttttgtgtggataattggaaacgtgcagctgaaattctttccatataaactagcttaagtggtctattttacattaagccatgtgtgagtactgttagtccatgatgatgaacttcagttaacctgaaattgccaatgcagatgagcctgtacgacatgaagaaaagcgactggccacctggggaactgatgtgcctaatgatattgttcttgacaagaagctgcttgatgaagccctaaagaaggttagcacctttcatcttatattatctgtttcgttctgtcaatatatttatttatgtagatgctgacactgagttccattttttttgcaggagggtgcgaggaggaaagaggagatggatgaaaggaagaggaagtacaatgtgaaatggaatgatgaggtcaccgcggaagacatggaggcttaccgcatgaagagaattcaccatgatgatcctatgagggatttcctccattaggccttgtatgctccatagttgctcatatatgagcacaacactctgccttgcagtgtcacttgtgtaatgtattagctgtggctatgtcttcctctaactggagtgataatttagagctaagagctctctacttctcttccagatgttaccatcctcttgtccggatggttgtgtttgtattgctgatctttctataaatgatatggaaaaaaggagttgcatacttgcatatgcttatttgagatgccgaagttatggatacgtaatgtacaaagcaggatggagaagtgctaatttttgtgtgtaagtgactcgattgtatttaccatgattcagactctttttatactttctcctgcgacggatgatcaccgttacccatgcaagattttttttcccctggagagtatgcaaactgatgatctaaacaagccggaaatccctgtttctttttttccttgtgaattgtgataaacacccagcaatatacatccatgcaaccaatgaatgcaacaatcctacataaaactaatatttacacgaaaagactccaaattcaaactatagcaatcttaagaacacgacataatctcctcctacctaagcccctaaaaatcttccaaactccaaaccatagctacctatcaataactcttaataatcatgcttagattatgattattatacaaatgactaataataaactaagatgatgatgtgtcataggcctctcgcgagcatggcttggaattcctcggcggatttctggttctgcagcctcatctcctccctgaactttctgatgaacacctccgccctcacatccacctcccccatcccacacgctcctcctcctctcagcgggctcatcagcaagctcctcacgccgccgcgcgccgccttggcgccgccgccgttggtcgccgcgccagcggcagcagctttcttgccgccgcccacccgccccttgcctctggccccggcagcggcgttggtcgcagcatcagcggcagcgttcttggcggcgaacatggcgctagcgttggtcgcggctacagcgttgttgttgttgttggcggcggcggcggcgacggcgcgcgccttgccgctggcggcgccggcgttggtcttggcagcggtggtgttcggctgctgcgcctgcgcctcgtggacggcgacgtggtgggtcttgggatggctgtagagctcgtcgacgtagaccggcgcgaagctccggtgatggcaccacccctcccgctcccgcgtcgacgccgtggcggcctcgcggcgccggcgcccaccaccatgcccgcccggccaccgcacggcgcggcgatggatcttggactggatcaccggcgcaacttcagcgcaccttcgccaccacaaccgccacggcttcacactcaccctcctcctcccccttgtcgacgacggcgacggcgacagcggccacccggcgctgctcccgctcgccatgccaaagcaagacatgctagctagctctcagagagttgaaagcagcgtgtagatcgaagtaggagacgccgccatgggaggagaggagctttatagcggcgatggcgagagggggtggcgtgaggaggaggcgggggatggctttcggcggttttggcgggtaagactcacgctatgtggttgactgcgcattccttctttggttggttggtgtgggaatggcagttggctagcagctgcctagctccaacctgtctggctggctgcttctctttttttttcgccttaaatggtattcttttcctcggtctctatatctaactggatatatacaatcttttatattagaaacttagcatattaaatatgaaacttagccctcaaataacccaatctaaaatgtgcttatatagagatttgaatttaaaactttagggtgctactcaggtcactgcaagtctgcaacctataggttgtttctctttgcttagcttagcttgccaatgcctttactgctactgcttttttcaggctttctcacctgctgggcttgtgagatctggattagtgtcaactgtcgactgtcactgtactccagtaatgtgatgggtgttttttctaatgtgatgtttttttttgtttgtattgaggatttgagggatattctcctgttcttaaaattcagtcttttggggttcttttaggggtaacaatccataatcttcttatgttcttatcacatattcaggaaatttaatatatgttattttctaaatcttattgtctaatagccttatcttttctcttatgcttatgcttatcattcaaaatttgaattttcaaccttagtgatttggggattttttttcatcgaagtttatttttcagtatttgcttttagatcgttaagaacacgtatatagaagttttattcacaaattatttttcatttgtaaatatgctgtttgacttgttccccaaataagacaaacgatgaggccgtaagacttcatctggatatgaaaggaaggactttatatcaatggttttaagcacggagtgagtcccaaacccaggctgatcaacccactaatttgtggtgctagccactaaaaaccaatgggactttctctttatcacatatttagaaaaagaaataaacttaattatatggaagtgtttatttaatatatgacaaatccactaatatcagttttactcatcagtgtgatgtgttctattaattttccaaatgattaggctgttgggtcaaggtgatcagatggtcttaattagcatttggctgagaatcaaaatgactgaactttggtatctgattcttttttggggtgtggaagtaccccacttgagcaccgaaaactatctgaaaccaaaatgaacattctcttgacttgactaatattgcagcaagtgagacttgaccaacattaactcactgatgtgctataaatcactagaacctgagattaatgattgtttaatcagaaaagataaccatgctaacagcatgcatgcttaataattcttgcccttttggatcgcttgaaagtgtggatacacaaggccccatcttctgggtagctgtctcaagtcacagggacaagcaccaaaggccaaagcaaacaatccagtagagcacacatgaaggaagatatatacacatcttcacaggtcacaactcacaaacagctaattacaagttgctttttttttaccaaatacaagttgctttgagcaagcacaccgaccacttatgggacttgtgcttgcctgcctaagaaaagaattcttaaaactcctcccaaactaagtttctctaagtacaattagctttagaatcttgtgtgatcaaggggaaacttctcttgagatgcatacgtcttcttcatcggcaaaagggcggcagggcagattccatcatgtttgccgagattttcttctcatagatctcgtgaattcgtgatcgatcgagctagctgaagctgatgcccaacttgcagcaaaaagaaataaaaaaagggaagaaaaaggaagattctatcctcgtcttgtttgcgtgtacgttgctagcttaaaagctacgagaatgggaagaggaatatgcacatctttatcagatgaaaaattaactagttaatcagctcgttaactacatggtaattaatttaatcctacatgctagtggtactggagaggagactcatatgtgcaggcacacgagggtcaattttaatataattgtggtagattcagcgattttaatattcaggaactgtgtctttcactctttttgcatcaaggactttaatttgctggcttgctgagcatgcatgtgcttgaggagtggatattctactaccctggacacatacgtatatatggtcatgggcagctggatttatttgactaattgactgtagtattgatatcagggtttacaatcccaatatagaaaataaaccgctcatgagatttcgtggaatccatttacaaaaccaatgaatcccaacaaatattgtcaaaaaactaacattcagtttgttttgttttcatctttgacttaaaatacccgagcgttttctgctttcgacccgatcagaagactggttttctttgggattgtaaacagagagctttaattaatttttcggaattgctatatttttgtcagacagttttctagtgctgatctgacgaaaatgtttagttcacttttctgcatggatgatcagcataattgggctgggctgctacacgggaacaagtggaagaataagttcatgttaggtcccttcttttttacgttaagttttaaatcacatccctaaaccgcaaaatggggatgaacacatcctttattattcaaaattcagtcctaaaacagtattaaaggctattttgagtgacatagaacaataagcaaaaaaacaaaaaaaaacacatgagacctatatgtaagtgaaacatatccgatgcctaaaacagcccaaggagttaatctcataaggctcacatatttgtcttgctgcctggccttctaggcctgttccaagtgcagcggcgaccggcggcccaacccaacccgtgagcccaccagaccgatggataaaaacggtatgaaaatttcacgacgagcgacagaaaaaataatataataataataatttttaccacggttaccgtttctaaataaggtatagtttttttcctatttctatcaatgtggagtcaaagttgacactaaataattaaatctataaatataaaatttttctgtttttatttgtttctataaaataataaaataatgacaccgttttcgactatttccccctcgtccctacgtggatcgatccgtccgataccaatgtttccatggtggtaactgagctcgggactcccgccgcttaggttgattaattgcgtcgtcgtcgtcgcctgcatgcccccgccgcgctggagcgcaccgtctgacatgcttcgccacgcatggccgccgcgcgctgggtttggcatggcgcgcttgtgcgtcgccgtggcgccacggccgtctccggcgcgcgcgtggcatccatggcatggcatgcaacctctcgcgttctcccgtccgtccatgccctgcacctcacctaccgctactgtccaatgcacgtacgctgttacagacttacagttcgtgtaaagtttaacaaaattgttcagatatggtcatatggatagactcgtaggaccttttcactgtgtttagagagcttgtagtttcttttaaatcttaagaagtttgttgcagttttttattacaatctcaagctttctggctttctaaacagagtagattctcgcttatattatttttaaaaagagactacaccacggaatttcgtctggacgggatacttaatactcccacggaatttcgcttatattattgctgaggttatcccacaccccactttttagctcttactctataagggcacgtacaatggtgtttatcagtggtctctttctattgccatgcaagtaaatttgatgacatggaagaaagagaaatgagtatggttgttatgcatgacaacagcttagagtcaactcttagcatttattagagcaaattttgttgtatggtggtgaaagaaaggaaagaaaagtaagaaaaagtattttgatacattaatgattagagaccatattgtctctaactgttgtaggatgctagtctctagataacgtagagctcatatctgactctacctttgtacatgccctaatgctacgtactctcttcatccaaaaataacttaatctgaggaccgagcgtagctcggttggcacattcgcagtggagcgaacagccggtcgcgagttcgactcacgggacctcacctcgacgggatttttccccgtctttcttcgggactgtccttcggggcagtctcgactagaaataaggtacatacgtgtgcgtgtttagtgggactgcacatttcccgtgcactgagacctagtggtctccaatctcattcctagtgtgtgttaaggacgcgcacgcgtgtgtgcgcgtgtgttgtggtgtgagtgtagtgtgtgtgtgcgtcctgagttgtaccattctcaaaaaaaactcaatctagacggatatgtgactctttcttcttgttcaatgaatctggataattaactctttatccagatctattataatagaagatgtcatatccttgtttacattaagtgtattttctcaaaaaaaaaagactgagtgcattttctgagacgaatagagtagtactgtaactctaatctaagatgcatcacttatctcactttatctgtggtgttacccatcctacacctccaattgctgtgagagtgacaagattgacaaggcaagattgagagaagatttctcttgttcggcagctttagagaagatctctctagttctccacacacacacgttttccaaactattaaatggtacgttttgcaaaaagtttctataggaaaatttctttataaaattatattaattcttttttttcaaatttaaataattaatactcaactaatcagtatggttcatctcgtttcacgtatcttcttaatcttctttttttctctaaacacaaacgcggccaaattactagagaaaaattacaatttgtttcattggaaaaagaaagtgtgcgacgatagaaaccagacctaaccaggcatggtacacgcatgtggcaagaatggtagtacttacttttagatcaattggtaaaataaaatatgatacccgatacttttagggtaaattggaaccatgccattataattttacaaagtttgagatatgccatcggtatctcaatgacatgtaggacccacatgagtcaatgacatgtgggtcaggatgatatatcttaaattttgcaaaattataatggtatggttctaattttcccatacttttatgatacataataactccacaatacttaataattgatactatcttcattctaattgaaaaagagtttattttttttataaggatctgaaaaaaaacttgtccatatttatatataagtgaatttttgagatggaggtatcacacccataatattcataggtactataaaatttggtaccaaaaggttcaagtatcatgatattgatctccatgacaccaagataccaagatacttgtactatgacatttggtacctaatggttcaattatcattatacctaatatcaccatgatatcttaagatatcatgatatatatttgatacatttatgatatttaggtatcatccatatctatatctatatactactcgtacctgtttaatggtaccatcatacatgataccttcatgatacccaaagaaatcatggtatttaggtatcatccgatatttttatatttattgaagttatcataatacctgaaactttcataatatctgatgatactacctctatattttaatagataacgccattaatttttaggcagacgttggacccttcatcttattcaaaaattttagggctaattggatccataccattaaaaatatgttggttttgaaatatgacactagtattcacgtatcgggaaccatgccattataattttacacgtattcaagatatgccactaccctttggatgcatttacaaaaatctggaccaaactacccttttccccttattccttctcccttcttcccctttcttcttccgcctctcctccatggcgtgacctgactggcgatggtggccaccacagtcacacctcctcctttctctagcactctttcgttcgtgtctccctccaccttagcccgccgccggcctcctcatgcgcgtcatctccctccacctcgacccgccgccggtctcctcttgtgcatcagcgcgtcctagatccagtcgcctctcctcgccgtgtgaggagctctgggcaatggcgatgaccaaagaattaaagagcggccacttctctctggcaagctcctgcacctccctccctccctccctcaccgcacccgcagcttctccggttcagcagctgcctccaccacctcgacgcccgatgcagcgaggacggccttcgtgaagagcctcggcagatggcggacctgcggtgttctgtccggcgctccgagctcccgcgacggatgtcgcaggcgaagagaggtagaagatgagtgaagagagagagatagaagatgaggggatttttcgtccaatacatgcaaaatacgtatcttagtggcaccattgagattacgaacaagcagcagtggcattgttacaaatacacaaatagtaatggtatattttaaaaccggcaattttttagtggcacgtatctaattaacccaaaatttttaatatgtgagtgtgtacgttctatgaatctgtcacaagtcatgacgccgcgagccgcgtccagctacaaaccactcaacccaaacgcatccaaaacccctcgctgagctgccatgcatgcactccccctcctcccactataaattatcaccacctcattcccgccatgtctcaccaccaccaccaccaacactgcaacacaacacaccaccatgaagacggcatcaatggcggcgtcgctgctcatcccgctctgcctctgcatcctcctcctgcgcggcgcctccgccgtgagcgaccagcaagaagccggccgtcgcgatagctgcgaccgcatcgaccgccgcatccgcgcgctggagccgacgcgccgcgtcgactccgaggccggccacaccgagctctacgacgaccgcgacggccagctcccctgcgccggcgtcgccgccgcgcgcatcaccatccagcgcaacggcctcctcctcccttcctattccaactccccccgcctcgcctacatcgtccacggccgtggcatcgtcggcgtcgtcatccccggctgccccgagacgtaccaggagacctcgtcgtcgtcgtcgcaggagcaggaggacgacgagcgccgccgccgtggccgccgtggtgatgaggagagacggcgatcgagcgagggagaggaggaggaggaagaggagaccagccgccgcagcttcgagcagtccatccgcgacgagcaccagaggatcaccaccgtccgccagggcgacgtcgtggccatccccgccggcgcgccgttctgggtccacaacgacggcgactccccgctcgtcgccatctccgttcacgacgtcagcaacaacgccaaccagctcgaccaaacctccagggtacgtacgtgcgtaatcaatctcgagattaattaattgatggactccatcggtcgaacacctaacgtgcaatgtttcttctgcagcgtttccggctagccggcgggcaggcgaggagcgaggggaggcagaggtacggtgagggcgagtcgtcggagtcggagacggaacgcggcggcgaggagtcgtacaacatcctgagcggcttcgacaccgagctgctcgccgagtcgatgcgcgtcagcccggacatcgcgcgcaagctgcagggccgcagcgacaagcgcggcaacatcgtgcgcgtccgccgcggcggcctccgcatgctccgcccggcgacggagcgggtgaccgacgaggagatgatgaggggcgccaacgccgccgccgccgccgggaacgggatcgacgaggccgtctgcttgatgaagctccgcgagaacgtcgccgacccgatgaaggccgacctctacacccccaatggcggccgcatcaccgtcctcaacagccagaagctccccgtcctcaagctcatcaagatgagcgtcaaccgcggcgtcatgcgccgggtgagacgacgaacgatcactgttttaaacagttggtggacgtccacccgtttttttcatggcatctaaatccttaaaaaaaattttcaaaaaaattaacatgataagttaaaatataatatatcacttcagaaatatgtaaattgaaatttaacttatacaagttgtaacaaaaataacaacttgtaaaagtcgaatttgaacctgcatatttgtaaaatgatatattactaacttgtaattttttaaaatttttttttataattatttaggtggtatataagaaactagtagacgttcacctgagagtttagaatccaacttctatgattaattaacagacacgaattaatcgatggtgtttgatttgatttgcagaacgcgatcctggcgccgcactggaacatcaacgcgcacgcggcggtgtacgcgacgagcgggagcgcgaggctgcaggtggtgagcagcgaggggcggcgggtgttcgacggcgagctccggcgcgggcagatggtggtggtgccgcagagcttcgcggtggcggggcgcgccggcgacgaggggttcgcgtgggtgtcgttccagacgagcgacggcgccatgaacgcgccggtggttggcaagtcgtcggcgctgcgcgggatgccggcggacgtgctggacaacgcgttcggcgtgtcgagggaggaggcgcgcatggtcaagttcgggagggggcaggagctcgccatcttctcccccaagtccggcgccgccgcccgccgccgccgctctcccggccacagggacgacggcgtgctcgccgccccggcctgaggcgtacgtagataccagcgtgagcgcacgtgcgcatgtacatgtagtactaataatgtgcacgttttccgttaagggtgccacgcactgcatgcaccgtatgttggcccgtacatgtacggtgtacccgatctagaataaatgaagtcgctgctgctaccaaagtgcagtgtgttaattaagagctcgtttcgctttatcaattaaaatttggcttaaactgtgaattaactgtggaacaatccgaaattttgtcggtcgatcagcgcatgaatctatccatggctgtgttcttaagagcaagttcctaacactcatctctctcattttccacgcgcacgttttttaaattgttaaacggtgtattttttttaaaaaaaagttttctatgcgaaagttgtttagaaaaatcatattgatctatttttgaaaaaaaagttaatatttaattaatcatgcgctaataaactactccgttttccgcgcccattatgcaggttcccatcctcccctagcgaacacagccataatattagttttacatgagctcgagggaggagtcgtcaaccatcgtgtgtagttgctggaagtagggacgtaggcgggtgaccgtgaacttgtttataggtcaaacaagtagtaaacctgcgggttcatgtgtcgtggtctaacttactgtatttatggatgtaattgagtcaacccatgaatctacttatatgtcaaaaatactagtaggcaatacacaaatcaatctgtggcttactcactaattttatctataaatggattctccgggtcggcccacttatacatccctagctggaaggtgagcgaggaggaagagaggagaggggggagggggtaaggaagaaggcaagatgaggtggaaatcacatgctaactcaacaagttaaccacgatcaaactgccacatcagtagaagccattttcaaaaccatgaaaggagttgatttgcaccggttttcaaagatgaaaaaggtatactctttttagttttgcggttgaaggagacaattcaactggggagcaagataggggaggaaagacagacttattcccaatgcgtacagaatactggcccaagtccactaaactgcccaagattgcaggctcacagcacagcaccaggattgctaactcaacaagtcaacacgatcaaactcccacatcagcagaaaaccatgaaatgagttgatttgtaccggttttcaaagatgaagtaggtgctacactcattttgcacttttgcggttcaaggaggcgattcgcgagcaagagaggagggaggaacaacagacttatttacaatgcgtacagcccaagattgcaggctcacagcacagcacagcaccaggattcctccatttccaccggcgccggcggccgccgaaaccgcccgctgcactccggcggccgcccaccgtttccccccaccaaaaaaggtaccaccgcctcgctccttaacccccctacccccgaccatgtcgccgcgttctcctccctccaatccgccatggcggcgcccaagccactgtccccgcgcctcgccgtcccgctcgccattgctctcctcctcgccctcggcctcgtcgccgacttcctctggtcatcatcttcctcctctggcacctccggccgcggccagctcgcctccgcttccaggacggtaagcgcttgattccgcccaatgcggcctgccccgccgccgtgatgcagcttactctaccagcctatgcaggcaacggcgaagaagagcggtagggcgcgcgggaagaagccggcggcggagggctacctcaatgcgacgtacgccgacataccggcgccgcggtgggactgggaggagatgccggcggcgcccgtgccccgcctcgacggctactccgtccagatcggcgacctgctctacgtcttcgcagggtacgagaacctcgaccatgtgagaatccccccctcttacaattccacactctctttgcaaaaatgcattctctcatttactaattttctgctttctgttcacctcaatttcaggtgcattctcatgttgatgtgtacaatttcacttccaacacatggacggggaggtttgatatgcccaaggagatggcaaattcacatctaggaatagcaacagatgggaggtacatttacgcgctgaccgggcaattcggtccccagtgccgatcacctataaaccgcaacttcgttgtagacacagtgacaaaagagtggcatgaactgccccctttgccagttcctaggtatgctctatggagtctgtcatcacttaccattggtgcttatgttatgtgttgttgtgtatcatctttaattcttaggctgctatcacttaagcaattgatgcacttatgttgattttagtattgaattatcgatcaaccttagcctagtaatgattactgagcaaatatcaggccaatagaatttgttgatctgaaaaaggctgctatttctgctatgattttaagatgttctaaagctatgtaatgatcttattgctataccatataaacaatcaggtagacaaaacaaacttatgttgtaacaccccttaggtatgcacccgctactcaactttggcgtggacggctccatgtgatgggtggtggaaaagaagatcgccatgaacctggattagagcactggagcttagctgtcaaggatggcaaagcattggagaatgagtggcgaactgagatagccataccccgtggtggacctcataggtttgtacgagtgtacttgttgtcagttgtgccgtttatgcagtttgctaattgatgtgcagattttattagtgagaacacatgcaactgattagaatattgacagtacttcatttttgtcttaactttttacagggcatgcattgttgctaatgataaactctttgtcattggcggtcaagagggagacttcatggcaaaaccaggctcgccgatatttaaatgtgtacggaggcatgaggtatgtatgcttatgtaactccttgatgttacaaattgaagattacttacctgcacctgatgtttattcccttattatcaaaatacaagatataacgctacagtttgcattggccacttagtgatattaacacttgatgtttttaactattctaaacaaaaataacagtagttacacccagtgagtacttatcattgttaaaaaaaaaagtgacatgaacttccatataagaattctagttagtagtctctgtttacattttgatttttatgttctagccgtttatggctatagcttgattctgccataaacacaatttgcacttttgcaggttgtgtacggtgatgtgtatatgctagatgatggaaataaatggaagcaactatctccactgccaaagccaaattcccacatagagtgtgcatgggttatagttaataactctgtaataattgttggtggaactacggaaaagcatcctattaccaaaaagatgattcttgtcggtgaagttttccggttcgatttggatacactggtatgtcagttatatgcacctttcatggttatattctcccaagcatagtcaaatgatttgacagataaacatctggaatgctcctttttcagacatggtcagtcattggccgcatgcctttccgaatcaagacggccctagctggttactgggatggttggctctatttcacttctgggcagcgagatagggggcctgataatcctgctccaaagaaagttgttggttgcacgtggagaacaaaactacacctttgatgtggaaagttttagctgttgttactgtagattataggtcagtatctgtttcccttttctaactgctaggctctccagaagctatttttgtcctgtattttgtatgatagattgacttctgattcatagtgtccttgttgtctatattgttgtgcatccacatttcctagatgaatttcttgccatgttcttctaaatggccagaatataatatattaacacaatcattttgccacttcttgctgccttatgtaagatagtcaccttgttggtcgtaccatggactgtatctgcagagttcgaactgaagtttctgttgcgtgttctgaatgttgacgttcctcctgattttgatgctgtctacttgtgttctgaatgataacttgtgtcctgattttaatgctgtttacctgcttgtcttcattctcacgtttggaatcggaataccagaatctaggcatatctccaaacaacccaaatgaacttctgtaacagtattttatagatccaatccatttccaaccttttttgagggtagcagcagtcaaggaatcaatatagatctactgtatcgaaattggattgtcgtcctctgctttgtcattctgttaagctatataagtatatggtttacttatgcagcaaccatttttgtcatgttgcatggctgtttgcacctttgacaatttggtatgttaactggcttcaattcaaggggctaattgactgtgaaacgtgaaccattctgcgctaatattcttttcttcctacgttgcttgtgacgaatattctgctagattgagttgcggctgatttagctactatgtttctttcaagtttcattgcacgtagcagctttagcagataagctttaatatattttatgactatgcttcaatctattttttgcctaccttttcttcttctaccatatataattttcatgtacaaaagggctccacgtcgagttacaattattttatttatttaactaatcatgatagcattggtgcaattatttgcatatttattagagatagaaatagacttcatcaatttaattccaagatataccaactatttcctcccccattttcttctcatttgccttgatgtcaagaaagaatcatttctcctgcaagaattattgaaccccattataatatagttcatgatacattttctcctcttctggtgcagatcatgaccagctgttgggtgattactgatgacactctctgctggatgattgtgactcagtcatttcttcttcttcctttgtgtagcttaaactttgccggcattgacaggggacctgtcacaattaacaatggctaatcatcaccgcatggaactgacttggtcttatcgtcttatttagtaggatttaattaggcccaacttctccgtggacgcccggtctggcggtggcggatgggcggccggcgatgagctcgccgtcgttgtcgccgctgaggcgagctgctcgcccggtcaccgactaccacctcaaatccatgcatgccgatatatattttctgaaagctcacatcatcgtatgatactaagtagggtcaaaaattaaatttggttcgagttaaaaaatgtagctgttcttgttactgaaaattagatatcatagaactgttgtgttgtatatgaaaactttttagtaatcatggcttctaagctacatcataatcatgtagcctcattatttttactaatgaattcctggtctcctggactattttcttttgcctgggtgtgttgctccttttttgccacaaagtcacaggagaaaaaacagccaatcatgggatttgtgttgatggtgatgtgctaattcgattccatttgtgtatggacatatggtgatcggcatggggccaatgattcagtggctctaacacatgtcaagaaaaaaggtgatgactaggatcaatcaaaacacatacacacacaaaatggtttcagaagtagtcgcgagttgcagtagttgctagctacatctagtggttaaccaacttttatctagaggttacgtctaattgcaacagctgctagttactagtagctacatctaactaatctaaggttaactacatgtaactaatctaaaggtgtttacccttttttggtctagagttttcttactgtccccaattcccatgatcacctttttagcacaaaaatcatgtcaacaggggttaaattatgagctgaggttgtttatggcctaacatatatccagcatatgacaaaatgcaaccacacgttttcctttctttttataatagaacaaatttctcagcctctggatttcatttataattaattgtccacacaaatacagtcgcatatttaaaggccctgtttagtttccaaaaacttttttccaaaaacatcacatcgaatctttggttacactcatagagtattaaatatagataaattcaaaaactaattgcacagttagaggagaaatcgcgagatgaatcttttgaggctaattagtccatgattagctataagtgctacagtaacccacatgtgctaatgacagattaattagtctcaaaagattcatctcgcggttttcaagcgagttatgaaattagttttttcatttgtgtctaaaaaccctttccaacattcggtcaaacgtcctatgtgacacctaaaaatttacttttcacgaactaaacaaaatgatcaactactggatatacatctatagaaatacgaacatacacttttcccctaatttgaaaacgatattgatccaaattttataaaatttagaattcgactttgctttcactttgccagtcatgcggatctttctggcatccctcacacgtaattactccacgagccttccactcgaatctgccacgtcaccgacgaacggatgggatcacgccacgtgtcccctacccctccccggacggcgcgggcaacacgcgatcctggccgtggagtggagagatccctttgctcgctgagcactctaccccgggtccactgacatgtgggtcccaccactcgtgtgggcccgggaagtcgctagaataaataggccccacacctctcgtctccgcctactcacccgcccggtatttaccattctgcccctccggcgagccccaccctttcccgccctcatggcgcccagcaaccgcctcgccggagctgcggcggcggcggcggcggcgcctcctcctcctcctcctcctccgccggctnctctacctccgagaggatctcccgcgccgtcggagaaccatacagcgatctcggcgcctctgctgcagcccgcgggggcgggcgcgggcgacgcggcgccgctggcgaagtggctgcggcggctcgaggcgttcctctcggcggcggggctcgcggcgttgagcccgctcgggaaggcc

SEQ ID NO: 6388 - DNA, 49737 bp, Oryza sativa
  unsure (1)..(49737): unsure at all n locations
attcgtttaattaacaggagataaagacctatagtgggactgccttgtgtctgcacaaatgaatgaacaaatctagctaacaacaaaatgttaatcggtaaaaattgaatgttaaagaatatatgtgtaacttcaatgaatgtctacttattatgaataaacacacctagaaaacaaaacagagaaacactcgtggaaatgtagtttagttgtagaagttatacgacgaatttataaggcttcagttgtaaaaactgcatgacaaatttaggattataatcatccttaatggcatatattctaataagtgctgacatattatagtttgtgtataataaaatgttgcttcatttttaaaataccatgcagttagttctggtgtgatgatccaccatagctaaattttagtgctagatctgccattgacacaacatattaaagtccatgctacaaatctgtagtcctctcatcttttattttttttccgcatgtgtttatatttgacttatttttttccgcatatatttataagtgacttgcagcctactatgatacttgctctaatacacttccctgattgatggttacaactagcacttgcatacggcccacggccctaggctgtcactgccaagaaattcgagtcaccaatgggccgtattgcagtgtaatatctccgtctcaaattatttactccctccatccacaaaagttacacctatttcacatttgatttttttcaaataagttgttcctatttgtagtctttatgcattcaagacttaaatgaagagataaattaaatgttttattagaacccaaggagtcatctaaatactcattggttgcatgcttgtattcactccttgattttacaacatccgaggtgatttaatttctccttggtcttggtgttaaaagtaatatgtataactattgtggatggagggagtattttttaaggttgtttggcatatcctaaagtttaaaacaaatgactataatacccttataaaataatttatggttaagaacaaattactataaactttataaaataatttatggttgatgatagaaaggtggttgagaggtataacagtgaaaattttgaatggaatgtggatggcgccggcggcgtccgtcaccgcctccaccgcacgtcgcgcctggtactgcgcatccacaaacctcacaccaccaccatcactagctcaacaacaataaaaaaaaagtgcagtaatcaatcaaaacgatgatatataattcacctcgccctcggcgtgtgccttcccggactcgaaggatcgctggatgttgctccacacgcctgctgccgatagatgatttgttgattgattactttctttctgctagcagtgtaaatctagacgaaaaacaatcttcttgcctgctttgttatatcctgattcgatttgtcaggattttgggtggcgatccgtgaatcaatctccgctagctagctcattcttaagttagatggcccataaataggagctgtaatcttttcctttacatcccatggttttaatcttataatttttcttctgctctatcaataaaatttcgcaccgtcttatgcgagtcgttaaaaaaataagaaaaaagtacgaattatccctccccctgaacaattgcggtagtacgatttaccccctaaactacaataccggacatttgacaccccaaactcttaaaaccggataaattataaccctaacttgattcaaagcggttttaagcctacgtggcacacacgtggcgatacacacagcaaaaaccgctgggacccacctgtcagtgttttttttcctctccttctctgcctttctctctcggtgaacagaggaggcggccgcgggcggcgggcgaggagctgaggccggcgcggagcgagtgcgcggaggcggccgcgaccagcaggcgaggagtcgaggccggcggcaggcgggtgtggaggcggctgcgggtggcgggtgaggagccgatgatggcagccggtcgaggcggaggcgggtgcgggtggcgggtgaggagccgaggacggcagccggagggggcgaaggcagggtgacgggcaaggaaccgaggacggcggtgggacgtggagtgaggcggtggcgggatcctccttcccctctatcgcagcggcgcgggctcctccttcctcctcgtctcgtgccgccgcccactgaccgcctgctgtggacagttcgtccgtctcggcttcctctctgcggtgtgggcgcgaacggcaacgactcggtggtggcggcggtagtgggggagaggcccatgggggcggcgagggtcgtcgctgccctgtacgacggtggcgctcgcgctgtggctgggtggcatccgaggagaggggggggggtatgataggtgggcccaagaagggttttttttggctgactggattgctatgttggcgccacgtgtgcaagctcaattcaaaaccgctcaaaacagtattgaggagggtaattcgtccggtattaaaagtttagagtgagtaatatctggttttcggatttagaggggtaattcggtcgaccgcaatagttcagggggggcgataattcgtactttttccaaaaaataaataaataggagctgcaatattggattggagaatatgaatattcacatggccctttcgaaagcttggttttaatcctgttcatctttttcattcttaattttcctactcggataaataaataagagtaattaaccgagtgggctgtttattcacatgctttcaaattgcttacattaatctacattatctatgtctaatccttacagaaaatggttggttggttggtttgttacaagctcaaaattcttacattttttagaataatctacatacatgaacaaatcattaacatgcagcagggccgggtcctcaggctcaggcctagcccaatacggaaggccgtaggcccgaaggcgaacagatgcgccaccagaacgcgcaccggcgcacgcgccatgccgcgattgccaccgcctgccgcccacgtcttctgatctcctcctcctcacggcgccgaaatcgcgtgcaatccccaggtccagaggccacgcatcggcgccgactccgcggctcacggcttcccgttttccgctgctccgcgcgacggcagtagccagtaggccacgaggtgctggtgcagccgctgccggttgcctgccgccggctcccggctgccccctcgagattggacaaggaggattctattcaggtgagtgcaacaccaatacatcaatacatcatcactaattttgtaacattgtgattatatctgttaacatgtaaatagctatatatgtgcccgtgtactgatgtatagtcctatattagggcaattcagttgtcccgatagttggacaaactgacgaaggcactagttgtgtttccggctcatttgcggtgcgcatctggacgctcgcgataaactatttggtaagattctaaatttagatttgtaattttgtagtgtaatttatatgagttaaagtactataataacttttgaggtaacatatgttttttatataaatattatttctaaatgcaatttaaatgttaacattaataattcagtatatgtatctattgattattattatatagtatgaaagggcctctatatttactttcgcgctagggccctgaaaagttaggaccggccgtgttaacatgcaccgcagaaaaaaagaaagaagaaagaaaattaaaagaaagaagaaagaaaatggacacagctagcttgctctttttttttaatggaaccaacacgagagtgtgccttttcattgaatatagtgggagaaaaatacagcccctaggggcaaagaaaaggcaaaaaccaaaaactgtacactatacaaggtgcgggataagctcgcgcaatctcttagcacccgctaacgcccacatgccagcttattcttttatttttgcaatgaggtacattaatgttgtggcctctttgtgctcaaagattcgccggttgcgcacattccatatttcccaaacaatgtggaggatcagggtgcgtaaccccttcttggggatgcccgccgaagcggctagcatttcccaccaatctttgattgtctgggtcatctcccaatgccagagattgagctgaacccagtccgctaccagtctccaaatccttttggaatatcgacattccgcaacgaggtgaaacgccgtttcatcctctcccctatagagggggcgctgcccgttgttctgccatcccctgtttgtgagccggtcagaggtccatactctattctagatgatgagcatgcatgaagcttacattttccagacacccaagctctccaaattaatgggtcaaaggtcgtgtcaagcgtgccaatgcactgtgctttgtaggctgacgaagccgagtactacccgtgagttgtgaacttccatgtgatttggtctggttctccttcatccagatgcatgccatggactgcgatccatagtgccacgagctattccacaaaagtcgccgtgatttgcgggtttgtctccgagaccaaatctccgatccagtcatcgtttttcttcttggagattgcatagaggcatgacgtcttttgggcctgcggccgtccagctagcttgctcctagctaagcgtacgtagtcggagactcggagtccggcgtcgtgctgaacaccggcttgtccttgtccacaaccaccgccgccgccggagtgggggcttgggcggcggctggtcgccatagcttcttcacggcgatcacggcgcgcgtgcgggggagctgatcggcctttttagactacaccggtggcgcccatgcccaccatggagcacaacccgaagcacggcgggagcacgccgccgcacagcccggcattgccgtcgagctcgtcggggttgatcgacagtgggcagtagctgctgctgttactgctcccttctgacaaggggattattggttctttgtttggcacatgtccccagtagaatgtcactgctattaccacatcagattgaagacaacaaaagcaagtaattaaatgggttaatacaactaaggctgccaaaactgtcaagaggataaactgctagtggttagcgattagaagtaaatttggactgctgggttgccatatgtctacaagctacaacaggcgcacaagggaaaggagcactttattctatatttcatcaagcaaaaaacccttgcatgttcaatattctaaaaatcggcgcagtcatcacctcggtggtttttaggtgcctgatggtgagtccctgctgccctaatttttctcaccgtcgagcacctagctaacagccaccgatgcagcaagggctctcaacggcgagagatatgtaaggagaaaaattaggccctaatcggcgtgctaggcagggtagccgcatttacctctaaccactactacaaaatcctaataggggacgtgtgcagatttctaaaaaaccatcacatttaacctcttcacaatcttcacatgagtctaagattaaaaaacgatactgacatgcctttataggtgcaagtttaattaaaaaaaccagcacatataaatacatgtgctattttttttaaaaaaaatcagcacctagaagaatatatgagtaccggttttctaaaaaccgacacgtttgtgaaagccgagccgatgaaaaccgagctgacctaatttttcttctcgccctcctcacatatctctcaccattctcactgctctccgatccccttttctgtcctcgttgcctccgccactcctccccctctcttttgctacctccttgcctccgccgaccctccccctctcctccacctcccttcccctgtcttccgtcgccccttctcctctcctcctctctgctcggggacggccagatccgccgccgcgtgcttagggacagccagatccgccgccgcacgctcgggggtatccggatccgccaccacaagcacggggcagcccatttaacgactactgtggctccctcaactccctcaaccaccgtgtgcttgggggcggccgaatctaccaccgtgcacacgaggacggcctactcacaacagcggcttcctcaactccctcaatcgccacaggcacaggggtggctgctcaacgacgacggtggctccctcaactccctctttgtgttctcctctgtgttgttaattttgctcttgaatgttgattttataattgtgttcttggatgttgatcgattttagggatgatggagagttgcttgatgcatcggctcgaatcgagcaacctttgttttggattcgggactctcaaagatgtcggttcctaaactggcacctaagattcctcctcatcagtgccacctatgaggtgccggttggaaaatctggcacctacgtaggattcccaactggcacccattagggtttatgtagtagtgaatgtttaattattagtatatatcttggtttgaaagtaaataattgtatgtaaattatgtttatgcaaaagttttcaaaattgaatttgttgaaactcctacctttctcaccaacgaacaataggttggcacttccaaatgatgttttgcatggacaagattggttgtgaatgattgatctacgaatgctaaaaggaaattgtgcctaattaggagtttgtaaggctgttttagcaagagataaattcttataatcgcaagaaaaaatctgcacctgatttcttactcttcttgccatatagtacctttacatgtttgactgattccaaattaattcccaagacgcataagctttccaattaatctatactactactacaaagataaaatatatataaaaaatgtcctccgtcccataatatatgtgcttttgggtggatgtgacacattctaagacacattctaaagaggatgtgtcacatccaccaaaaaatccctgagtactttcttagtgtttctatattatctaaaaaaaatatgctatttgttaatctgcactatatattaactgcagggtcatcgatcatcattggacaccaattaagcaacagcaatggcgtcgaggagcatatcaagctgcacaactgagacggcaaaaggcatccacaggttcgagatcttcagttacagcatgatgaacaccgaagccgaagacgactccatccggtccggcgtcttcaacgtaggaggattcgattgggcgttgctttactaccctgacggcatcgacgacgacagcaagggctacatcggcgtctacctcgagctgatcagcaagaacggcgagccatgggcactcgtcgacgtgaatctgatcaaccagctgcaacccgggcaacctcgtcagctgttcaccaagaccgatgtgcctaccccgttcagatcttcaagctttcaggagtctaccttggggtctctcaagtgcatgaagaggagcgatattgagagcactccagggttcatcgtcaatgactgcatcgtgatcgaatgcaatgttactgtcatctatgagccaaaagtgtctaaaaccagggcattgtgtgacgctgaaactagttcggcattgcgcgagatcgaggtgcctcctatggagatatcgtcggatttcgccaagatgttgaaggacggtgtaggagcagatgtgacattcagagttggagaagacacattccgtgcccacagggcggtgctagctgcgaggtctccagtatttcatgctcagctctgtggaccgatgaaggagaagaaggagacacaaatgcaggagataaccatccaagacatgcagccatctgtcttcgaggctttcctctatttcatctacaccgattgtgttccaagaatggatgatcttggcaatggtgagaagatgcatttgatgatgcatttgcttaaggccggtgaccggtatggattggagaggctcaggatcatgtgcgagagatttctagctacgaacctcgacacggagcatgtatctgcgatactgggtctagctgacttgctagatctcaagaagctcaaggaagcttgcatggagttcatggtcccatctgagagaatggatgccgtggctgcaagtcaagggtaccagcagctgaagagagcatttccctctctggcgtttgaagtgtgggagaggaggagccgtgttcgcaggaattaattaacatcttcttgattcagaagatatatgtgcgcgatgtctggagatttcctttttggttatgtttgttttggtacatttgatgatctgacgaatgttctctcaacaatgtgatgactgatacggtgcacgcgtggttgcaccttaatgtaatgtggctatctggatcatgcaaatggttttacctttagatcgagttgttttttaaaccttactctcttaccaactctcttaagtttttatgctagaaatttgccccatcactcctttttatcttaaattgcccatgagttgctactcgtgttttgatatcttgtgtgttcactttgatactatttttaaccttgctaaattttgtcattattaaaattcggcaatgtagcaaaccaaacacactatcaccaacatattcctcccaaactgtagtagttttattaattttcgctataaaaactctaaataaatttggtaatgtgcctcaaacatttttttttaaaaaaaatgtgtctcagaaaatgtgctcaaacatttagtttgtctttagcactaccagagtgagacacacacacacacacattttggttttccatcgaattattatccaattccatatgaatatcgatctgatcgaacttgtttgattaatctattgcaaaatacttggagtcctccgtgtcgaatggaccaaatctccatatatatagccgcatctacaaaccacttttttatgagaaaatgtgacacacacacacactttgctttcccgtcaaattcttatccaattccatctgaatatcgatctgatcgaacttttttgattaatctgttgcaaaatacttggagtcctccatgtcgaatgtgacacacacactttgctttcccatcaaattcttatccaattccatctgaatatcgatctgattaaacttgttcgattaatctgttgaaaaatacttggagtcctccatgctgaatggaccaaaactctccatatatagccacatctacaaaccacttttttacgagaaaatgtgacaaacacactttgctttcccgtcaaattcttatccagatccatctgaatatcgatctgatcgaacttgtttgattaatctattgaaaaatacttaggagtcctcagtgtcgaatggaccaaatctccatatatatagccacatctacaaaccactttttcttatccaattccatgatcgaacttgttcggttaatctgttgcaagatacatggagccctccgtgtcgaatggaccaaatctctttatatataaccacatctacaaaccacacgtagattgaattggtaacaatggagacggcgccgtcatcgtccatgtcaccggccagcggcacgtacgtcttggacgtccacggcttcagcggcctgaggaggcagcactgcggcggcggcggctgcatcgtctcgccgacgttcaccgtcgccggcctcgagtgggccatccggtaccacccggagggcgacgccgacgaggtgaccgacgacgtggccgtgttcgtcgtgctggtcaccaaggacgccacggcgtgggcgcacgtcgaattccggctgctcgaccaggccgccggcgagatggtcaccttcttcggggagaaggatccgatcttgttcgactccggcagcgaggacctgtccacctggggcaccggcgagctcgccgccaggagcttcctcgacggctcgccctacgtcgccggcgactgcctcaagatcgagtgcgccgtcgacgtctgccgcgaccgcctcacgttccaccacgacacgccgccctccggcgagccgttccgccagtaccccgccgacgacgagccggccgacgtcaccttcaagatcgccggtgagaccttccccgcccatgtctccgtgctcgccgcccgtgctcccggcctgctcaacaacacgacgtcgcaggcggcaaccatcaccatcgacgacgacgacgacgacacgccggcggcggcggcggcattcggagcgctcctccacttcgcctacaccgacacgctccccgtggcgagcggcctcgacggcgccggccacacggcgctgctggggcgcctcctcgtcgcggcggggcggtacggcatggcgaggctgggggcgatctgcgagcgcgccatgtgcaggagcctcgacgcggggacggcggcggacacgctggccatggccgacggcacggcttcgacgcgctgaggcggcggtgcgccgagttcatggcgtcgccggacaactactacttcgtggcgggaagcgtcagccatgggcgcctctccccttcactccggcgagaggtttggaacaagtactatgacacgtgttgcagcagatacgaggagggggcccacattctgacagcaacaaagattaagctaagcaaaaaaaataatacagcagacaatgtggttgatatatgattcagaaattgtaaatatgtagaaagtagtagaatttcttatttacgatatagcgttattaggacaaccaaaatattgtttttattggtcaaggacttttttatccaccactttcaatggtgagttactaataggcaatgcttaatgtgttttttttttttgctttagtacaccatgctagtatatttctatttagtagagtatacattgtttgcttagagggtgtttagatcgcgcggggggggggggtggtgttaaagttttgagcgtgtcacatcggtcatcgagtattatttagggtgttgcatagggtgtttgggcactaataaaaaacaaacaaatttattaatcctaattaatccgtcattagcaaatttttactgtcgcgtaccacattgtcaaatcatagagcaattaggcttaaaaaattcatctcacaaattagtcataatttgtgtaattagttaccccctccatttcacaatgtaaggcattctagcatttcccacattcatattaattttaatgaatctaacatatatatctatctagattcattaatatcaatatgaatgtagtaaatgctagaatgacttacattatgaaacggaggaagtatttttttagcctatatttaatactacatgcaggtgttaatcttacttaagatgaatttggccgattacagaactacctaagatgaattttactgtcttggttttttttccctttgaaatgtggctattgagtaatactaatcaatataagtttggcaattaccgcttgcaaagtctgctttgtttttgtagctgacttgtaaaaattatgggcagtagtatttttttttccttgatgaattgcaccgcacaatctatagactcttcgtgcacctcaatgtcgtgtaaaaatgatggccaaactagaagaaagagagggaaaaaaaagagagaaaagaatggacgcttcggcttcgatgtctgacaaatacagttaaattctctcgacccctcttgttcttcaattttaaaaaaattcaaaaaatcttcacatcttgagattccaaacttgctactagtatataaattcctccatggtcatcagctcgatcggtcactctcagcaagctcgatcagattcagagatggcatcgtctcgccccatctcggagagcaccatcacgaggtcgacgtgcgcgacgcggacggcgcgcgccacgcaccagttcgagatcgtcgggtacagcctcaagaggtgcctcgccgccggcgagttcgtccggtcctccgccttcgccgcctgcggctacaggtggtccgtccgcgtctaccccggcgggttcgggccggcgcaccgggagttcgtgtcggtgttcgtcaagatgatgaccaacaggggcaaggcggcggcgcggttcgacctccggctgatcgaccgcgccaccgggctgccccgctcggtgttccgggcggcgcagccagtggtgttcgactactccgtcaagcacaagaagtgcaagggcaagcggggcacccgcgcgttcatgcggcggcgcgacctcgagtcgtcggcgttcgtccgcgacgaccgcctcatcgtcgagtgcgtcatcgacgtcgtcgtcgccaacggcggcgacgacgacacggcggccgcggcgtcccccctcgccggcgtgccggcgccggacctgtcgaggcacctcggcgagctgctggagcgggcggacggcgtgggcgcggacgtcacgttcgacgtcagggggcaacccttcgccgcccaccggatcgtgctcgccatgcgctcgccggtgttcatggcatcgctgtacgggtcgatgagggagcaccgcgcgccgcggatcgccgtcgacgacatggagccggaggtgttcgacgcgctcctccgcttcgtctacagcgacacgctggcgctccccggcgacctcggggaaggcgagtacaaggagatggtgcggcagctgctggaggcggccgaccggtacgccatggacaggctcagggtgatctgcgagctcatcctctccaggagcctcgacgccaagaccgtcgcggcgacgctcgccatggctgaccagcacagcactactgcgacgcgctcaaggatgtttgtgttcagttcatggccgttgggttggatgaccacaattaatgattgatatttgaatatgatactagttgagtgcccgtgccttgctacggggcaaaaagtatgcatccattttaagttacattgaataaaataatgttaagtaatcattaagtgtaaattataacaaaaccttaatatagccccacattcaaagagaccactcaatctccacacgcttaacctacaaaattcatgtttatgtaacgttgcaaaattgataagaaatgtatacattaccaaattggatcatctagccataaatgacaaaaacaatgtatacctttcatattgcccttccattatatcgatcacaataccttttaagaactatcaaccatctgaaaccaatgaaaatttaaagctcctcgcaacactaagaacctctatccaaaatagtgctacaaggggatagaacggcatataaccttataggtttcccttattggaaggaagtgtattttttgcaactcaaggtgatggttatttgcaagtgcttcaaattactgcgcctaagttgatctagatcggctatggcactcgagcttgtcaatgaagaaacctttaggctgagttcgtttcaaagggttcccaacccctgtccctcctccgcgcgcacgctttttaaactgctcaacggtgtgttttttttaaaaaagcttttatacgaaagttgtttaaaaaatcatattgatccatttgtttaaaaaaatagctaatacttaattaatcatgtgctaatggaccactccgtttttcgtgcacaggagatttgttcccaacccaccccaacgaacacagccttagaatggtatcgaccaactatgggcttctcaatgatttgtataactgctagacaactcactcataccagggtctttattctagatgctcagcaagaaattattagaacaaagcttaatattacagtccaaaaaggtacttacctgtgtaccataatgatatgaaaatccttgcgctgcaaacataatacagaggaacattgttaaaatctacaataatgcatccattgttaagatatacaaacacaggatgtatcggtgttaaaactaagggactcaaataattgtttaccagataacatatttgtttgaatcatgtacagatgacatcgccagttctcaacaaattaaagtaaagattctagccctagcacttggggaaagcatacacagaacagatcactcctaattaagtctcaactttaaggaagccaatgtttatgtaaatacataatgtattaaagacattttccctgggttacatctagcattctggcaaaagggctataatattcagttgaatgactaataaaaacaaatattttcagtgctgtaagcagaaatcctttggtagtaatatagatatgctggcacgatatcttacttttcaaaaaagtgacaaaagattcaatgtttatgtaaatacataatgtattaaagacattttccctgggttacatctagcattctggcaaaagggctaaaacattcagttggatgactaataaaaacaaacattttcagtgctgtaagcagaaatcctttggtagtaatatagatatgctggcacgatatcttacttctcaaaaaagtgacaaaagatttaatccgagataaggatatactgatatacagagctctaaaacaatcaaagagaaaaaaaaggagatcactcagctaacacctcatttttgccttcaaagaggtggagaaatcaagcaataaaacactgcaggaaaacaagccactacactcttactaccttttttgttcatgtgaagaagggattaggccattagggaaagtcagaaagagataaattggtggcaaataaacttactcagattttaacatgaaaataaaccaaagaaacaattttgccaaaccatatgctattagcaaaattgctctaacatatcagcattacacacgtacgtctcagatgtttaggtaaatatccaaacttatcccctataacatgcagtgatacaggcaaacatgcaggagcaaaatatttccaagccattgacttacagaaaatcagccaaccggtttgcaagcaaatctctgctgctctactgtcactccaatgcatcagttatcaattcaatctgaaatacgtgcagcatgagcataacttgatgaacaatatataggatagataatctgcagcctatcagttgctttccattgtttatttcatatgtagcagatgtagaaaaaggaggtaggggtgacaacagcgcaagaaaattttggagcagtagaacaccatcgaacacaacagcaatgactaataagatggactcacattcatggtgctgactctcttcctgctctatcctctggaactgcctaatttacctgaacaaaagaagaggaattaacaaagagaagtctattaagcataaaagataccgaactgtggtggaggggatggcgaggaacgacacaccggccagcagcccattttcaggcagaggattcagatcgagcgtcagcggtcggacttggagatggatgatttgcctgaatgccaggacacattgcagcctttcaatctagccgcgtgcgcaaaccctagggtcctctccagccgccgcagtggtgcatggacctccgcgtgccagtgtgccacggtgctctagcgaccatactaaaatggtaaaacctcaccgctgcccactcaaggccgcctcctccatcgttaccgaccagatgaatggagcaacggtggcgacggtcagggagatgcggcatggatgccacgagcggtgggttgtggcgtcggcgacgaactccactcgtgagcgtagggcacagcaaaaatggcgacgatgccctgttgcggtggcggcggcggtcgagggcggcgaggagggagcacggggcggcgatgaggcggcgcggtcaagggacgcgtgggagggggcgcgggtcgcgggggcatcgaccctttttacgcttttttccttccggatcgcatgtacccttttttttatttttgtcgctccaaaacgtgtggatgtacgtttctatgttggatcgtgtgtctattttagcttcaccatcatcaatccgaatttttttagtagtagatatttgaatttacttttctactataaagattttgttgctataaatatgatctatgagaaaataatagtttagaagatggtatcaaattaaactgtggccttctatactgtgaaacagcgtaactactcaggaattagagtttgaccgggtcttataatgtctgacaaaggtcctacttagtactccgtatatgaataaaactctagtatatgtttgtcataccgaataaaagtaattagtttctatctatatctctaaacttacttaaaatctaagtcacatatatgctcttatatataccggcctctaagattcaatacaacaagtcaataagtccaatattttcggtataactctctcgatctccctatattattcaacactctttatagtactcacggcgctgctaaaatcaaattgtgataggttgatctagggtttccttaataattaattaattaatctctcccacacctgcatcgcaacgcgtgaatcgatcgatctcacagcagcaagtgatctgattagcaatgcccatggagacgacgacgacgacggcgacggagtcgatgagcaagatggagacagtaagaggaacgcaccggtttacatttcacggctacagcttgtgcaagggcggcggcgccggccggtgcattcgctccggcaccttcaccgtcggcggctacgactggtgcatctgcttctacccggagggccagggcggcggcggcggcgaccgggaacacgtctcggtcaagctcaggctggtcacccgctgcgccacggccaccgcgttctacgagctccgcctgctcgaccaggacaccggccgcgccgccgccgtcgcccgggcctccggcgcgcccagggtgttcgcgtcgagcaatcccggcacagcgtgcttcggccgccgcgcgttcatggagcggagcaagctggaggcgtcgcccgcgtgcctgcgcggcgacagcgtcgtcatcgactgcgccgtccgagtcgtcgtccacgaccccgtcgtcgccgccgtgcggcgccgcgaggcgccggacgacgtcccgccgtcgaacatactccggcagctggtggcgcaggtggagtccgagggcgccgacgtgacgttcgccgtgcagggggagacgttcacggcgcaccgcctgatgctcgccgcgcggtcgccggtgttcaaggcggagctctacggcgccatgaaggagaaggacgccgaccacgtcatcgccatcgtcgacgtgcagccggccgtgttcaaggccctcctccatttcatctacaccgacgacatgccacccgacctcggcctcgccgccgctgacgacgacgacaccgacagaatcgacatggcacgccacctgctcgtcgccgccgaccgatacgccgtcgagaggctgcgggtgatctgcgagcgcgtgctccggcgaagcctcggagtcgagacggtgatcgacacgatggcattggccgaacagcatagctgcggcgagctcaaggaagcttgcctcgagttcatcgattctcatagcaagcgaatcgtggagagtgatggttacaagaacctcaagagggcgtgccctttgctcgtcgcagacatgtgggagaggatcgtcctatcacgtctagagtaaggctgtgtttagatctaggggtgaaaagttttgggtgtcacatcggatatacagacacacatttaaagtattaaacgtaaactaataacaaaacaaattacagatttcgcctataaactgcgatacgaatttattaaatctaattaatccatcattagcaaatgtttactgtagcaccacattgttagatcatggagcaattaatctcaagagggcgtgtccgttggtcgtcgcagacatgtgggaaaggatcgtccgatcacgtcgagagtaaatattaaaacattgctcatgcaatgttgagggtgatatagccatgaacattaattagcgagatttggttcggtccaacaaaaagtatctttaaggtaccggtacctcacggtaccaaatcgtttttgatctttggatctaacaatgcacatcttgcctagctagatctaatgatcggaaacgatttagtaccgtgactccgtgaggtaacagtacctcgagaaactttttgttggactgaagcaaatctcttaattagcgatgggtttatcaagctcttttgatttaattcattttttttctaaaatggattaatttgttcaactgagttagagtaaagtatatatgatggcaaatctgctgcaaattttaagttggtatttgttgtttacttcgtagttcatacggcacactagagtgtgtcgggatggaatcggaactacttgacaaggtgtgacaagctcgataacaataactctcgaatgttctcatcttggtaatgtggcgatgatgacttctatagagttgggaatgatgacttgtgttgactcacatcgcatgcttttttaattttcgcctttctacagagtttatcggttttccctatggttttaatttggtcagctttcctcgttaactgatcgccctttttttctctttagtgggtttttagttctttgggtgtaaaatttttgaagtatatggacgcacatttaaagtattaaacgtagactaataacaaaacaaattacagattccgcctgtaaactgcgaaacgaatttattaagcctaattaatccatcattagctaatatttactatagcatcacactgtcaaatcatggcgtaattaggctcaaaagattcgtctcgcaatttacatgcaaactgtgcaattggttgttttgtttcccacatttaatgctccatacatatatccaaacatttgatatgatgtttttggctaaaattttttgtgatctaaacaaggccttaatacaaaacagaaactctctaagctcctaagtttaacaaatcctcatatggaaccattgttaggatgaaaataagttaaatacacaatgtacttcgattataattgggataaatatacggggacacatttattgaaattccatcagccaaattcaacccaaatcagactaaatgaatcatatccgtgctgaggagaaactattactctcaaggggacatccactcgtttgcatgtcatccaaatagttatgaaaaaaaataataaaatttaacaagatagattaatatgtgataaatctgatcaaatttaacttccacgagttgcaaaaaaatcatacattaactagccaaaaatcattgtttgctagacactccctatacattaactagccgagactaattgggcccaaaacttccgtactcagttcggcccagcccagtaaccaatgcctccaaagtccgatccggcctccctcatcgtgatttgtgacgtgcagggtaccaagacactattccaaattccgttccgacacgtacttaccgtgcgcgaccaatacatacacacatctccgccacacgtgcacccgcacagatcgccgccgccgcaaacctcgccgccggcagcgtcgtagctacgcatcacgtaattaatgatgatgatgtcctccgcggcgccggctggccatcacgccggagaagagccgccgccgccgtcgacgacgaggagcaccatgtcgacgtgcacgatggggacggtggagggccaccaccggttcgcgatccgcgggtacagccgcctgagggcgctcctcgccgccggcgagtacgtccggtcggccgccttcaccgtcggcggctacgactgggccgtcgtcttctacccgcgcggcgccacgcacgccgaccgcgaccacgccgccgtctacgtccagctcctgaccgaccgcgccgccgccgccgccaccttcgacctccgcttcgtccgcgccgactccggccggccgctgtccgtgcacccgccgctcgccgcgccgaggacgttcagcaccgtactccgctcctcctccgccgccatgtacggcgtcaaggtggaggcgatacaggcgctccaggccaactacgtccgccgcgaccgcctcaccatcgactgcgccgtgcgcgtcgtcgggaagccgcgggtgtccgccgccgcgccgctgacggcggccgacgtcccgccgccggacctcgcggcgcacctcggccggctcctcgacctcaagtcccacgccgacgtcacgttcgacgtgcggggagtgcagttcgccgcgcaccgggtggtgctcgccatgcgctccgccgtcttcgccgccgagctgttcggcccgatgcgcaacaacgccggcggcgccatcaaggtcggcgacatgcagcccgccgtgttcaaggtccttctcggcttcatctacaccgacacgctcgccgccatggacgacctcgacgccgacgaggacgacaggcgagagctcgcccgccacctgctcgtcgccgccgaccggtacgacatgggcaggctgaagctcatctgcgcggacatgctcgcgaggagcctgacggcgcagacggtggcgagcacattggcattggccgaccgccatggctgccgcgggctcagggaagcctgcgtcgagttcgtcatcgccatgggtatgaacgatgaggtggtgataagccggcatcctgaccagctcagctgtatctcgctcttcaaatacttcttctaccagatcggcagcttactcaaaatccactaaactgtgtttaattagtgaaagattcagagtgattgtgttatttcaacttctactactgtcgatagactcttaatcttttcttaattagtttgtccactaaactgtgttactagttagactcaagagtgtttgattgttccaacttctgatagagtcaatagacgcttaatcttcttaattactacagtttgtggctaatcttcttaattagtagtttgtggttgtttactgaccaggtagcttttttgcagttttgttgatgttctgatatacctttatcaaaatcctctaaaaactactcctcacgagtagtttgtctccccagtagcttgttgagtatattaattagtcagtgagcttgatttttctaacttctgatgctgccaatggacatttatatattctgaattagtttgtggttttttactaaccagtttagttcatgttctgatatgcctgagtttgtaaataatttatcctacaagaaaaggacgatttttcatacaagagtttctatgtggttttaccagtgaaacaaattaacagcgtgcttattatttttacttctggtactatcaatgaacgcttaatcttcgtaatcagtttttgtttgtttactcaccacttaattattcatagtttgtgaaggtttactgacttgtaggtactcctagctcagttgtagtttagttgatgttcagatacgagtgagtttgtagatattttttcctgcaggaaaagaaataaagctaatgcagttcaggtccaactattcactctgtaattttactagtgaaacagaacaagatttgctctgaaaattctggatgaacaacaggcacttgtcccctctgataattctgaatgaaacaacagacaaacatgcactaaagttctgaatgaacatcataacaaacagactaaaatttctgaatgaacagcagaacaagcagattctgcacaacaagcagaacaaacagactcagaaattctggatgaacaacacaacaaacaagttgtgaacaaaacaacaatcagattctctgaatgaacaagagaaacaacacaacagcaggctctgcacaaaacaacaatcagattgtctgaatgaacaacagaacagacaagagtactctgaacaagagaacaattagacacaacccttcaagtctgatcaacaaaaaacaatcaggtaccactaccacatgatgaaatacagtatatcgcccctggtttgtgtaatcagtacaccaagtagtaactgattacttgattagccatctgcaacacaagaataaaactgcatacttgaaaacttcagcaacaagcataaaactgcatacttgattagccatctgaaacacaagcataaaacttcagcaacacaagcataaaactgcatacttgattagccatctgaaacacaagcataaaacttcataaaccatacaggaataccactctacaagtacagcaaaggacataatcaatttctcaggtcaaacaggtgattagtaatctgcaacccaagctgcataaaccatacaggaataccaccctgcaagtacagcagagtacaagaggcatcagatttgaatcaggagacagagacaaaatttcagatcagatctggccaagaaacattcacacaaagtactcatccaaatgctgatgaatattttcttctcggttcataatagatagattcatagatagatcagacagtgcaaatccatggcttgtctctcaaaccgacccaacgaaacaaaaagattaaaccactccaagactcccatcccattacatagaacgacgacgacgacgaaccgatagatccatagctttcctaacgagatctacgactactaataagatagaactgatcacccgctgctcggtgattcagtgagggagggggagcaaaacgcatcatgggagggagctggatctgacgccgcgagcagcgcctagtaggtcttgctggggcactcgcgagcgatgtggccggtctcgccgcagttgtagcacccgccgccgccgccgccaccaccaccgccgcggtagccgccgccaccaccaccgtagccaccaccgccgcctcctccctgggagcagtccctggccatgtggccctcctcgccgcacttgtagcacgcgcggctgcctccgccgccgccgccgccgtacccgccgccgcctccgtagccgcggtcgcccccgccgtagccgccgccaccgccgccgtagccgcggtcaccgccgtagcggccgccgcctccgcccccgccgtagccgcggtccccgccgccgctgggacgggatccgccggtgagcgccccgccccccggcgcggtgacgtccacggccttggtgcggccgtcgttgccggatccgacggagaactcgacgacgtcgccgtcgttgaggctgcggtagccgtcggacttgagcgaggattggtggacgaagagatcctcgccgccgtcgtcgggggnnnnnnnnnnnnnnnnnnnnnnnnnnnnnnnnnncttcaccgtccccttcaccctctccgacgccatctcgacctcgccctcgccctctcgccgccgccgccgccgcaacccaaaaccctagaaaccctagatcggtgtgggagtggaagcgaatgggaggagaagccgccgccgggtgggctatttaacggcccaaaaaaaatctttgcattaaattactacctcgaaaaaaaatcttttcattaattgcctctttattttggaatatttaccgagatattccccgcggcatcggcccatcaaactcttcctctcccgactgacatctcggcccacttaggcggcccaacttcatagtttcggtccgacacgttcaagggaagggaacagagatggattttgtttcggacttgatttgtaaatttgcacgaaatttatacaaaattagcggtggattcggattagtgcgcgtaacaagagttcacacgatggcgacggagtgcacgacgtcgacgagcacgacggcgacggtggaggggcggcacaggttccgcgtcgccgggtacggcgccaccaagggcgccgcgcccggccaccgcgtggcgtcggggaccttcaccgtcggcgggttcgactgggccgtcgtgttctacccggagggcgtcacggccgccgacatggacttcgtctcggtctacctcgagctcaagaacgccgccgccgccgctggcggcggcggaggcggcgcggtggcgcgcgcgttctacgacctcaggctgatccacccggccaccggcgagccgcggtccgtgcgctggcccatggacggctcgacgtcgcgcgtgttctcccaggcgttcccggcgtgggggcacctgaggttcatgcggcggcgcgagctggaggagatggggttcgtccgcgacgaccgcctcaccatcgagtgcgtcgtcaacgtcgtcctggaccccgtcgtcaccgccggcgacgcgccggagctcgaccatccgccgtcgaacatcctcggccacctcgccgggctcctcggcgacaagggcaccgccgacgtgacgctcgtcgtgcggggcgaggagttcgccgcgcaccgggcggtgctcgccatgcgttcgccggtgttcaaggcggcgctctacgggccaatgaaggagtccacggacgcgaacgccggccgcgtcgccatcgacagcgtcgagccggcggtgttccgggctctcctccacttcatctacaccgacacgaccgccgccatggacgacctcgacgacgacgacgacgacaaggcgcagatgatcatgcaccttctcgaggccgccgaccggtacgacgtcgagaggctgaagctgatctgcgagctcatgctctgcaagagcatcgccgtggacaccgtcgcggcgacgctggcaatggcggatcagcaccattgccagaagctcaaggaggcgtgcatcgagttcttggccacctccaagaagatggaaggcgtcatggaaagccaagggtacgagaagatgaagctatcttgcccttctttcatggtggatttgtgggagataataggcaggaagatgacctcttattctgttattcccaatatctatgcaagagacaaggactaattttcttgaatttccttgcaaattcgcatcaaaatgccagcatgtaaccataaaccattgactgattctagtttggagataatgatcacagtcttgctacttcccgcgatcctcaacatcttggcaaaaatctgaaatgtttgaagttaaggataagatttgatcaaaaatttaaaatttcgaccatcaagtttatcagtttatcaaatttaataagtttatgatataatgatattgctttttgatgcaaatatatgtataccattttttttgtttttaagctaattaaccatttaaaaaatattgattagaattataaagttttatccgattcatgacataaacaacaagtatttataaccgaaggaagtattcagtattgacaactaggctagctgagcaacttgaagatacatagccgttcatatgatttgtgttccggagttggtcagccgcaatgttgtaactcatctgctcacatctcgtacgacatttcaagatatggaggcttcttcttgttttggttgacacatttctgttctacgctctgtaaacaacaggatgtacactgcatgcacaccagacgaatgtatatatacgtgagtggccgtgaacagacacgtatatctcatcaaaattttgattgatcactgccataaatccacaaccgatgtttgagtgaattcgacttgcaatctttctgtctgtcttttgtttctttcttgttttgttttgagtttatgtgtaatcattatctaaaaaaacaatctgtttatatttctgtttgtgtttcatgaaacggattagtaatgttctcagggcccaggtctaacccgaatccaggccttcgagagggcctatctaaaacactatattatcgtatgatccaatttcatggcgtacgtgctcgtgctggtcttcttcgtctccccaagttctcatctgctattgcgcaatgggcgcctgcgcctcagcttcgcggccgccgccgtcgccgcgccacggctgctctccgccgacgccgacgatgacatggacggcgtcgacgtgcacgacgccgatagcgcagggcgcgcacgcgttcaccgtctaccagcacggcctcgtcaagaggaccaccgccgccggcgagttcgtccggtcgggaaccttcgccgtcggcggctacgactgggccgtcaggtactaccccaacggcgacagcgccgccgaggcggcgtgccgccagccgtcggtggtcctcgagctcatgaccgccgacgccgcggcgtccgtggtctacgagctcaaggccgtcgaccaggtcaccggcgagcgcctcgtcctccgcgaggacaagacggcggcgttcgacaccaggaacggccagttcagctgctccggcgtgcagttcgtcgagacgccggcgttcctcgccggcgacttcctctcgatcgagtgtatagtcacgatcttcggcgagccacgcgtctcaaagacgaacaagatgccacagccgccgccgccgccgccgccgccgccggcggagacaagcgatgtctcatagacaataaagaaaaacaactatactactgtattgctctcatgtcatggtttaatacaaactggtcaaactactgtgttgctctcatggtttttgtctctgatgaaaacaattacaattgcttacattaaacgaacagtaggttaagcagaaaagaagctgtggttcaaccatgttcttctagtgtagacaagcattgggtctgaacagattaattccaggtttatagctgcattacctctgtcgaagacgaaaattcgccgttgatcttacacatcatggcatcatcaatctccaccctagtccagagctttggaaaagaataaggaatcgtaacagatgcaacagattcttggttgctcaattcattcttctttccaaacagctgcgccgcaataccagagcagatcttcagatcaacctcactctgtgctcttatcatcttagcaaggagctcagtcatctttgcacctctctccatttgctgcttgatggataacttgacaggctttggatggtcatctggattttggtcaggagggttgtcatcctcgtaggtgcttttgctttctagcaattcctttatcttctggtccaaaatagtagcaatcctgtcccggaagccatctgcatttgcagagtccgatttcagcctcacctttgcctcggaaaccaatgtttccatcctctcttctgaagaagttgcttcaggttcaggttcatcagcagcatcttctgtaagaccgaacgtttcctccagtaacccaacattctgtgtatacctttcatacgcttcattttcagcatcgatgtctccttggatatgttcttttagcttctcaaacctccacttgtttatgcccataacatcctgtaatataaatgcttaactccttaatcatggtctcatcatggaagaaaagaaacgaaactaaacaatgaacaatcgcaaacaatggaacagctagaacctttttggcaagggacttctttgttcggagggaattcaggaaatgatggggaagcctttgcagagaagccaaccttgatgaactgcagcagcaaatttcaagcaagcatcagaaataatgacagattttaccataagataaaactcctggttcagaaggttacccggttgaaggtatattagctgatggttgctctgacagaggagctgttgacagaggtggcttatctggcaatgtgttgttctgtttcagaactgtcatgattggtgataagaggtggttagtggctttttcaaaaatattagaaaaatacagagtccagacaaatcacagaaaatatgtagacaggcataacatcatagccataaatcaaaatttcttgtatgtaaccaaatgttgctaatcccttatacaccagagagaataaattttgacagcaacattcagtgccatataatgaagagtatagagagagatgaatataattcgaaagcagatttaagaggtacaatacaacaaataagagcccttcaaggtacacccatgaggccattatccctccaaaacacatttctgaaggtccatttgattttagagaccaaggcaataataatgctatggcaagggtcaatttaattttagaaaccaaggttgtcatgggctcatggcactcaagtgagtcattaccacagtcactagatcatgatacaatactgtcgttcctgaacctgtcccagtttgctggtcacagttgatgcaggtcacctccaggccgtgtttggttattagaggcatccaaatcaggtacagaaacctacctgattttgattggggcaacagtggccaggttcctcgccattcaggtggtgctggcatgtgtgaaggtgtgtggtggcacactgcaggggataatccagcagtagaagatggggaccaagttgctacaccctgtgatctcgtggccctcaaggttctctgtcgccgatgcaagacaagtcagcagaagaggggaggaggtttggagaagactagggcatttgcttataaaagatggtggcaagggtgtctgctgaaagcctgaaactgcatcgatggcgaggatatgagattatgttagaactgaggagatagagcaacagaattgtgtggctggatgggtcacatgtctgatgtctctacaacccaaatatttatttgtctcatttcgtgttcccttccttgtagtgtaaaactgattatcttccttgggtgtttgtgtatgacataccataaagtagtagtaatttattttataccatataatttattttgacagaccaagtagcttgttcatcgacctagattcattggttcaggttcagggtcacatcccacatcctaaactacagtcctgaagaaaactgccgctgtttgatccaacctgacaaacatactgaaattcttctctacaccctttccctcatttccttccctaaaccctacaaaatatgaagatcaaacattctgttgaccaacatcatcccactatttgagcagcctgatggagaagcattaattggttgttaatgttgttcaattgcacgcgacaacattgtcagtactgagaaaaataaaaatccaaaatggaacaaaacgttataataatgcatttctatacctgtagtttcccttttagatgttgaaatgagcatgttcaaatcttatcattataagtttgatcaacggtccataagaaagtgaccgtaccttaaaattcctccataattgaagtatcccactaccccacttacaagcaattgtcctagctttgatgctaagtagctaaacgtgataagcattcccagaataaattgtaaacaataaaacaggtaaatctccaactgccaaacaatgagtaatagtccacagaaaggtaaaactgcaagaccaaatcacgcctgtcaaaaaaattggttggatcaaatgatcgaataagtggatgtacaggtattcagtcagcggcttaatacaactaattacaagcacaattcgttgcacaggagcagatatatactcaaatggtactagcattacacatacataccatgaatgtggcaaggattctgagccttgtagcagcagctcttacaacactggaacgggcacctgaaaggccaagcattacattacacagaatgaattaaaaaaaatatccaggagcgacatgccgatacagcgcatcgatttctcttagaaaaccatcactacaaatccccaaaacaaaaaaaaaaaaatcttaccgcgagcgcgcaacgttgccgcactggatgcacttgggcttgttgaggccgcgcaggttgggcttgggcatgtcgaaggcggacgccgggggcagcttctgcggcgtcgtcccattgccgttggcgaccgcgaccgcgggtgccgacgagtcgctggccgccttcccgctggatgccggcgacgacgcggccatagcgaacccgccgtgaaccaccccgcaactccgcacaggaccagcggttgggattccggggaaccggaggcctcgacggcggcggtgctccggcgagctagggtttcttcttttttttttcttttgtgtctctcctgcttttcttttcttgagtcgagtcgaatccaatccaatcgtgcggtggcttcccgagacgaacggtttgatgtgggctgacaaggtgggcccggtggtgtaattgggctgggcccaattgaccaagtctattctaccaaggcgatgacgccggcgagttcgtccgtatcgacgccttctcacttcgcagccgccgccgccgccggcgccaccgaattcaaccccaacggcgacggcggaagaagaggattttcgccggcgacggaggtgacggaagtgtgccctttttttaagtaaatttttcatctacacaaaccgttggccccattatttcgcttatcttgtgcttattgtccagcttactagtagcaaacaaaaaataatttgtacgtaaaatttttatatgtgtgtgtctttactgatataaaggccaatgttgtaaaataaatcacgatgaaaaaatccacaaaatcaacttcataattaagtcttaaaattaacttgacttatggtataaacataagtgaaacaatggagacacattttttaaaaaataatggttaatgatttcatacagaaacagttccaaagtatctctgaaatctaagttcaaatgcttcgattataaagtggcttggctcatttttgagtcatcaacaagcatacagaaaagttccatgcattttttttcttttttcctcttttttcagtcatggtagctacaaaaatcataggcaaacaccagctggtgttcttcagcctagcacacactgaaacacatagatacagtcatacacacactaatcatcaatcacacaatcacataaaccaaaacaaagctctctgctatgcttactgagagagtaagctagaattatccccttctccacatttttttaacttcctactgggtgctgtttctgacatgcacaagattcctcagctcttcaaatgcatccatggtctctggatcgaatcccccagcaaactgcaaaaatgagcggcaatttagaatatgcagctgacattaaggtttaaataacacatcttaatatgtcataacaagagttaacagcagaaaatagcacaaacgtaatgcagaaataaccataatgtttctgaaggacataaaacatatacaagcacctgtggaaaataaatatgtgcaattatatacggaatgggaatcaggaggcagatgaaacaattatgagatgtggtataacataattgcccaagtatacatctaatcagaatggagtatgcagtatgcacaggggaattttctttttgtggagttcctgctagaaatgtgttacctgatgcattctgaaggcaaatctcacagcctgaagtagcatatactccaaagctggatctttgttcagaggtcccatgtattgaagttccatagcaactcttttcatgtacatctttgctaatttgacagaagaaaattttatctgcagttatcaaggaaatagaaagacaacgattactccagttaatagaaaggcaatgattaatccaacaggatgtaaacgatggtctaggtgatcgttgcaaactgcttctgttttacaacctttttgtggtatcaacataatctgcaaaatgttcacaagcaaacaacagtggtacctatgcaaagcgtaccacattcctaagtttcagtagatgaaaataaccttagatactatataacaagcacctcaagttaaccaataggtacttgaaaacttatcctggtagtctccatgctatctattctgaatactggtaaccaacaaattttactttttgcaggccaagcatcataattctgactaggtcatttcctgtatcatatgctgacaacaatgtagcactaagaaatcaaaccttcaaatacggaaaattatagaacatataccttgccaataagattgttgtcgagcatccagtcagtaggaatattaaactctttacactgtctcatcgtagcatcccttgtcctcagaagattgtagacactccgctcagtcctgaattaagaatgcaaatgaaaatatcagtattcccatttaagtttaccactatttctgttaaatgtatgtaatctgtatacttatagtaaatttagtcgtacttttctgatattgtaaccattttcttcagtgcaatgtcacatggaaggcgaggatcatctttatagtttgaaacttcagattccaattttttcaggtcttggtagccaaaagctgcctctcgtagagtatctgccttcctttctggccaatcaaaatgcttcagcactgctctctcatccaccttcaagtaatgcaattacatgagtgaaaaaacaaagtaaattgctcagagtatagtgctactgaacattcataccaggaaaccaagctcatcatcaagccatttcacaaatgcaaccacatcttctatatctttgtaagctgcattggtcacctccttgatcaatgatttcacaaattcaccttgagtctcaacatcagccttgatctgaaaatgaacaaagagtaaagtaaatagccatacatcagtgcgagaaccagctagcttttcattggtatctacaattctacatatgtccaataatctgagcagaatattctacttacagcctgcaaatgcgaagaacggttctcaatttcaccaatcatgctactccgcacatttgctgagttagcagtttcacagattccactcccagaagtatccttttttgagtcccttctcataagtgaatggtaaagctctgcaacttgtggtgccctcttcatgaccccagcgtttcttgtggagaactttggaggcggtggcggtggcggaggctttggtggattcgcagctgatccatttgatggaccagaatgtggcacagaaactgaaggtctaggaggagggtttggaatacgcaaggcacgcttttcaacatccatactttgagacttgcatacttctgacttgccaagaagaaatcttgagctttcagatcgaccaaaatcatacttatccacaagaagttcacgcttctccctgattgtctcatccttattacaggagattgcctcatctgttgcttcaggcaggcagataaaggtatcagattggcgcctcttcacaatgctaaactcctgagcacatccttttggtccacctagtgagtgcctgcgtgtcgggcttctgcattctgcagcttcaatccatgctctgtcaagaagggcctcctttttagatgcttcacaattcttatcattctgagaccattgtttgatacgctcagcaatgctgaacttcttgtgatcagaactgttctgatcaagtcttgcatcaccatcacaatcatcaacatgacaagcaatttcatcattataatctgcatctgtcattgctctagctgcttgatctgagttactgagctcatgacgtagacaagaattgatccaccgaagataggcaagctcctcaacttcagttagccgactcatttgcagaccctcaacctgcttgctcaagtttgcatttgtgtgccgcaataatgaagcctcagcttgaacctttgcaactatctcactctggtgacaataagcatggtatagaaaaggttagctggaaacaaactacgactcaacccacctgaaaaataatttagtttaagtaatgttacctcggcattcttttcaatgacagccaatttggactctgctgaagagagtttaattgcgaggtttcgtttctgaaattgaagctctttgtttaaacgtcgcagttcaacaacttcaatctccaagttttctgaagaagatgcattgcccccattcatactagaaacccgattgccatgcccatccaaccttgcattttcttcatgctgctctaccatacaagatagagctgatagctgttcagaaaggcttgttttctcaacttctagtgaagttttaagtcgcacaagcctgtcaatttcattcttccttgaatcaagatccttttcaagttccgaaactctaggattttctctgcattgccgcaactctgactgtaatgctagttccctttcctttgactcacgtagttgttccctgagatgatccaactcaagaaaaagatcatgagatgctggggacctgatgccatggcaatcaaagacatgggggtgaacctgagcaccagcaggtgaacaagggaaatctcccataagagatctcttaaccctagaatgatatggaatctgttggttgctggtgttaacattttccacacttgcaagaggtggcttcttgcttgcagcagctgctgtcttcttggtctttttgtcagctgtgaaccctttgacaatttgggaaccccaagaggatccaaattttggcttgagcacatttatattgcttttggagtcaacccttgatctgcatggctttgtttggttgtcaaacataatatcttctttcatcttgtagcgattttgcctgacccagaacactaaccatgcagaggtgactcgacttgattaaaatgttccagtacctgtactaacacctgcaaataagtgagaaaaacatgaattgagctagcaaccaaacatcaataacacagatgaaaacaagaataaagaaaaaaaatgaagaaccagatatgaatgccttttaaaatggatgccttcaaaaattgtccataaataaggaaataaagcatcaattcaggagtactagactaaatgaattctttattgcaatgctacccagaaccatatcaaaccacatctttaactacttccatggagtccatttgtgtactactctgaagagagcaacatttaagcagcattacaactgcctttatctctctctttagaagcatttgtatgaagcaaataaataacatcaaggtctgagcaaatcaagcttaatacttttttgagattatcgtttccaaaggctaaaaagaagcactgcctttcaatttttttgtggccgtacagtacacatttgtagcatcgaccatcaatgcatcgtcgacgaagatgaaatctcccgaaacctaatcaccaaaaagcagaaaactgctaactgcaaacaagcatcctcttgaactaactaaaacacgaaggagaaggagcaaaatgccccaagatccaactccctagaaccaaaatcgaatgagaacagcaaatgggaccaaccgattttggcgaagatgataaacacaatgccaatcaaaacccaaaagcttccacaaaaatcaagcatttgaacacagcgagtagactgaacccacattgggctcatcatcaagaaggacacaacaagtaaagcgcgactcttacctcccaccacccaccatcgatttgtacagatcgaggtgaaagcaaactcccccgtccacaaaagaacccagccgttctgcacaccgagcgagctcaagacgatcgccaatcctgaaatcccccactaatcaaagccttctccctccttttgacctcctcctgaccgcaagtccgcaacctatcatcccccgctccagcaagaacccccccaaatcagctcgatttcaacttaagaagacgaaaaagaaaaaaaaatcaaaaaccccgcagtgccgtgccactcccgacgacactaccaccactactcctactagtagtagagccaacatcagccagtggcagtaaacaaagaagaataggaggatgaagacaagtgcggtggagcttcggatgctttcaccttcggcctcgctcgccttcgatcgccgcgccccgcgcccacgcgcggatttttctacgagctcgtcgcggcgagttcgaggattcggttgctctctctctctcctctcctctctcttgcgctctgcttcttctcgggagaggagaagagtggagtggagagtggaggggggtgggtgtgtggtttgaattttgaaatggggataggggttttggacgagacgagtagccgtagcgcctagggggggacaagacattggcagagcaggtactgacaggtgggtcccactgagcagtttctcgcctttttctttttctctctccctggtttcttgtcgcttttgtgagaccgagcgtactgggccgccagcaggctactgggccgggtacttctctctaaaagtctgagtgttaggtgtgggctgtcttgttatgctggaaataaaaaatggaataagttcaattgaggtccctagatttgttgactgagtctgaaatttatccctaaactgaaatactagatataatggataccccaatttgcaaaactagatcactcgaggttctaggcagtttatgcccggttttggttgatgtggcaagctgggtcaacgtgggacccacgtgggcccccgtatgtcagtagctagcactttcttccttctcttctcctctcttcccaatcccctctagggcgacgaccaacgggaaggacggcgcgatgggtgagattttgttggcgctgtctcctctccccatcccctgatgctgaggagacgtcaccaacagagcgactgagggggtgattgatggtgacgagcagtttacacagctctcggatcaaccgcgagtagtgctctctgttgtcgttgttgtcgtcgctgctggccccaccatggcaatggaaactcgagcaacgaagtgaatcaaaggtcggaggtggaagatggtggtcgtcgacgtagaagatgatggtggccgttgacgtagaagatgacggtgccgtccacgtagaagatgacggtggcaggggtccaggtgatggcataggagtgggcggcgactatggggtcatcgaaggagaggaggtagcgctcctcattggcacgggtggtgctatcgttgcctccatcttcgccccttccccagccaacgatggggcatggaggaaatagatgggagatggggaatagatggagagagaggggaggctagaggtggagagaggccttacatgtgagccccactcgccacgtcagctaaaaccgtgtgtatactgcttgagacctctggcataccacttttccaagttgaggaacttgttatatttggtattatggtttgatgacgaaattcaaactcggccacaagttgagtgaacttattccataaaaatttaggaccatctgagtatatatcattggacggatttttttcccacgaaaatcagatgaatgtaactacagtacaattatgctcgtaactagcatgtaaagtgtcatatagatacacaaaaatgctcgtagcttagtgggataggcgtgtgttggggattgcgggatcgagtcctttgccttgtgattttaaatttgtgtgattttaactaatttcaactagtaaatttgatgacaggtgtatatattatgccttgaagaggactcgaacctccacactctttagcaggccgaatcgggccaccacttgggatgggaatggctctttcggataatgcaaatcgaagctattttgatgtgtgagcctatatgacatagaaaaaggttaaaaaaaaacgtttgattctcttttccctattcaattacacggaagacataactgtaagtgtatctcataacattagcttataagctgtagataaattcatattttggagcctaattttaagctgggttgagccaattaagagcatctattaaagcatggctaaattatgttcccaaaatgcccatacgtctagctagccaaaagattatattttttaaatttttatatttgaaacggactctccaattccaactctacatatggtacagcaaagagcaatacttcttccgtttcacaatgtaagtcattctattatttcccatattcatattgatattaatgaatctaaatagatatatatatctagattcattaacatcaatataaatatgagaaatgctagaatgacttacattgtaaaacggagggagtacatccttgatcgagaggcgaacttggaaaaaccaaacacaaaatccaaaaatcatgggtcagatttggggggcttttaactatttgcccctcttacgagtggtgcttaacgatttaccactagacctacatgtcatagacacatgagggcccatatgttatagacacggtgtggcaaatcgttaattgccatgtcacaagagtggcaaatagttaaatttccccagatttggcgtattcaattttctattctacaatgttttggagtgacaaacgatcacccaaaaaatcacaatcacaaatctctgaagagcaatcactgaaacaaccatagatgtgtgtatttgtgtttgtggttgaggagtggagcttcaggaggccaacaattgcgtcgccttcaggcttcttctccatgccacacatgacacacccatgccctcgttgcaatccagcgtcgctgcgccaggagacgaggcgaccacctgtgaagagacgcacttcagaaacgggaacatgttcaggaaacggatcaggtattcaggcctagacattcagcacatttttttatatatactccaacaggtttagaacagtttcaattcacaaaagcaaggagcagcaacaacaggagcatcaagtcatgtactccctctgttccataataggttcatttttagctcttatttgtcccaaaaatagtttattttattaagtaattattgcatcagaatttataaaagtagaagtatagtataaatgtattggaagtagataaagagaagaatcattgtattatgatttgataaagtggggatattatagtattttaggttttgtattgatatgtgttggatgagtgaaaaatgaacttattttaggacagagtgagtacttcttaatagatccactcttggatgaagattgatctgattatattagagtggagaggtaaaatgagccaaaataatttaggggcttaaagtgatccaataaaattgttcaggagagtaaaatattttgtattaataaaagcttttctgtgtaaaaacgtaagcatggattaaaaacattagaaatggccaaaataacatgttaaatgatctagatctatgaaaaagatattaaattggactaaatctctctgtccaaactccaaactaaacctagaaattgacatacatctaatactacccttaaggcatccataatgttcggcataagatagaccttaaactctaaaagcaactagggactatttagatcccaccctaaaattttacagcatgtcacattgaacgtttgaacacctgcatgaagtattaaatatagtctaaaaaataactaattgcatagattgtgactactttgtgagacgaatattttaagattaattgctccatgatttgacaatatgatgctacagtaaacatgtgctaatgacggtttaattaggcttaataaattcgtctcgcggtttactgacagatattgtaattagtttttctattagtgcccaaacaccccatgcgacaccatatataatacccgatatgacacgccaaaaccttttacccctggatctaaacacccccttatatattgtgatatattgtggaacagtttgcaagtgaccttaagggtgaaaagaaatcaataatatttgactctcttccctccaagtctctcaccagcaaaaagtagtactccaaggtgtgatgcatagtaagattttttttaattgtgtgggacccagtttagtgtttttctttgccacgtactctctctgtcccttaacatagggatgttgatattttgattatactgtttgaccattcgtcttattaaaaaaaaattagaattaatatttacttttttgacttactttattatccaaagtattttaagcacaacttttcattttttatatttgcacaatttttttgaataagacaaatgatcaaacagcacaagcaaaatgtcaaaatcccttatgttgacggagggagtactatagtacattgcaacaattaccatatagctaaagttagacccagcttatggctcaataagactttatacatctaaaataacaaatagccataaaggcatcatattcataattgaaggagcccctcctattattttcaacccagactcgtcatttgcctgttttacattatatgattcataatggtggcgtcatgttccaaagttgcaactattatcactttcactacagaggctaatcagtccttgaaccccgatgctacagtggcacgtactggagagtagtactttatattttctcttaatttgcttggaatatttttggatttcgtacatgtaagtctttgcaattattttaatatgcgtatccaagcacgatacattaataaactaattgactaattatacactagctgtaaagctagtgcattaacctggattggaagcttagacctagcttttcttaaggtctaaccgtccaacaacatacacatgcatgtggagacaaatatgtcaaatggattgtactagtacatgtatgacccctttaaccatttgaaaataggagttagcattttttttaaattatgaaatgtcacttatgttatactcctatactccataacacctcatgcagttagagctgcttggacatacaatgattaccttatagctatgattatttgtcgaattagttgatgcatgcatgtggtgtgcatgcacacatgaagtcatgaacaatttgtcaatcagatgcagggtactagtagaaaccaacatgtgtcgtgcgccctggtttttttgtttcttcttttttttaaagcttttcttttcttctttggtgccatcgaaatgatttttaaatatttccaacatcttgtaggagctcaaaaaaataatccaaatttataaaatttatatccttccaactgttttcaaaatcctgcatttcaatccttgcaaaagaaaccctgcatttcatcgctttctccgtgtataaatataaaatattttttgaacgactataaatttaaaagatgtttgtctataagttgaaatttgtggtttcaagacatgtttttaccattcctcatctaccaactttatactaccccttcccaaactaaagtttgtagtttattcctcacctgccaatttatgtgcaaatttatttttctaactacatgtcttatgttataacttgttgtgtcaataatttctcattttttttaaaaaataatactatgatttcctaggattcgttcttatagcaaagcaaagatagaaaatatgtcgttttgtacgcatatgcttccaaaacagctaaatgatatgttttttttggcaaaaatatccattaagaaagttgcttgaaaaaaccatattaatccattttaagttgaaagtaataaatacttaattaatcatgtattgatggctcaactcattttgcgcatcttcttaatcttatttttttatttcaaacacaaccttagggcccctttgatttggaggaaaaacatagaaattttgaaggatttcaattctataggaaaaattctatgaatgcctttgaaatagaggattgaatcctatccaatttttgaaattcatatggaatagaaaatcctatagagattttgaaagaaacttagcaatagcttaaagctcttagaaaatttcctttagtctatctctcgcatccgattcttgtgtttttttacggtcattcttgtattttttctatgttttgaatcatttgttttacactttcattcctgttagaaccatatgtttttcttatttctttgttttttttcattcctacgattccaggagcccttatactactccgtatttaaggaagaatagtagagtaagggcaagtgctataatgctagatgtattgcccctaaacatgccacataagattgaatgatgaggtggaagaaataagtgatcaaagagaaggtgagccacccctcatgcgaggggcaacctccacacaaacccgaaggaaaaggagatgaaaggaagagtagattagacaaacaaataaaataaaattatttgggttagtatgctagaggtagttgtagatgtgatgtattgtactccctctgtcccataatataagggattttggatggatgtgacacattatagtacaatgattatagagagacagtttgtccagattccctacaatctcttatattatgggacgaagagagtatatatcatctcttattttaaatagataaaatagatatggcagccaccccttctataagatttgccctaactctttggttaagttaaaaaggacatctactcataaacaactgttaatcaccatttgattgggatcatcaattacatctgtcaggagggtgtctcctcgtcagaaaatgcagattggattcgacgccgacctgccttccgctgctgcttttcgagattgtcgacatgaccacatgtaaacaaaggctgtggccttgtttagattcttcgggttattaaatagcccttcgaaatcttgctatttaagattattaaacgtagattatcgataaaactgattccataatcccttggctattttgtgagacgaatctaattatgtatattaattcatgattagcagctgattactgtagcaaatcatggattaatatatctcgttagattcgtctcgcaaaatagcctagtggttatggaataggttttgtcagtaatctacgtttaatactcttaaataacgagattccagagggctatttaataaccctccggatccaaatagggcctgtgtttagttggatccaaagtttagattttggttgaaattggagatggtgtgactaaaaaattgtgtgtgtatgacatgttgatgtgatggaaaaggactgaagtttggatccaaactttgaatctaaacacagctaaaatcgatgcttgtgcattatacaagctcataaatgcaagaaaaagaaagatgagagatgcaatgcaagatgctgcggacagcagcaagaaaaaaaacaggttttccggtgacgacagattcccaacaaactccgataatcaattcagaaaacatcggcccgtgtgggagaagctcaagtgagtaggtagagggtgaggacctaaaaaaaactggattttctacttattaatttatttttaaatgtagaaatctatagttgaagatttttttaaaaaaactgcagcagccagagttcaccaaatatggccgtcctttcaacggaaggagataaatttaaattttaaaactaaatttgacatttattttagggtattgttattatactttattttacttattgtctttaaaagctaaggacatatttataaaagttttactaacataaccaatatatctatatcttctatatatagttacagcttctaaacatctaaaactcaacatacaaatatagtaattattagtatcttaaaacttaacatgcaagaataccacgccaacccaccaaatatctaaagtttaatgtataaatatagcaattataaccataatttattatattataaaactcaacatacttacatgctaaatcatcattttgatgcttgataaaaaccgtctcatgtttgcttggtctctaaatttcttccaaatggaattattctaagttgaattcatattagttgtacttcacagcagtaagatatgcgttaaatattgatcatgcggttaagtagattttacatttatatgctcccacatatacattgatagaattcgtatgtacgagttctagaatcaaatccatcgattcatggtataccacaacaaaccgcagagtataactactgccaaacgatgtgatcagaaagcactgacggaggccgccaccgagcaggtaggggtagggcgaccatccaggctccgccgctgccaccgctaccctttttactaataaatattattaatatatagtataaaacttgatcgatcaccgtgaaacaccgtgctggctccaccaggaccatcactgccaagaagaagaggagagtgatagaaagagaaagcgagggaggagagagagagacatgaaggaagctcagagagagagaggccctgtttggcacagctccagagctcagccaaacagtttcagctccaccaaaactgggagtggagttgggtggagctctctcacaaaatgtactagagttgtggagctgggtttaggcagctccacaactccactccaaacttaactcctggagttatatttaggagttggagttataccaaactggcccagagagagagagagttttgcatttgcaactctctcctgtacttctctctctatacaacaactactcctcgactggactcggtccaagagaccacatacccccaacgaccctcctcccctcccccctcctctccccctcgccgagatatattttcccctcggcggcgactcctcctccacctcgtgagctcgccttcggccgccgcctctgcgcctcgcagatccccacccgcgaccgagcgagctggtgccgcatcggtatcgcatcccggtgagcagcgtccacctgacacgattttcctccagttttgctcgcgttaatttctcttctagaccttggatgggagccctttttctcttaatttgtgacagccttgttccacccccaaaaggcgcttggcatgttagatccgtcgtccctggctgactatatgattctttctgtgattcttgattggaactgtgattagtgtaaaatatgccattcttggcttgtttgaattgcctgttctttgcattgaatgatgattctaatcattgtgattgattgatgcatgatggttcattgattctgctgcagttcatcttctggctggacgaattcaattcacggacggtggtggtggtggtgttgactagggatttatttttttaccattggcggctcggctgcatccccaagtgaagaagagaattcgtacatgattccgctaaacaggagggcgagtcagactaggggtggtagatctcgatgccctttctttctctttggttatttactgttgctttagatatatgtatatgcgtctaaataatgttgttgcctttttgatcccctttggcccttgagcatgtgtaccaaccaatagtggcattttttttaatgtttagtttgtccatctaatctatgtgccccatgaaggaaactgttttttttttaagaattgctccacctgaaaaagctgtccttttttctttgccatgggattcacttggtgtacaagcacatgaacacctttcagaggtcatttcacatgcatatgtatgggctagatatttcatatggcaagcagtagtgtgtcttttgatggtatgcactattgccagcagtgaagaatttcttagcaaaaattccttttcagtagatgatcccagcccatttcttctgccttaagtaatgcttgttatgtgcacattaagatttcagtcactacacagataggcaagttgaactaaagctattaggtgcaatatttcaactgaagtcaactaagacatgcaaccatatcgatcttgtttttggtagataaatctttaagcaagcagttgccactttgctgatatcgcatttcaagtcaaagccagagtttgcttgctgtgtagtttcattatcaatgaggactggttcatttgtttgtgcggaacaggggatccatatatctgacattaattaggttgctcttttgtttgaccatgggtatgctttaatttattcaactgttgtaatggttaaatgtttggtcattccctttatgttgtaagttcatcatgttgatagggatggagtacttcgatgctaggcggaagcctcataatgttgggaaagttattgcagctctggtcctcacaacactatgtatatttattttgaagcaatctcctggttttggtggcagtagtgtggtaagatgtctatatttctttttttctcttcttcttctttcatccttattcctttaaatctgcttttaagatcagcctttcctcacgttttcatgttttgatttgtaagtcactttctgctacctataggtttaacttttggacttttctcaacttactttctcttatgtttttcttgttacacaaaaagcaattttaattttgagtatcacctgtattatagaatatgtccttgtataactagcataaaacaaaatgatgactgctattgtagttgtttcaatacacatatcttcatttctgctctcagtgctaacaagcaggtgaggaaagtgacatctctccatccaattgcctttgttattgcaatgtctattacattagttcatgttccaacttgatatttcaatacacatatcttcattagttgtttgccacttctcgttgcggcaagttgatgcctaaatggcatcctaacaaactgtagctttcagccacgagaccttctgacagctaatcaatctgcataataattttgacatgttcctgttcaagaaaactacgatatgatttgcagatgtaaatatatcacatctctaaaactacaggctaactatccagttctttagaataaaatgttaagagactgttgcagagtgaaggtcaaacatagcacattacttttgttgtctagaaacatgtataagctgcgatgcagacctagtatgtgtatggctaaacttggatatgttccatctgttttgacttctgttgcttaatctttcaactcttcatgcaaatccgcctgttatgtttcttatgctgcaattattattatgccattcttatatttcccctatttttaattcaactgtataactgattgtggggttatgtatcttgcagttttctcgccatgaacctggtgttactcatgtcttagtaacaggaggagctggctatattgggtcacatgcttcattacgcctgttaaaggacaattatcgagttaccattgtggtaattaagttttcctttgtactgaatttctgaactggtttgttcttcaaatgccacccttgatggttaattgtgatttttaggacaatctttctagaggaaacatgggagcagtaaaggttctccaagagttgttcccccagccaggaagacttcagtttatctatgctgatcttggagatcaaaaaactgtatcctcattttgtacttctaaattacctcctcgtaatttttaaaatgttcaaatgccagtttttcacttaactggctcccaggtcaacaagatctttgccgaaaatgcgtttgatgctgttatgcactttgctgctgttgcctatgtgggtgagagtacattggaaccccttaggtaagtcattaccttattgacagtttgtcagttccatgagcttgggggacctcttattctactaacccctacagacgttaccattgtacacacccttgtctaatggcctaattgtagtgctaggggaaaaggtccttatgataaaaaacagttttcactattaatccatggtacttggtatgctacaatgttaactccataatcaagtgctttctgatttttagttctcagatatttatattatctgctatcacagatatgatgaactgtataatatatctgaaacatgtctagtatatctctgataatcttaagtatttaacaggtactatcacaatattacatcgaacaccttattgattttggaggctatggcgtctcatggagtcaagacccttatttactctagtacatgtgccacctatggagaaccagagaagatgcctattgtagaaaccacacgtcaggtaattaatttatgatggcctcaaaactgcagtgtttggattgtgctgtgctatttcatcttgttgctggaaaggcaaactcaaggctgatgtgtaaatattatgtacctaattggttaataatttactctgttacagttaccaattaatccctatggaaaagctaagaaaatggcggaggacatcatactagatttcacgaaggggagaaaggacatggctgtgatgattttaaggtatgttgtttttccatggatataggcttgcaatttctgaacacaaaattggtatgtactaacatgtcaccttttgcattagatatttcaatgttattggatcagacccagagggaagactaggtgaagctcctagacctgaactacgagagcatggaaggatatccggggcatgctttgatgctgcgttaggaatcattccagggctgaaggtattttctcttatactttgactgtacagtacccctggtgtaaagcataatttagtgtattactaccatatatcagctttggatgttgataatagcaatatgatatacccatctagaagatacttgttttttgaagtattatacctgtatccagagactgaaactacagaagataatttagatttgaagctgatacttcatgaatcaattgcaggttaaaggaacagattatcctacaactgatggaacctgcataagagactacattgatgtcacagatcttgttgatgctcatgtgaaagcactcaacaaggcagagccaagtaaagttggcatttacaatgttggcactggaagaggtttgacaatatgagctttctttatttactttgattaaatgcagttcgctcatgctaggacagaatcagattttaattaaatgctgcatttgttggttattttacatcaaatttttacgctggaatacacacagatggttattctggtagaataattttttattgtatgcttatgaaaaattgacttctcttgtcaaattatctccattctgcatttttactcatgcatttcttgtgctgtcaatagtatattctaatatatgtatgattgctttcaggtcgttcagtcaaggagtttgtggatgcctgcaaaaaggcaactggagtcaacattaaaattgagtacctcagcaggaggccaggggactatgctgaagtatacagtgacccaacaaagatcaacacggagctcaactggactgctcaatataccgacctcaaggagagcctgtcagtcgcttggagatggcaaaagtcacatccacgcggatatgggtcaaactaaatatagcttgctgatcaataattctgctgaatcgtcgatatattgatttttttagttagtggtataggatcttggtgcgataccgcttccacagtcactcatttgttatttttttctctttttattttcaaaggtttgttgttattttctagcaaaaccataagcagtgatcttgatatgctggaaatcctggaagccttcctgtaagggcaaatttcattgttttttgacacaaattgctgataaaaagaagtgtacattgtctcttaccattctgagatgcaagcttgtgaactgaactatagactacaaatatccctgtgttttgttatctatggaatgctcatcaccatttcgtgccaactgttgggtacacgtgtattgttaagcagtatcaaatcaggcgttgttcttgtgcagcctcacctgctacgcattttcaggcaaccggtttgacatgctcatgttgttttgtcagatcaggcatgcttaggttgtcattaacaaactttcagtaccaacttgatttcccatgaatgagcctgggggttgttttcaaattttgtttggtctacatttgacttctgtttgaaggtggcagcatggcagagttatactgttacaaatcatataatccctccgttttttaatagatgacgccgttgactttttctcacatgta

SEQ ID NO: 6389 - DNA, 15357 bp, Oryza sativa
cacgccgtgctagatcgtccgactcgatgttgttcttgtgatatacgtgtcggacctcgatcccatcaaatcttttttccagcttcctgacttctgcgagatacttagacaactcaggctagagcatttgtaatctttgtgcacctggtttgcgactagttcggaatccccttttacgattagtcgcttgaccccaagtgcggctgcagctcttatcccaacgagtagcccttcgtactcggctgtgttgttggtcgccctaaagttaaggtgaattgcatgcttgaactgatctcccgaaggtgatgtcaagatgaaccccgcacttgctccttggctgttgagcacaccatcgaacgccattgtccatgtttcgttgtcggtctgactgtctaacctgttttcaggcatagtccaatcggctacgaaatcggcgagaacctgggacttgatggctgttcgtggtacaaagtggacgtcaaactggcttagctcgactacccatttcgcaatgcggacgacaacgtctttgtttctcacgacttcgccaagagggatggcggagataactatgaccctgttggcttggaagtagtggcgtagctttcttgacgtcatgattaccgtgtagagcagtttttggatctgtgggtaccttgtcttcgcgtcgtggagagcttcgctgacgtaatagactggtctctgcaccttttctctttcaacaacaatgacagtactcacagagtagggcgtggcggcaatatagagaaataactcttcattaggttggggagcaacatgtacagggggatttgacaggtagcgcttgagtgcgatgaacgcctcttcggctgcctgtgtccatacaaatttgtcttgcttttttagcagagcgaagaaatgttgtcctcgttctcccatcctagcgacgaacctacttagtgccgccatgcatctggttagcttctgtacctccttgagtcttgtgggcgacttcatgttctcgattgcattgatcttctcggggtttgcttctattcctctgccagagacgaggaacccgagcagtttgcctaacggtaccccgaacgtgcacttcttaggattgagcatgaggcgatatcgtctgaggttatcgaaggtttcccgtagatcatcaatgaatgagtcacctgtcttggtcttgacaacaatgtcatcgacgtaggcctcaacattgttacccagctgatcgctaagtgccccttggatcgtacgctggaaggtatttcctgcggttatcagtccaaacggcattttaacatagcagaatacaccgaacggcgtgatgaatgttgtcttcttctcgtcctcttttgccatgctgatttagtggtagccggagtaagcgtcaaggaagcttaacagctcgcaaccagctgttgagtccactagttggtttattcgagggagagggaagtgatccttggggcacgccttgttgaggtcggtgaagttgatgcacatcctctatttcccgttggccttccgcaccatgactgggttagctagccactctggatggagtacctctctgatgaaaccagctttgagaagtttatcgagctcttctcgtatggcttgttttcgatctggtgcaaatctccgcagtttttactttactggcttggcatcgggtcgcaccatgagtttgtgctcaatcacctccctggggacccccggcatgtcggacggctgccaagcgaatatgtctgcattgtcgtggaggaaggtgatgagcgcgagttcctatttctcgttcagtgatgctccgatcttgactgtcttgtcggggttggcactggagagtggaacgattttgattgtgccgtctgatttcgacgtcttagtcgttctgatcactttcttgggtggctcggctgtggcgggtgggctgggcgtgtgctcgaccatgtcgaggctccgcttgtcgcattggaccgccagctttgcgttcccttgaatagtgattgttcccttcggcccgggcatcttgagtacctgatacgcgtagtgagatgcggccatgaacttcgcgagtgcagttcttccgatgatggcgttgtatgctgtgtcaaactcagcaacatcaaatgttatctgctgtgttcgtaagttgctcgcttggcggaaagtcacaggaagcgtgatcttgcccaatggcttggacgaaaactgagtgattccatggaagggttgatcggtaggtgtcaacacgctttgtggaatccccattgcgtccaaggtgctggcgaagagaaggttgatggagctgccgccatcgacgaggactcgcactaccttgttattccgaatagtgggttcaaccacgatcggatatcgtcctgggataacagtagccttggggcggtcctcatctgagaactcgatcttctgttcagaccacttcatcttgggtgcaacccctgtcacaccctgaaaattcaaaatatataaattgttgtttaaatggaatttttagaaataattttaaaagtcttgaaaagaaaatctaagtttaattaataaattccaatataaaaaggggccagataaaatttcattaaatactttgcttaattctataattcctagatttttctgggatttatttgagctaagaaagtatttttaataaatggaattgcatttaaggaataatttaaattgaaaaaggttttaaaaagtctcttttggctttgggccgaaagtcggcccaaaaccgttctctctctcggcccagtccggcccagtccgcagccgcccgcgcgagcgcgctgtcgcagacaggtggggcccacccgtcagtcgtcgtctaccttcggccgccgccgcccgaaaccctagtttcgcgccgccgccgtttcctttccaaatccggccgctcctttccttctccggccgaatcaatagaggggaaatgatcctcgggatctcctctaccttttctcctttggaatctttggttaaatcgctttggaaagctttggaatcgagttcgattcggatcggttttccctctctccaagccgaaggtttccttcgccgttgccgtcgccgtgggccttcgccgccgcctctgagcccctttaaaaggacccccggtgtctcctctacccgtcgcagccctcgccttcgcctctcgtcgccggagtagccctagcgccgtgtgccctagctttgccttcgccgccgccgctccagccgtgcgccgccgtcgttccagccgtcgccgtcgctcgggaagaccgccgtcgtcatcgccaagtcgccgccgtcctcgtccgccccttcgcagccgtcggaacccgccggagcttcgtcgccgtcgacaacccgaaggtagccgccgcttcctcctcgtcgccgtcgccgtccgttgcttctccgtcgctcttttggtcgtcggtgagttcgccgtgccgcccgcttcgtcccggtgccttccgtttgcgttctcgcgccgccgttcgccggcaagcgtgcgccgcccgagccgacccagctgccgagccgccgccgccgtcggtgacgtcatcgttgacgtcatcgggatcctctcccgtgagccggtcgtggaccgatcgatcttggccgtccgttttggattggatcaatctcggccgtccgttcgtgtgaaccgccgcccgtgcgccggtccacccaaaccctagcccgctgacgcaataaatccccttttccttttcaaaaataattcattattgcgtcataattcaatttaaaccgatttaagtgttttaatccgatttaatctttaaaaaatcataactaattcatcttagctccgatttagttggttcaagtctctaaatttttctaaaattgagatctacacattaaaaatatccacatgtactgttcatgcttgtttatgtgctgttttggtgattttgctcttttctgcttagattccgtcgtttccggagagtccgttttcgcggaagaagagtttgaagagttccaaggccagcaaggcaagtcacacagatcccaaacaaccctttgagcatgttgatcctatttaaagctattgtttctattcaactattgcatctattttcgaatgtcattgggtggaattgacctattctttgttatggcccttttgtacattgattaccttattccttgataccttgggttatattaatttgactagttgagctttatttatattggttcaactagatattagatataattgcttagccctgcttagaaacattattacacttatgggataactaatgactcactattatttcatgatggcttaatgatagttcacgatggtcgatcgtgattagttaattaattaatgtgccaactaaaacctgataatggtgggttgtgggcacatggttttgatggtcgtgctcatgacaattaaggaccggttcacgagtttcggttgtgaaacatttatcgtgccaaccacaagccagcatgggcaacggctttatcttttgtatagcatggttcattgcggggcaccagactgagaagtggcggagataagcccacgggggtcgctggggagtccatgccttgttttataagggggtgattatgatccaggaaggtgcgctgcagtggattgtgttatgcgaggggtattgtcacaactcctttccgagataccgtggtggtattgaggcacatggtgacatgatgtggggttgtgtcttgtgggtacagtggtacacctctgatcagagtaaaactattcgaatagccgtgcccgcggttatgggcgggtctaacaatgtctttcgtgattagtctcacacctctcatcattgtaaaagatgcttaaactgataataatttgattagctcctggtttggaatggtacattcctggtttggagatagaactgtgcagccgggtggttgttcagaatggttgggcctatacaacagggtatgttgtatagcgttggattaatattgtttaattattacttaactgtttcgttaaaattctcaaatgtttgctaaatgctgcttttgcaaatggaaccctattatgccatcctttgttatcctgtgcacttgcatatttgctgcgtggcttgctgagtatgtcatatactcaccttgcaatcattcatcagaggaagagttctacaatgaggctgatggtgtggaggattaggtgtagccttggtcaagctgcctgtggagtggagccgtctgcgccgtttatttaatttccgctgcttagaactttattgattgagaggaactatctacctctgtaatgacattttattcgcttattaattagagtaatatttgcactctattatcaatttgttattgtgtgcctcggctgattcctggacgagggttcacacacatgtaagcgtttggaattttggatagaaattccgggcgtgacaagttggtatcagagcctctttgaccctaggttatgccaaatggttacccatagaagccctctgaaaaatattggaaaagtagaactgttctcctccctttctcttttaattaaaccaaactaatggcacatgcatttcataatctcttttaatggttctcattcaaaatttattccagtgttattagtactgtacatctattactgtactaatggctcatttaccagcaaaagttttacaatactgttttatttaatcttgctgcaataaaataaatttagcatgttgattttataatttcttttcatttcttttgaaaccagttattcaaaattacaaaatttgtgacctcgtttccaaatgttttaatttatttcgcaaagcttggtttactttatttacttccctttttactttgattttctaactttattcaaattaatccaaaaacttgtgctattaattggataaaggtcttaactccctcctttcacttgtctttagatgccgcgttacaagcctgagtacctgtttggtgttgagggttttgtccaggagttgcgtacaatgtcctttgtcattggatttgggactgcccctttttatgcccagattcctcatgatagtcatgaagagaagtgccgagtcaaagtcaccttgaacagtaatagtgaagatatcccctcagtgatgtttgaagctggaggaagaaactacatccatgcatgtcaggaggtggcaaggatcgccataggagagctccgtgatcgctacagtgatcaattggccgacactgagtatcgctaccatcctcgccaaccccagggaagtgaccgtggcagttaccttgagactgaaggaattgagaatgatgttaccacgaaacatttggttgagatgttgtgggctatggatgaaagtcgtgcggagactgtgttagcagctcaagatcgtgaagatcggaatcgtggtaagatttgcaagctagaagacaaggtggatcgtttggagaaggaattagccgcattgaagggagaagcaccgccgcagaaggccaggattcgtcttaccgcaaggaagagagctctatttgtccctcgctatcaactggcgccaaaggttcgtgtggtggagaaagaagttgccccagctcaagcggatcctccggtcatcatcataagtagtgatgaagaagaagaatccaagcgcaacaattccaagattgagtgggtagcaactcaagatgatgaagacgagccttcaatcgacctccgatgcttagaagaactagagtgacttgttaagtcgttgtcttagatcgttgtgttagtttgcttgcttaaagtttgcttgtgtgtgtctcgcatgtgatttacatcagtggtgggatgtaattgcatgtgtttgtttgcttttgagtgttaggaagttggtgagtttagtggtgtgagagtcttcagtttgtaataatgaaactcagttaagatcaataaaagttaaagtaattctctgtcctaagtagttccccgttttcccttcttgtgccctgtccatgccagatggtgaatactcgcagcaacgggaatggtcccaacaaccccaataataacaacaatggagagaatcccactctggcccaagttcttgctcaacagacacagcttatgaacatgatgatgcagcaatttcagaatcagcaaaaccaaggaaataaccatgcacctcctcagaataagttagcagaatttcttcgtgtgaggccgcctgttttctctagtaccactaatcctgttgaagctagtgattggctgcatgccatagagaagaagttggatttacttcagtgtactgatcaggagaaggtctcatttgcatcacatcagttgcatggccctgcctctgaatggtgggatcacttccgccttaacaggactactgctgaacctatcacttggcttgaattcaccgctgctttccggaagacgcatataccatcgggagtagtgtctctcaagaagaaggagttcaggtcgctttcccagggatctcgctctgttacggagtatctgcacgagttcaatcgtcttgctcgttatgctccggaagatgtgcgcaatgatgaagagcgccaggagaagtttttgggaggacttaatgatgagctttcttacccactcatggttggagattaccctgatttccagaaattagtggataaggctattcgtcaggaggacaagtacaattgcatggagcagaggaaacgtcggattgctcacttcaaggcacaacaggggagtaatcagaagccgcgtcttactttaggaccccagtctatgccacagggaggttcttcgtctgttgttcgtccgcaacgtcagttcttcaacaacaatgttggcaacaacatccgtaatcaagctccacgtcctgttgcagctccagcacagcaacaacctgccaagagggagcaaggcaacaagcccgtggtgtgtttcaactgtggagacccaggacattatgctgacaagtgtccgaagccccgacgcgtgaaggttgtccctgcccagaataactctgctgtatcagcatccaaggctcgtgtaaatcatgttgctgctgcagaagctcaagatgctccagatgtgattttgggtacgttccttgttaactcagttcctgcaacagtacttttcgattctggtgctacacattcattcttatctatgagttttgcgggaaatcatgggatggaagtagaagatcttagacgtcctttgatggtcagtaccccaagtaatcaagcactctctttgcaacgtagcccctctgtcagaatagaaattcaaggagtaccatttctggccaatcttatcttgttagaatccaaagaccttgatgtcatcctagggatggactggttagccagacataaaggtgtgatagactgtgccaacagaaaagtaactctcaacagctatgatggtcgagttgtaactgttcatgcattgtcatctgagtctttaaggtcaagactgaaccagataactttggaagagattcctatagtccgggagtatcctgatgtgttcccagatgatttacctggtatgccgcctaaaagggatatagagttcagaatagatttggtaccaggaacaactccgatccataagagaccttatcgaatggcagccaatgagttggcagaagttaagaggcaagtagatgatttgctacagaaaggatacatcagaccgagttcatcaccatggggagctccggttatttttgtggaaaagaaagaccatactcagagaatgtgtgtggactatcgtgcactaaacgatgtgactattaagaataagtatccactacccaggattgatgatttgtttgatcagcttaaaggtgccactgttttctccaagatagatcttcgatcagggtatcatcagttgagaatcaaagaggaagatatacctaagacagcttttaccactaggtatgggttgttcgaatgtactgttatgtcttttggacttaccaatgcccctgctttcttcatgaacttgatgaataaggtgtttatggaatacttagacaagttcgtggtggtctttattgatgatattcttatctactctcgaaccaaagaagagcatgaggaacatcttcgccttgcattggagaagctacgagaacatcaactgtatgctaagtttagcaagtgtgaattttggttgtctgaagtgaaattccttggtcacgtcatctcagccggaggagttgccgtcgatcctagtaacgtggaatccgtaaccaattggaagcaaccaaagacagtttcagagattcgcagtttcctaggcctcgcaggatattatcggaggtttatagagaatttttccaagattgctaagcccatgacacgactgcttcagaaagatgtgaagtacaagtggtcggaagaatgtgaacagagttttcaagaattgaaaagtcgcttaatatcagctcctattttgattttgcctgatccaaagaagggttttcaagtgtattgtgatgcatccaaacttgggttaggttgtgttctgatgcaagatggaaaggtggttgcctatgcctctcgacagttacgtccgcatgagaagaactaccctactcatgatattgagttagctgcagtcgttcatgcattgaagatttggcgtcattatcttttcggtactcgtacagaagtgtacaccgatcacaagagtttaaagtatatctttactcagccggatctgaacatgagacaacggagatggttggaattaattaaggattatgacatgggaattcattatcatccgggaaaggctaatgttgtagcagacgctcttagcagaaaaggctattgcaatgctacagaaggacgacagttgccattggaattatgcaaggaatttgaaagattaaatttgggaattgtcggtagaggtttcgttgcagccttagaagcgaagcccactctaattgatcaagttagagaagcccaaattaatgatcctgatattcaagagatcaagaagaatatgagaagaggaaaagctattggtttcttggaggatgagcacggaactgtatggttgggtgagagaatctgtgtccccgacaacaaagatctaaaagatgcaattctgaaataagctcatgatactttatactccattcaccctggtagtactaagatgtaccaggatcttaaggaaagattttggtgggcaagtatgaagcgtgaaatcgcagaatacgtagcagtatgtgatgtttgtcagcgagtcaaggcagaacatcagaaacccgccggtttgttgcaacctttgaagattcctgaatggaaatgggaagaaattggtatggattttattactggtttacccagaacgtcatcaggccatgactctatttgggtgatagtcgacagacttaccaaagtggctcatttcattccggtaaagacaacttattccggaagtcgcttagcggaattgtatatggcaaggattgtgtgtttgcatggcgtccctaagaagatagtgtctgatcgaggcagtcagtttacttcaaatttttggaagaaacttcaggaagagatgggttctaagctgaactttagtactgcttatcatccgcagacagacggacaaaccgaaagggtgaatcaaattttggaagacatgttgagagcttgtgctctagatttcggtggaagttgggataagaatctaccctatgcagaattttcgtacaacaacagttatcaagctagtctacagatggctccgtacgaagcactgtatggtcggaagtgccgcactccgcttttgtgggatcaaacgggagaacgtcaggttttcagaacggatatcctaagggaagcagaagaaaaggtaaagatcattcaagaaagattgcgtgtggctcagtctcgtcataagagttatgccgacaatcgccgcagagatttaagttttgaagagggagattatgtgtatcttcgtgtcacgcctctacgaggagttcatcgttttcataccaagggaaaattggcaccgcgttttgtgggaccttataagattgtcagtagaagaggagaggttgcttatcagttggagttacctcaatctttggcaggagttcataatgtgttccatgtttcgcaattgaaaaagtgtttaagggtacctaccgaacaagctaatcttgaccagatagaagtccaagaggatttgacttatgttgagaaaccaatccgtatcctggaaacaagtgagagaagaaccaggaatcgagttatccgtttttgcaaagtccagtggagtaatcactcggaagaagaatcaacttgggaacgagaagatgaattgaagtcagctcatccgcacctgttcgccagttcttccgaatctcgaggacgagattctgtttaaggggggtaggtttgtcacaccctgaaaattcaaaatatatataaattgttgtttaaatggaatttctagaatttattttaaaagtcttgaagagaagatctaagtttaattaataaattccaatataaaattgggccagataaaatttcattaaatactttgcttaattctataattcctggatttttctgggatttatttgagctaagaaagtatttttaataaatggaattgcatttaaggaataatttaaattgaaaaaggttttaaaaagtctcttttggctttgggccgaaagtcggcccaaaaccgttctctctctcctcggcccagtccggcccagtccgcagccgcccgcgcgagcgcgctgtcgctgacaggtggggcccacccgtcagtcgtcgtctaccttcggccgccgccgcccgaaaccctagtttcgcgccgccgccgtttcccttccaaatccggccgttcctttccttctccggctgatttgttagaggggaaacaatctccgggatctcctctaccttttctcctttggaatctttggttaaatcgctttggaaagcgtcggagacgagttcgattcggatcggttttccctctctccaagccgaaggtttccttcgccgttgccgtcgccgtgggccttcgccgccgcctccgagcccctttaaaaggacccccggtgtctcctctacccgtcgcccccctcgccttcgcttctcgtcgccggaagagccctagcgccgtgtgccctagcttcgccgtcgccgccgccgcttcagccgtgctccgccgtcgctccagctgtcgccgtcgctcgggaagaccgccgtcatgctcgccaagtcgccgccgtcctcgtccgccccttcgcagccgtcggaacccgccggagctttgtcgccgtcgacaacccgaaggtagccgtcgcttccttctcatcgccgtcgccgtccgttgcttctccgccgtcgttttggtcaccggtgtgttcgccgcgttgtcctctacgtgctggtgccctctgttcgtgccgtagcgccgccgttcgccggtgagtgtccgccgcccgagccgtcttcttcgccgagccgccgccgtcgtcggtgatgtcattgttgacgtcatcgggatcctctcccgtgagccggtcgtggaccgatcgatctcggccatccgatttggatcggatcaatctcggccgtccgttcgcgtgaaccgccgcccgtgcgcccggtccacccaaaccctagcccgctgacgcaataatccttcttttccttttcaaaaataattcattattgcgtcataattcaatttaaaccgatttaagtgttttaatccgatttaatctttaaaaattcataactaattcatcttagctccgatttagttggttcaagtctctaaatttttctaaaattgagatctacacattaaaaatatccacatgtactgttcatgcttgtttatgtgctgttttggtgattttgctcttttctgcttagattccgtcgtttccggagagtccgttttcgcagaagaagagtttgaagagttccaaggccagcaaggcaagtcacacagatcccaaacaaccctttgagcatgttgatcctatttaaagctattgtttctattcaactattgcatctattttcgaatgtcattgggtggaattaacctattgattgttataacccttttgtacttgattaccttattccttgataccttggggttatattaatttgactagttgagctttatttatattggttcaactagatattagatataattgcttagccctgcttagaaacattattacacttatgggataactaatgactcactattatttcatgatggcttaatgatagttcacgatggtcgatcgtgattagttaattaattaatgtgccaactaaaacctgataatggtgggttgtgggcacatggttttgatggtcgtgctcatgacaattaaggaccggttcacgagtttcggttgtgaaacatttatcgtgccaaccacaagccagcatgggcaacggctttatcttttgtatagcatgggtcactgccgggcaccagactgagaagtggcggagataagcccacgggggtcgctggggagtccatcccttgttttataagggggtgattatgatccaggaaggtgcgctgcagtggattgtgttatgcgaggggtattgtcacaactcctttccgagataccgtggtggtattgaggcacatggtgacatgatgtggggttgtgtcttgtgggtacagtggtacacctctgatcagagtaaaactattcgaatagccgtgcccgcggttatgggcgggtctaacaatgtctttcgtgattagtctcacacctctcatcattgtaaaagatgcttaaactgataataatttgattagctcctggtttggaatggtacattcctggtttggagatagaactgtgcagccgggtggttgttcagaatggttgggcctatacaacagggtatgttgtatagcgttggattaatattgtttaattattacttaactgtttcgttaaaattctcaaatgtttgctaaatgctgcttttgcaaatggaaccctattatgccatcctttgttatcctgtgcacttgcatatttgctgcgtggcttgctgagtatgtcatatactcaccttgcaatcattcatcagaggaagagttctacaatgaggctgatggtgtggaggattaggtgtagccttggtcaagctgcctgtggagtggagccgtctgcgccgtttatttaatttccgctgcttagaactttattgattgagaggaactatctacctctgtaatgacattttattcgcttattaattagagtaatatttgcactctattatcaatttgttattgtgtgcctcggctgattcctggacgagggttcacacacatgtaagcgtttggaattttggatagaaattccgggcgtgacattgactcccagtccgacgtagtaatcttggaaatcggcgctgatgaactgggagccgttatccgttatgatgcggtgagccaatccatatctgcaaaatatccccttgatgaatttgatggcgttgtcagccttgatttcccccgtggatgttgcctcgatctatttgttgaatttgtcgattgccacgaataggaatttgtagctgccctgtcctcgtaggaatggaccgagtatgtcgagcccccagcatgagaacggccaagtgagagggatggtttgcagtgcttgcgctggtagctttgtgtgtttgctatgaaattgacaaccttcacaccgttgtaccatgtcgcaagcgtctttgagggcggttggccagaaaaatccttgtcgaaaggcttttccgaccaatgtacgaccgacggcatgtgacccacagacccctttgtgtatgtcgaggaggaggtgtttgccgtcgtcggacgagacgcatttgagaagtaccccatttggcgccttcttgtatagatcgttgccgatcatacagtagatttttgcttgacgggttattttctcggcttctgcatcatcctcgggtaactcgtcgctgcttatgaatttaatgagtggggtccgccagtcgtccgtggtctcgatgtcggcaacatcgcgctctgcctctgtagcccccgagctgatgtcgggggtgactgggctatcttcgtcgtttgcctctttcactgatggctttgtcaggatgtccagaaaggtgctgggttcgagtggctctcgtctggacgcacgccgtgctagatcgtccgactcgatgttgttcttgtgatagggtaccgagctcgaattcggccttatcgatcgatagtcatcaatgccgtcg

SEQ ID NO: 6390 - DNA, 14974 bp, Oryza sativa
gggtatcatcagttgagaatcaaagaggaagatatacctaagacagcttttaccactaggtatgggttgttcgaatgtactgttatgtcttttggacttaccaatgcccctgctttcttcatgaacttgatgaataaggtgtttatggaatacttagacaagttcgtggtggtctttattgatgatattcttatctactctcgaaccaaagaagagcatgaggaacatcttcgccttgcattggagaagctacgagaacatcaactgtatgctaagtttagcaagtgtgaattttggttgtctgaagtgaaattccttggtcacgtcatctcagccggaggagttgccgtcgatcctagtaacgtggaatccgtaaccaattggaagcaaccaaagacagtttcagagattcgcagtttcctaggcctcgcaggatattatcggaggtttatagagaatttttccaagattgctaagcccatgacacgactgcttcagaaagatgtgaagtacaagtggtcggaagaatgtgaacagagttttcaagaattgaaaagtcgcttaatatcagctcctattttgattttgcctgatccaaagaagggttttcaagtgtattgtgatgcatccaaacttgggttaggttgtgttctgatgcaagatggaaaggtggttgcctatgcctctcgacagttacgtccgcatgagaagaactaccctactcatgatattgagttagctgcagtcgttcatgcattgaagatttggcgtcattatcttttcggtactcgtacagaagtgtacaccgatcacaagagtttaaagtatatctttactcagccggatctgaacatgagacaacggagatggttggaattaattaaggattatgacatgggaattcattatcatccgggaaaggctaatgttgtagcagacgctcttagcagaaaaggctattgcaatgctacagaaggacgacagttgccattggaattatgcaaggaatttgaaagattaaatttgggaattgtcggtagaggtttcgttgcagccttagaagcgaagcccactctaattgatcaagttagagaagcccaaattaatgatcctgatattcaagagatcaagaagaatatgagaagaggaaaagctattggtttcttggaggatgagcacggaactgtatggttgggtgagagaatctgtgtccccgacaacaaagatctaaaagatgcaattctgaaataagctcatgatactttatactccattcaccctggtagtactaagatgtaccaggatcttaaggaaagattttggtgggcaagtatgaagcgtgaaatcgcagaatacgtagcagtatgtgatgtttgtcagcgagtcaaggcagaacatcagaaacccgccggtttgttgcaacctttgaagattcctgaatggaaatgggaagaaattggtatggattttattactggtttacccagaacgtcatcaggccatgactctatttgggtgatagtcgacagacttaccaaagtggctcatttcattccggtaaagacaacttattccggaagtcgcttagcggaattgtatatggcaaggattgtgtgtttgcatggcgtccctaagaagatagtgtctgatcgaggcagtcagtttacttcaaatttttggaagaaacttcaggaagagatgggttctaagctgaactttagtactgcttatcatccgcagacagacggacaaaccgaaagggtgaatcaaattttggaagacatgttgagagcttgtgctctagatttcggtggaagttgggataagaatctaccctatgcagaattttcgtacaacaacagttatcaagctagtctacagatggctccgtacgaagcactgtatggtcggaagtgccgcactccgcttttgtgggatcaaacgggagaacgtcaggttttcagaacggatatcctaagggaagcagaagaaaaggtaaagatcattcaagaaagattgcgtgtggctcagtctcgtcataagagttatgccgacaatcgccgcagagatttaagttttgaagagggagattatgtgtatcttcgtgtcacgcctctacgaggagttcatcgttttcataccaagggaaaattggcaccgcgttttgtgggaccttataagattgtcagtagaagaggagaggttgcttatcagttggagttacctcaatctttggcaggagttcataatgtgttccatgtttcgcaattgaaaaagtgtttaagggtacctaccgaacaagctaatcttgaccagatagaagtccaagaggatttgacttatgttgagaaaccaatccgtatcctggaaacaagtgagagaagaaccaggaatcgagttatccgtttttgcaaagtccagtggagtaatcactcggaagaagaatcaacttgggaacgagaagatgaattgaagtcagctcatccgcacctgttcgccagttcttccgaatctcgaggacgagattctgtttaaggggggtaggtttgtcacaccctgaaaattcaaaatatatataaattgttgtttaaatggaatttctagaatttattttaaaagtcttgaagagaagatctaagtttaattaataaattccaatataaaattgggccagataaaatttcattaaatactttgcttaattctataattcctggatttttctgggatttatttgagctaagaaagtatttttaataaatggaattgcatttaaggaataatttaaattgaaaaaggttttaaaaagtctcttttggctttgggccgaaagtcggcccaaaaccgttctctctctcctcggcccagtccggcccagtccgcagccgcccgcgcgagcgcgctgtcgctgacaggtggggcccacccgtcagtcgtcgtctaccttcggccgccgccgcccgaaaccctagtttcgcgccgccgccgtttcccttccaaatccggccgttcctttccttctccggctgatttgttagaggggaaacaatctccgggatctcctctaccttttctcctttggaatctttggttaaatcgctttggaaagcgtcggagacgagttcgattcggatcggttttccctctctccaagccgaaggtttccttcgccgttgccgtcgccgtgggccttcgccgccgcctccgagcccctttaaaaggacccccggtgtctcctctacccgtcgcccccctcgccttcgcttctcgtcgccggaagagccctagcgccgtgtgccctagcttcgccgtcgccgccgccgcttcagccgtgctccgccgtcgctccagctgtcgccgtcgctcgggaagaccgccgtcgtgctcgccaagtcgccgccgtcctcgtccgccccttcgcagccgtcggaacccgccggagcttcgtcgccgtcgacaacccgaaggtagccgtcgcttccttctcgtcgccgtcgccgtccgttgcttctccgccgtcgttttggtcaccggtgtgttcgccgcgttgtcctctacgtgctggtgccctctgttcgtgccgtagcgccgccgttcgccggtgagtgtccgccgcccgagccgtcttcttcgccgagccgccgccgtcgtcggtgatgtcattgttgacgtcatcgggatcctctcccgtgagccggtcgtggaccgatcgatctcggccatccgatttggatcggatcaatctcggccgtccgttcgcgtgaaccgccgcccgtgcgcccggtccacccaaaccctagcccgctgacgcaataatccttcttttccttttcaaaaataattcattattgcgtcataattcaatttaaaccgatttaagtgttttaatccgatttaatctttaaaaattcataactaattcatcttagctccgatttagttggttcaagtctctaaatttttctaaaattgagatctacacattaaaaatatccacatgtactgttcatgcttgtttatgtgctgttttggtgattttgctcttttctgcttagattccgtcgtttccggagagtccgttttcgcagaagaagagtttgaagagttccaaggccagcaaggcaagtcacacagatcccaaacaaccctttgagcatgttgatcctatttaaagctattgtttctattcaactattgcatctattttcgaatgtcattgggtggaattaacctattgattgttataacccttttgtacttgattaccttattccttgataccttggggttatattaatttgactagttgagctttatttatattggttcaactagatattagatataattgcttagccctgcttagaaacattattacacttatgggataactaatgactcactattatttcatgatggcttaatgatagttcacgatggtcgatcgtgattagttaattaattaatgtgccaactaaaacctgataatggtgggttgtgggcacatggttttgatggtcgtgctcatgacaattaaggaccggttcacgagtttcggttgtgaaacatttatcgtgccaaccacaagccagcatgggcaacggctttatcttttgtatagcatggttcattgcggggcaccagactgagaagtggcggagataagcccacgggggtcgctggggagtccatgccttgttttataagggggtgattatgatccaggaaggtgcgctgcagtggattgtgttatgcgaggggtattgtcacaactcctttccgagataccgtggtggtattgaggcacatggtgacatgatgtggggttgtgtcttgtgggtacagtggtacacctctgatcagagtaaaactattcgaatagccgtgcccgcggttatgggcgggtctaacaatgtctttcgtgattagtctcacacctctcatcattgtaaaagatgcttaaactgataataatttgattagctcctggtttggaatggtacattcctggtttggagatagaactgtgcagccggggtggttgttcagaatggttgggcctatacaacagggtatgttgtatagcgttggattaatattgtttaattattacttaactgtttcgttaaaattctcaaatgtttgctaaatgctgcttttgcaaatggaaccctattatgccatcctttgttatcctgtgcacttgcatatttgctgcgtggcttgctgagtatgtcatatactcaccttgcaatcattcatcagaggaagagttctacaatgaggctgatggtgtggaggattaggtgtagccttggtcaagctgcctgtggagtggagccgtctgcgccgtttatttaatttccgctgcttagaactttattgattgagaggaactatctacctctgtaatgacattttattcgcttattaattagagtaatatttgcactctattatcaatttgttattgtgtgcctcggctgattcctggacgagggttcacacacatgtaagcgtttggaattttggatagaaattccgggcgtgacaagttggtatcagagcctctttgaccctaggttatgccaaatggttacccatagaagccctctgaaaaatattggaaaagtagaactgttctcctccctttctcttttaattaaaccaaactaatggcacatgcatttcataatctcttttaatggttctcattcaaaatttattccagtgttattagtactgtacatctattactgtactaatggctcatttaccagcaaaagttttacaatactgttttatttaatcttgctgcaataaaataaatttagcatgttgattttataatttcttttcatttcttttgaaaccagttattcaaaattacaaaatttgtgacctcgtttccaaatgttttaatttatttcgcaaagcttggtttactttatttacttccctttttactttgattttctaactttattcaaattaatccaaaaacttgtgctattaattggataaaggtcttaactccctcctttcacttgtctttagatgccgcgttacaagcctgagtacctgtttggtgttgagggttttgtccaggagttgcgtacaatgtcctttgtcattggatttgggactgcccctttttatgcccagattcctcatgatagtcatgaagagaagtgccgagtcaaagtcaccttgaacagtaatagtgaagatatcccctcagtgatgtttgaagctggaggaagaaactacatccatgcatgtcaggaggtggcaaggatcgccataggagagctccgtgatcgctacagtgatcaattggccgacactgagtatcgctaccatcctcgccaaccccagggaagtgaccgtggcagttaccttgagactgaaggaattgagaatgatgttaccacgaaacatttggttgagatgttgtgggctatggatgaaagtcgtgcggagactgtgttagcagctcaagatcgtgaagatcggaatcgtggtaagatttgcaagctagaagacaaggtggatcgtttggagaaggaattagccgcattgaagggagaagcaccgccgcagaaggccaggattcgtcttaccgcaaggaagagagctctatttgtccctcgctatcaactggcgccaaaggttcgtgtggtggagaaagaagttgccccagctcaagcggatcctccggtcatcatcataagtagtgatgaagaagaagaatccaagcgcaacaattccaagattgagtgggtagcaactcaagatgatgaagacgagccttcaatcgacctccgatgcttagaagaactagagtgacttgttaagtcgttgtcttagatcgttgtgttagtttgcttgcttaaagtttgcttgtgtgtgtctcgcatgtgatttacatcagtggtgggatgtaattgcatgtgtttgtttgcttttgagtgttaggaagttggtgagtttagtggtgtgagagtcttcagtttgtaataatgaaactcagttaagatcaataaaagttaaagtaattctctgtcctaagtagttccccgttttcccttcttgtgccctgtccatgccagatggtgaatactcgcagcaacgggaatggtcccaacaaccccaataataacaacaatggagagaatcccactctggcccaagttcttgctcaacagacacagcttatgaacatgatgatgcagcaatttcagaatcagcaaaaccaaggaaataaccatgcacctcctcagaataagttagcagaatttcttcgtgtgaggccgcctgttttctctagtaccactaatcctgttgaagctagtgattggctgcatgccatagagaagaagttggatttacttcagtgtactgatcaggagaaggtctcatttgcatcacatcagttgcatggccctgcctctgaatggtgggatcacttccgccttaacaggactactgctgaacctatcacttggcttgaattcaccgctgctttccggaagacgcatataccatcgggagtagtgtctctcaagaagaaggagttcaggtcgctttcccagggatctcgctctgttacggagtatctgcacgagttcaatcgtcttgctcgttatgctccggaagatgtgcgcaatgatgaagagcgccaggagaagtttttgggaggacttaatgatgagctttcttacccactcatggttggagattaccctgatttccagaaattagtggataaggctattcgtcaggaggacaagtacaattgcatggagcagaggaaacgtcggattgctcacttcaaggcacaacaggggagtaatcagaagccgcgtcttactttaggaccccagtctatgccacagggaggttcttcgtctgttgttcgtccgcaacgtcagttcttcaacaacaatgttggcaacaacatccgtaatcaagctccacgtcctgttgcagctccagcacagcaacaacctgccaagagggagcaaggcaacaagcccgtggtgtgtttcaactgtggagacccaggacattatgctgacaagtgtccgaagccccgacgcgtgaaggttgtccctgcccagaataactctgctgtatcagcatccaaggctcgtgtaaatcatgttgctgctgcagaagctcaagatgctccagatgtgattttgggtacgttccttgttaactcagttcctgcaacagtacttttcgattctggtgctacacattcattcttatctatgagttttgcgggaaatcatgggatggaagtagaagatcttagacgtcctttgatggtcagtaccccaagtaatcaagcactctctttgcaacgtagcccctctgtcagaatagaaattcaaggagtaccatttctggccaatcttatcttgttagaatccaaagaccttgatgtcatcctagggatggactggttagccagacataaaggtgtgatagactgtgccaacagaaaagtaactctcaacagctatgatggtcgagttgtaactgttcatgcattgtcatctgagtctttaaggtcaagactgaaccagataactttggaagagattcctatagtccgggagtatcctgatgtgttcccagatgatttacctggtatgccgcctaaaagggatatagagttcagaatagatttggtaccaggaacaactccgatccataagagaccttatcgaatggcagccaatgagttggcagaagttaagaggcaagtagatgatttgctacagaaaggatacatcagaccgagttcatcaccatggggagctccggttatttttgtggaaaagaaagaccatactcagagaatgtgtgtggactatcgtgcactaaacgatgtgactattaagaataagtatccactacccaggattgatgatttgtttgatcagcttaaaggtgccactgttttctccaagatagatcttcgatcagggtatcatcagttgagaatcaaagaggaagatatacctaagacagcttttaccactaggtatgggttgttcgaatgtactgttatgtcttttggacttaccaatgcccctgctttcttcatgaacttgatgaataaggtgtttatggaatacttagacaagttcgtggtggtctttattgatgatattcttatctactctcgaaccaaagaagagcatgaggaacatcttcgccttgcattggagaagctacgagaacatcaactgtatgctaagtttagcaagtgtgaattttggttgtctgaagtgaaattccttggtcacgtcatctcagccggaggagttgccgtcgatcctagtaacgtggaatccgtaaccaattggaagcaaccaaagacagtttcagagattcgcagtttcctaggcctcgcaggatattatcggaggtttatagagaatttttccaagattgctaagcccatgacacgactgcttcagaaagatgtgaagtacaagtggtcggaagaatgtgaacagagttttcaagaattgaaaagtcgcttaatatcagctcctattttgattttgcctgatccaaagaagggttttcaagtgtattgtgatgcatccaaacttgggttaggttgtgttctgatgcaagatggaaaggtggttgcctatgcctctcgacagttacgtccgcatgagaagaactaccctactcatgatattgagttagctgcagtcgttcatgcattgaagatttggcgtcattatcttttcggtactcgtacagaagtgtacaccgatcacaagagtttaaagtatatctttactcagccggatctgaacatgagacaacggagatggttggaattaattaaggattatgacatgggaattcattatcatccgggaaaggctaatgttgtagcagacgctcttagcagaaaaggctattgcaatgctacagaaggacgacagttgccattggaattatgcaaggaatttgaaagattaaatttgggaattgtcggtagaggtttcgttgcagccttagaagcgaagcccactctaattgatcaagttagagaagcccaaattaatgatcctgatattcaagagatcaagaagaatatgagaagaggaaaagctattggtttcttggaggatgagcacggaactgtatggttgggtgagagaatctgtgtccccgacaacaaagatctaaaagatgcaattctgaaataagctcatgatactttatactccattcaccctggtagtactaagatgtaccaggatcttaaggaaagattttggtgggcaagtatgaagcgtgaaatcgcagaatacgtagcagtatgtgatgtttgtcagcgagtcaaggcagaacatcagaaacccgccggtttgttgcaacctttgaagattcctgaatggaaatgggaagaaattggtatggattttattactggtttacccagaacgtcatcaggccatgactctatttgggtgatagtcgacagacttaccaaagtggctcatttcattccggtaaagacaacttattccggaagtcgcttagcggaattgtatatggcaaggattgtgtgtttgcatggcgtccctaagaagatagtgtctgatcgaggcagtcagtttacttcaaatttttggaagaaacttcaggaagagatgggttctaagctgaactttagtactgcttatcatccgcagacagacggacaaaccgaaagggtgaatcaaattttggaagacatgttgagagcttgtgctctagatttcggtggaagttgggataagaatctaccctatgcagaattttcgtacaacaacagttatcaagctagtctacagatggctccgtacgaagcactgtatggtcggaagtgccgcactccgcttttgtgggatcaaacgggagaacgtcaggttttcagaacggatatcctaagggaagcagaagaaaaggtaaagatcattcaagaaagattgcgtgtggctcagtctcgtcataagagttatgccgacaatcgccgcagagatttaagttttgaagagggagattatgtgtatcttcgtgtcacgcctctacgaggagttcatcgttttcataccaagggaaaattggcaccgcgttttgtgggaccttataagattgtcagtagaagaggagaggttgcttatcagttggagttacctcaatctttggcaggagttcataatgtgttccatgtttcgcaattgaaaaagtgtttaagggtacctaccgaacaagctaatcttgaccagatagaagtccaagaggatttgacttatgttgagaaaccaatccgtatcctggaaacaagtgagagaagaaccaggaatcgagttatccgtttttgcaaagtccagtggagtaatcactcggaagaagaatcaacttgggaacgagaagatgaattgaagtcagctcatccgcacctgttcgccagttcttccgaatctcgaggacgagattctgtttaaggggggtaggtttgtcacaccctgaaaattcaaaatatatataaattgttgtttaaatggaatttctagaatttattttaaaagtcttgaagagaagatctaagtttaattaataaattccaatataaaattgggccagataaaatttcattaaatactttgcttaattctataattcctggatttttctgggatttatttgagctaagaaagtatttttaataaatggaattgcatttaaggaataatttaaattgaaaaaggttttaaaaagtctcttttggctttgggccgaaagtcggcccaaaaccgttctctctctcctcggcccagtccggcccagtccgcagccgcccgcgcgagcgcgctgtcgctgacaggtggggcccacccgtcagtcgtcgtctaccttcggccgccgccgcccgaaaccctagtttcgcgccgccgccgtttcccttccaaatccggccgttcctttccttctccggctgatttgttagaggggaaacaatctccgggatctcctctaccttttctcctttggaatctttggttaaatcgctttggaaagcgtcggagacgagttcgattcggatcggttttccctctctccaagccgaaggtttccttcgccgttgccgtcgccgtgggccttcgccgccgcctccgagcccctttaaaaggacccccggtgtctcctctacccgtcgcccccctcgccttcgcttctcgtcgccggaagagccctagcgccgtgtgccctagcttcgccgtcgccgccgccgcttcagccgtgctccgccgtcgctccagctgtcgccgtcgctcgggaagaccgccgtcatgctcgccaagtcgccgccgtcctcgtccgccccttcgcagccgtcggaacccgccggagctttgtcgccgtcgacaacccgaaggtagccgtcgcttccttctcgtcgccgtcgccgtccgttgcttctccgccgtcgttttggtcaccggtgtgttcgccgcgttgtcctctacgtgctggtgccctctgttcgtgccgtagcgccgccgttcgccggtgagtgtccgccgcccgagccgtcttcttcgccgagccgccgccgtcgtcggtgatgtcattgttgacgtcatcgggatcctctcccgtgagccggtcgtggaccgatcgatctcggccatccgatttggatcggatcaatctcggccgtccgttcgcgtgaaccgccgcccgtgcgcccggtccacccaaaccctagcccgctgacgcaataatccttcttttccttttcaaaaataattcattattgcgtcataattcaatttaaaccgatttaagtgttttaatccgatttaatctttaaaaattcataactaattcatcttagctccgatttagttggttcaagtctctaaatttttctaaaattgagatctacacattaaaaatatccacatgtactgttcatgcttgtttatgtgctgttttggtgattttgctcttttctgcttagattccgtcgtttccggagagtccgttttcgcagaagaagagtttgaagagttccaaggccagcaaggcaagtcacacagatcccaaacaaccctttgagcatgttgatcctatttaaagctattgtttctattcaactattgcatctattttcgaatgtcattgggtggaattaacctattgattgttataacccttttgtacttgattaccttattccttgataccttggggttatattaatttgactagttgagctttatttatattggttcaactagatattagatataattgcttagccctgcttagaaacattattacacttatgggataactaatgactcactattatttcatgatggcttaatgatagttcacgatggtcgatcgtgattagttaattaattaatgtgccaactaaaacctgataatggtgggttgtgggcacatggttttgatggtcgtgctcatgacaattaaggaccggttcacgagtttcggttgtgaaacatttatcgtgccaaccacaagccagcatgggcaacggctttatcttttgtatagcatggttcattgcggggcaccagactgagaagtggcggagataagcccacgggggtcgctggggagtccatgccttgttttataagggggtgattatgatccaggaaggtgcgctgcagtggattgtgttatgcgaggggtattgtcacaactcctttccgagataccgtggtggtattgaggcacatggtgacatgatgtggggttgtgtcttgtgggtacagtggtacacctctgatcagagtaaaactattcgaatagccgtgcccgcggttatgggcgggtctaacaatgtctttcgtgattagtctcacacctctcatcattgtaaaagatgcttaaactgataataatttgattagctcctggtttggaatggtacattcctggtttggagatagaactgtgcagccgggtggttgttcagaatggttgggcctatacaacagggtatgttgtatagcgttggattaatattgtttaattattacttaactgtttcgttaaaattctcaaatgtttgctaaatgctgcttttgcaaatggaaccctattatgccatcctttgttatcctgtgcacttgcatatttgctgcgtggcttgctgagtatgtcatatactcaccttgcaatcattcatcagaggaagagttctacaatgaggctgatggtgtggaggattaggtgtagccttggtcaagctgcctgtggagtggagccgtctgcgccgtttatttaatttccgctgcttagaactttattgattgagaggaactatctacctctgtaatgacattttattcgcttattaattagagtaatatttgcactctattatcaatttgttattgtgtgcctcggctgattcctggacgagggttcacacacatgtaagcgtttggaattttggatagaaattccgggcgtgacattgactcccagtccgacgtagtaatcttggaaatcggcgctgatgaactgggagccgttatccgttatgatgcggtgagccaatccatatctgcaaaatatccccttgatgaatttgatggcgttgtcagccttgatttcccccgtggatgttgcctcgatctatttgttgaatttgtcgattgccacgaataggaatttgtagctgccctgtcctcgtaggaatggaccgagtatgtcgagcccccagcatgagaacggccagtgagagggatggtttgcagtgcttgcgctggtagctttgtgtgtttgctatgaaattgacaaccttcacaccgttgtaccatgtcgcaagcgtctttgagggcggttggccagaaaaatccttgtgaaaggcttttccgaccaatgtacgaccgacggc

SEQ ID NO: 6391 - DNA, 2167 bp, Oryza sativa
atgttctcaccaaccgggagtaaagatcttttcctgctatttccaaattctttttaaacccggttagggttaagaaccgggactaaagataatagcactgaattttgaatttcattacatatgtgtttctaaaatagtaaataatacattacaattatttaaagtcgaacaattaatgacaaaaccttcgaaaaattattgttgtatgtcgtagaataagtggataatatataataagcacatgaatgatttaaaattgttaaaaattctaataatcatatatatttagcatatgcatgatattaaattgttaaaaattctaattaacatatgtaaatagcatgcatgatttaaaatttataaaaattctaataatcatatataattagcatatcatgatattaaattgttaaaaattctaattaacatatgtaaataccatgtgcatgatttaaaacttttaaaaattctaataatcatatataactagcatatggattatatcaatttgataaaaattctaataatcatacataattaacatatgccatacaacaattgatttgtatggatattcaatacatccaaaatagtttacatcgtgtacacaacaattacggcaatacatcggcggtgacggttgacagcacgtactttctcctcactattgttccttccttgtgatcgctacgtgagtaaggggtgtcttcatttgataggaggatgctagggtcaatcatcaccgtgaaagggggttgcccatcaaactgattataatcctcgtcagtcttgtcctctactccgacgatttttctttttcctgggagaaccacgtggcgcttcggctcgtcaggccctttgcccttttttcctttgctagacatgtccttgacgtaaaaaacttgcgttacatcattggcaatgacaaaaggttcgtccgagtatcaaaccttgttaaggtcaaccgttgtcatcccactgtcatcaatcgttacgcctccaccagttaacctaacccattggcaccggaacagagggaccttgagaggtccatagtgaagttcccatatgtcctcgatggcaccgtaatacatgccagttgtaccatcgtgtcccatggcactattctggttcgtgctcttcatgtcttgggccctcgtgtagaatgtgtacccattgatttcatatccctggaatgtcgtgatcgagccagatggtcctctcaccaggaaggctagtttttagttaatcgtctcgttacccatgagatgttgtcgcagccacgcggagaaagtattgatgtgatgccgtgtaatccatgcatcggacttaccgatgtttctggcgtgaactagagccaagtgctcctcgatgtagagagccaccaatgaagattgttgcagaaccatgaaatgggctttacggaataaattgttgtctaccgtcattattgctttcgttccgagagtcccctttccccgtagtctcccttcatggcgtgattcaagtaccccgattgggcgaaggtcttcgataaattctacgcagaattcaatgacctcctctgttccataccccttggcgatgcttgcctctggacgagcacggttacgaacatactttttcagaatgcccatgtacctctcgaaaggaaacatgttgtgtaggtacacaggaccgagaacaccgatctctttgacaaggtgacaaagcagatgcgtcattatattgaaaaatgaaggtggaaatatcaactcaaagctgacaagacattgcaccacatcattctgcagggctgctaatctatccggatcaatgaccttctgcgaaattgcgttcatgaaagcacatagctttgttattgttgcccggacattgtctgggaggataccccttattacaactggtagcagctgtgtcatcaacacgtgacagtcatgagactttaggtttgtgaattttttctccttcgtgcttattattcgctttatattcgtggagtatccagacggtaccttgatgctctccaagcattcaaacatactttccttttctgccttaataagagtgtagtggctggactcaagtaatggcttcctttctcaattggttccgggtgaagatagccgggttgttccatatgcttcagaccatgacatgggggatc

SEQ ID NO: 6392 - DNA, 35442 bp, Oryza sativa
gccacacaccggaggttctcgatctcttcgagccggtgtgtgtccaaacacttccgctcgcggttccggaaaatccttccgaagctgtctccgcctgaaccggtacctcctcaacgacagccgtatgaaccggtacctcctccacagatggtggagttggagccgatccggaggcaccgtcaaaccccgacatgtagttggggtcgaaatcacccaaggtgaacgacggcgactggtatggaaagttcggatccattctgaaaatttaaaccgacataaacaaattttcgaatatttattgaattcacaaacacaatacaaataatacacaaatttgaatattacttacatctttccaaccgcgagctcttcaaacctctgcgatcaaactgttgaactacgaaactaattttgatttttgacaaaatttgagcaaattttgtcaaaatcaaaaaaaatgcacacttgagaacaaagagagcacttaaaacacttgagagcacaagatgaggagtgtgggatgaggagaaatggctggggttcatgccctatttatagggcgaaatttgagattttttggaattttttcgaaatttttatgaattttttagcctcccaacggttattttcaaatttgaacggtcaaatagccgttagtgccacgtggcgccttcccattcgaccgccgcccgcactgacgcactgtccgcgcctgacgggccgccggcgtgccgtgccgtgccgtgccgcgggccgtgccgtgccggcccgctacagtagccgtgccgtgccgtgccggcccgcgggctcggccagcggcccaagcacggcacggctactcgtgccgtgccggcacggcccgttactgtagcaggccgtgccgggccatgcctgctacaggttcggccatgccccgggccgcccgtttggcccggcccatttggccacctctaatggggccacgggggaggagagaggcaaaagcggcggcagagatctagatggaactatgggagtcgtgtctgtgtcatttctcgtgtggagccgagaggcaaaagtgtcctcgtcgcgctgcgccttgagccgagccggcaaacatccttctctctggcttctctgctgggaacgagtcgaactcgcgtgcgttcgatcagtcacttgtcaccagcgcccgcatttccgtcgcgatgactccacctccgcccctgctctggtcaacgactctcctcccctgacgtcactttgatccccttcacaagcctgagcaacccatgtgaaggacgacgcctcttggtgcatcgcctccaagccatcaactgcggccagtatactggaggtgatgaggagtctagaggacaggtttgtgttgatttcttccctcccttctttcttttgctcaggtgaaaaagaaaaatcccctttatttatactccattaggtttgttttgcttccgttactggcgcactgagacatgagcttttgattctttctagcacctacttttggttcgactggatgacgcaattagccaaacaatagcaatggcagggatgcaagccatgacagccacgcatggaggcaagcctatacatcccaatctcttttatatcatcttatatgtctgttagggtgtacgttagattcaccatgaaagaatgtactagttacaccatgaatcagaaaattaatgtttggcgtttgtttgttaatggctatgcaggtttaatggactaatgatatttgtattagaattattcaaaagagtaaatctcttggtggtaaattcaggctagttgcaatgtactgcttctaacctctaaggctctaataatattttttcccagttccaccttaactgttgcatatttacttacttaggttcttatcctgaatggatgttttggttttcagggagcaacatctgttcctcctacgattggatcttcaaaaagaattgttaggagagtaaatactcagacctttctcagctttaatttgtaatggtctaaatactcaatttgctgtttttttgttcctctgtttcatattgcaggctatttcattgctgccgcccactactcttccagctctgccgacaaccacacctacaagagctacagctgaagcaacacatagggcagaggaggcatcacaggtctggcttggatttagtttgatgttgcactttgtatagctatatgcaggttcactgattttttatatcgttcaaacatctaattcagcttttgtactaaatgtacctcacattctgaataattatgcaaaattgtaaagacgttaaatttgtctacttccgcttcagccattacaggttgaggcaaaatctgttttgttgatagctaatatggttgctcaattagtcccaacaagtagttttcatattcatatgaataactccacttcgcaatatttttaattaaaatgccaaaatctattctatcatactgatgttacgtttacatttcaattggcggttgtccccaacctcatcaatttgtcggttgtcacatccaaataggtaaattcttttctctgcaggacaccaaggccccaagcctcaggttctgtaaatgatcctgattggggtgaccagtagaagtgaggattgtgcaactgttattcaatttgtgtaactgtgttaggcgttcccgtcctgctttgagcaaagccatcctaatttatatcatgtttctcttgattggtcgcaggtttggaattatgatgagcatgtgcatgatgatttgcaggtgattccgagcatatcacgcgcacctagcaaagtgtcggtactgattacatatttgatttttttaaaaccaattggatacattcttctctgctagatcacctcatcggtgagatgtacgtgcagttccaatttgctctgctattacactttgtttcaaaatagctataggttttgcaggtctgtttgaatagatttggaataccacaacgcctacctctaaaaacacaataaaattactgttcactttggaatcttaaggtgcagaacaaaggtttttaactgcaatacaaattttgtgcaattccaaatgttttccttgacgtactaggtgagatttttaatcacggtggcctaattgatatatgtatttgagactggcaaggatgtggaaagcaagcattcatgcaactatctgggcttgtccaattaaatcaaaatgatttcttgctattccatttaattaatgttgaagtcacgtgaaagttctcttagattatgggtgtgttcggttgagccgtggcttttgaaaaagctgatgtgagctgtggactgtggaaaagcagctgtgggaaaagcagaaggccgtttggttagagcagctgtgaaactataggttatagaagaaatacctgtaatgcctctaaatgcatgtgggactgtttatatgcaaattactcgtgaaaacctaacccgttcaatattacgtattttaatggctaatctggaaagaaaaaaatatataagtttttcatacatcaaagtaatatggtcaacataaacagaacaaaagataaatggttcatacaatgatgccatatctcaaaataacaatcatcctcttgcactaactgttggtatttcttaacgacattactagaaatataattctcagcaatggcatagaaatacttctggtatattatggttacagagttcatccgcaagcccacggatatactattatagcatttcacccgagagtatttcaaggatatcatatttattttatctcgtgggaagatcatgtagagagaacttgacaaataatttatatataacttgtgattatcaaagtctaagcaggggttaataatccaagggtagagtgacacacaagcagagagcttttacttgaggtgtgtgttgaagtgaagagagtgaagtccttatataggctgccaatgacggttctggtagttggaatggtcggaattgccctccaaccatcattgggaagtgatccacgccgtccagccaaaacctggatccaactacgctaggggaggttcggctgaaccagggggcggcccaacctgacccaaattcggcaagtggcctcctttgttgcttcacttcttagacttgtgaattttggcccaattcatcgtgttaattctgagttcttggcccattcatacataagcctggttctcgacatcgtccgattgatttatcgtctgtgttgatgccaattctcctccactttatggttattctctgcaaaaggttagtaaacctaatactagtggaatattattattctaacataaatatgcattgtaagcatcactagttctcgtctattttggtaatattgacggtcaaaactgatcgataacgaccgtcaacactaactaaccaaagcatcagctatcctagtacgaatagtattcatggtatcatcattctctacatctgcactcacatcggctgttgtgtcacttgtatcttgtagtaagtagtccacatcagtatcacatctctcaaactccttatcacgtaaattgctatcacgaacaaaattatgcgaagcaagacaatccatgatgatatgcttctgagtagtaggtgagaaacttggtatgcccttcaaaatacgtcacttttgcatcaagactctaaaatacctttcaataacatttcgaagggaggaatacaagaaattgaactaggaggtcctgaacgatgccaaaattctggtatatggtatgtggttccttcgtaaggtgcaagatacctattcggtttggataacccgagtcgacgagataatattttcctataaaactaagttagtaatgcaaataataatactagtgtacaaatatcaaaattaatgaagtaaccatttaaacctgtaggagagatgggaaatgaaggaaaattttccaatgcatgactgaggatgcgcgagtcatgtgtagaacctggctaaccagcatccgcaaaggtaaacctcatgtcaaagtcacaaatagctagcacattctgagatgtatatccatggcggcatgtgtggctaatagttttatccactggcactaccactggaatatgtgaaccatctattgcttcaatcacatctttgaagtatggccaaagatgtccttatgcatgcttctacaaagaagtacttttcatcttgttgggatgtcctatttgttgcgaatcacattgttgggttatcctgtacaacaattaccccaaagtatttgggagagagaagtttctgtgccccaaagaatttgaattttgataatgtatataactgactcgttaattcaaggtcctcttctcctaatcgtttttccatgtgattcgcaagggtggggcggcgtaacccccatcttcccattcctatggagtgtatgtggatttgtcatgtcatgcttgcaagttcaacgtaattatttttttgtttaggtgattaatggaattcccttgtacgggagtttctttcttctgtatcaggcttgtttagaggagaaagggaagcgagcaaaatttgtgggtgaagaaactaacagatcgaagtccagtccctggttagtgtgattttatttttgcgattgtattcattagctccatcactgacaatctgcctgtcatactacccaactaaaagatattgatagatggtatgatgtttcatatagtggttagcaagtaaatcaatgttatattcaaaaatatttgccttgctacccaactaaagcaattttccttgcaggttcatgaatatatgtatttgatgtagatgtaatcaaatagattgatgttttgatgataggcaaaatttgctacagggcatcgaagaaacgtgtaattagctggtggacatcgcaagaatgagaatttgctgttgggcatcacaaaaaacgtgtaattagctggtggacactcgcggacttattttattatttccggtggatttggagagagaaacactggtgagagtacgattttgcccctgtcattgttccacttacaacaagggagtgagaaggcgagcaccgcgtggtggattggattggattcatccccgcaaaccttagacgctgatccccccacttcatctccgactcgatcgccgccggtcgccgtaccgtacaagcatgtttccgtcgtttctactctgggcactctccctcgccggtcgcaaggctgcgtgcccacctcacccccgtgacctcgtcatgctcgccggcgcgcacagcgcaagccaggccaccaccatcctgttgtcgtcccttctctaggcactctccagctgcggcgtcggtggcatgaacctggtgtcacctaccaccactgcctctggtggcgacgcatggtcggaatcaggatatctgcaaagcccgctccttggcagatcagcccgctggtgcgagcgcggacatcaagttggggtcggattcggtggcttcggcgaccgctcgcgaagactttgctctcctccgtgctcgtcatctcttgaacaaggtagaagtccaggcagagcaacatcacctcgccatgcacgacggctacgggggagtgagactggactgggtcttggttcgaaccagacacagtctactgtaagcgaaacgatggcaggagcaaaatcgtactctcactagtgtttctccctccaaatccatcggaaataataaaataaggccgcaagtgtccaccagctaattacaccttttcttatgcccgacagcaaattctcgttcttgcggtgtccataagctaattacacgttttttcgatgtcctgtagcaaattttgccttgatgatatgaccaggctgccgctaaaaatgtgttacaggtaccccaaatctcacaccatattatggcacttaataaattaagtagatctcatctactataaagattttttagtggccatgtttaatgaaatcacgtggtaaagacatattcatgttttttttagaaaactagagcttcacatagacacatacctaatttgctgtcactggtaagcgtgttgttgttagtggattttacagttttctaaagtttgaaattaattcagtttctttttaatgggtttctcattgatatagtgacataatcataagaatttccacattttttttctaatcaaagtttcatatatttgtgttgtacatgatttcagtcgtctgaaatctgcatattgtttttcgagaaactgggcacaagaggtatgcccctttacatctaaaagggcatatatatatgtgtttcaaactagtgtattacttgagttcattttttgagtggattatgttgggatatgcgtaggctacgataacataaatcaaaattttctatcgtgtaaaccaggaaccatgcaagtattagatcatagatcgttaccactcgacacgctgcacagcggaagaagacgctaagaagtcgaaggaactctcgcgaagtagcgcgcatcgatgtagagaaagtagtcgatcgcaccggctcgaccttctcctcctcgtgcgttctcctcgccgtactcctacgctgatcagcaccgcaaaccagcggcgcctctaccggtatccacacatacagggacggaacgccacgcgcagatatgatagcacccgcgcgtggctagggttttgctcggggagggaagtgacggctagggtttctcacgtgatacaatacctccgccggtcacacccctcacgaatatataggatccatcactcgggcctccaaggcccgtaggactcctattcggatccctatccgaattaatctcatattggatctccatgcaatccctttattccggcccattaagcgtgcgacccgaacatatatactcggttgtaacccgaaaactcctttcggtccacgcgtcaacagcgttagcataacgtattgacccccgggcatacataaagatcatatcagctgaacctctagtgtatacttgtatgaacccctttgcctcacgatatcgattaagctcaaggctagatatgtgccatcctctaatagctcaatcattcattcgaacctgttgatagattatataacttgtgattgactcctcaatcacctttggcatggccatgcacttctataatctacaacatcgaggggcccagagatatctctccataggaggggcaaatcccatcttgattattcatatcccactacatgtaattcatagcatacccgaaaactacttttatagctacccaattatggagtagcgtttagcagtccctaagtaagctactacacatgttgggaaccatgataatctcaggtctaaggattcaacaccaacactaaatgagatcactgatgacacaacacatatggctcttgcagtgtctcatgttgggtctatccaacaacctgttcaataacatgtgtctacattattaatttggtatctctatactatgatccatgagacatgatcatcaattaatacatgtgctgatcatctaaatatatttgttccacatatgatatttgatcagggatcctttagaaatagcaacacacaacataaagagtctcacgaaagaatcacatattcattaaccaataatgagtttatctatttcaagaaacaaagtcggataaatatgtaaacatagtgtgtgatacaattatctctatgattggctctagggcatatcactaactaacagattatccagtaataatgtactatactgctttttcttgtctttttcttttatcacatattgagccatggattctttttcaatcattcactatctcactgtgggtagaagacgaaacttcaatttgttttcatatcatttgttcctactaactattatttttttagtccagaaaattaggtggcaggtaccatggtatcattatctagcttgcatgagccaccaataatctcaaattcaagagaacctgcatagcgacggcacagtacgatttattcaaatcatgggatcaaaatttaatgcagtggagttgtatgttcaaaaataaaataaaataaaatcagcaagtgttgtttaattaaccaattgttttcttccttgaagcccctgtcttgatgaattaaaaatcccctaaacagtcagcaccgtactacatcacgatcacaacaatccaatcggatttgatttcgccatcctactcaattatttatcgtcacaaacaagcttccccacatttcttttctgggagccacttttttttcaatgattatgtggaaatcctagtacatcaccaggtaatcctttttttcaatggtaatcctagtacatcaccaaattggttggccgaaagttactagccatccgattccaaagaatgggaaactgcaccaaggttgcaaactttttattgaaaccaagatgtagaggtgcaaatcgatagggaactgtggcgttgccatgacgattgtgtatccttaggcctcctttgacgtacacactgcttgataacatgtaatcaccttcggttgccttcacagaaatgacataattggaggtttgttgctgagctgtaaattttggtgtgggtttcaccaggctcaataggaattcgccacggagttcaccgctgaatcagaggagtttgagcttaacccgaacgacaaatcttgcatgcacactgcttcaaggaaacaataggtagaagatacccaaatctagccacccataaagacccaagaacatgaatggtggcgaatgaactgctgtccggaagacgaggcagtcgactagcaagctgaagacgatgttgtcgcgccggaacatcaaatcagagctacggggagctgttccctccccacccatccagatgagcaagccggcgctgcttagaggagacaatttcaatgtccgattccgccgcaaatcatcgattcccacttctccatcgccaccaaccgctgccaccgccgtctactccagcatccatgagaccatgctagcaaaagcccaactcgggaagaacccaagctgcagtgaatacttcacaacaaagaaccgacctaactaaactagtacggggggtggccaggtccctcctttgaccctcgccggcggtctggaattaacatccaaaaggttgcaacaaatgtgaaaaaagaaatctgagatatgcaacaatatgacatgtaccaccacacaaaaaatcagctcaaaatatgatgtacccaatgagaaaaaaaaacaaatttgtactccagtaatattcaaacagattatgttactattcacctgagatttatctttttattctctcactgtgtacgtcgtattgtgaactgattttttttagtggtggtgtatgccaagtgttgcacatatcataatttgtttacattttttgtgacttttttggatgtatttttcgaggttggtagcacggtagcacattattgtgcagtagcacctgatattctctctgcttagacggatatggtggtggtgggatattctctccacttagacggatatagtggtggtggtggaggaatgatggtgagcggcggacattgacggtccactactggcgtgaagactatgagagccccacaaagaccccactaaaattttttaccatatatagataggagggaggactgtaactatatctagtttgctcagacctactgctatttctttctgaatccgccactattaatggataggaaggtagtagtggcacatgattgtagggttgaaggagggtgagtagggtctaggacagggtatggaagtcaatagtggcatatctcgttgcctgagcctcgaaggatgggaaagattatgggacatgggtatcttgccaccactcggcttgggggcggagtagaagaatagatgtttaagattgggatggagggatggggagaggaagagagacctaggcaggaaggtcgtgatgatatgacttagtgacgatatgatcggtcgatctggtgttatgcgttagtggggaagagagtggaaggaagaaaacatgaagaaggttaacatcatagcatcagaattctttgtgtaatctggtctatctaaaagtgacttaaatgtgtgaataattttacattcgctccctttgtcgtagaaaaaaaaatcatatcccaataaaaagacagggagaaggacataagactaaaatatccctcattactactactttggtccctaaaacaaataatcttttactggtaggtactaagcggcattaaatagattaaatttctttgatttgtacaacaaaaacagctataggagggtaggaattaatatatttttttagataaagtttttatctttggaagttataatttattttgggatggggagggagacaactacagtgtttcgtttggatcgttctgtctgttatgcccgtgatcttttcagttcagaacttcagagagcgataaaactgtgggggcaagtgctctggcgccggcaataatggaggcggcggctagaggcaacaagaagctgcaggagagggtgcccatccggcgcaccgcgtggaggctcgccgacctcgccatcctcttcctcctcctcgccctcctcctccaccgcgtcctccacgacagcggcgcgccatggcggcgcgccgcgctcgcctgcgaggcgtggttcaccttcatgtggctgctcaacgtgaacgccaagtggagccccgtccgtttcgacacgttcccggagaacctcgccgaaaggtaaggtgcccaagaattaatcaggaatgattcaagccaacatccagaaaaaagaagatgattctgacgagctggttggttttgcatctctttcttgttgttaggatcgacgagctcccggcggtggacatgttcgtgacgacggcggacccggtgctggagccgccgctggtgaccgtgaacacggtgctgtcgctgctcgccctcgactacccggccgccggcgagaagctggcgtgctacgtctccgacgacgggtgctcgccgctgacgtgctacgcgctgcgggaggccgcccggttcgccaggacgtgggtgcccttctgccggcggcacggcgtcgccgtcagggcgcccttccggtacttctcctccacgccggagttcggcccggcggatggcaagttcttggaggactggacattcatgaaggttagctatggcaaccgcaacacctctcagtttctttctctctcttttttttttccattttggaagtactaacgaatttaaaaatataaggaaacatgataaccacaacacgtctcagtttctttctctttttttaatccattttggaagtactaacaaatttaaaaatataaggaaaacatgataaccacagcacgtctcagtttctttccttttttttttccaatttggaagtactaacaaatttaaaaatataaggaaacatgatttgactcgtgctctaaattaaaatcgattagatgaaatccgggataccgatatttaagtcagtcttataaaagaagcgtcgaatgggtaggataccgtcaagtgattaatcctaatatggattattagtcagaattatacggaatttcaacgttcataaaacaaataaatatatttgcttggccgtccaccttgggtgatatttaagcacattagtacccttaagtactttaaaatatttaatttaaagtttctaaaacaacatgtacagatttattttacaaagtgtaaaaatgtatttatttattatatattataataaaaataattaaatatatatttttgagatcgttcgtaacttcaataattatgtaaccgggagggagtacgtaaaccggtcatattgccagagttaaatcgtcgattgatctagaattgaatgccattgccatatatgctcagtgtaacgagctttagttcggctgctgctggagtcaattagtagatcggacgattagtcgcgaatcagcctgattaattgggccagcccggccattttggcgtccacgtcgccacaactcgtcacgaatggcagagtcgtatcggtttgtcttccgtgtaccactgtaccagtacagttggccttataatcgattggaacggccgtcattttccacactttttcgtaagcagaaatgcagcgtttcgatatgtcttctttagctattctgtgagcttccttgtttagccaaaccagtgttaaccacccttgcctctgaggaggagtttagtatcttttagctgctgctccttaaatacacatatctcgttgctagtagggattaatttattaatgttccactgcaaaatttccaaaatttccgaaattccaggtctactggtccctgatagaatattatgttggcaaaagaaatagttttttaattacacatatcttatttaagtttaatcaaaatttgttcaaatttcaacttatttcggtctgaaattttgacaatttcctgaaatttgtttctatcggttccccggtagaaatatatgcaaaccggtatgtagaaccgtggttacaggatgcacgcttttatcttggagtccaaaacagcacaagcgaaaggaagggcctattcagattgatggcattttcaactataccgttatttggtaaaatgtataattatgtggctacgtttagtttgtaaccaaatattggcaatgtgtatagaattttggcaatactattaagccaatcctaccaaaattttggcaacgttgccaatttatcaaaattttagcattgccaaattttgataaggtttattttggcatcaatctgaatggacccgaagttatcattgagtagtcatggttcctgatcttaattcgttcatggccatcttgtttatgtgcaaacatttcagagcgagtatgagaagttggtccaccggatcgaggacgccgatgagccttcccttctgcggcacggcggtggtgagttcgcagagtttctggatgttgagagggggaaccaccctactatcataaaggtatcgatccccacctgactatataaaaactttcaaatatggattctggtccctccaactccaaagtgtgtcccttgcacagagtttctcaactcatttctcaccatgaccctgaacttctgtgcttaacttggtttggttctctgctggatgatttaggttctgtgggataacaacaggagcaggacaggagatggcttccctcgtctgatatacgtctcaagggagaagagccccaacctacaccatcactacaaggctggcgccatgaatgccctggtcagtgctacatagctctttttgttactagagaaattttacggttattgagagagtatatgtagataccgaaattttgcaacacaaattttaatacatcgaggtactaagttttacaccagaaaatatggtacctctcggtacactatttgttactaaacaacatggaaagttcagacaatgtttgttactcaccaacacggcaagttcagacactgtttgtgttactcatgattggggaagttcagatatttgattgttcttaccatgattttttgtcagacaagggtgtcagcactgatgaccaacgccccattcatgctaaacctagactgcgacatgtttgtaaacaacccccgggtcgtcctccatgccatgtgccttctgttaggttttgacgatgagatcagctgcgcgtttgttcagacgccgcagaaattctacggtgccttgaaggatgatcctttcgggaaccagctggaagttagtttgatggtacacaactagctcttgcttgtacgataatttatttaatttagttgatgatccaactaaactaggttgatgatcttgtgtgattttcagaaagttggacgtgggattgcagggcttcagggcatattttattgtggaacaggctgctttcaccgcagaaagtcatttacggcatgagacagggcgagaaggcaccacaggtgaaattgggcaaacactgatgtgattgtcatacattagggctccatttggtattgcggtagatcataataatcacgtttgctgcaaatgttttttgacgtttggcagttggccaaccgcttttctttttaattatctacgttagaaatgataataattataattatctaatcataatttggtatgtaaacacaaacaacaacaattattagtattagttttcatgtcagcctaaactagtaagagaattcaaatttaattcttcaggttattcatctaacaaggagctccatagtaaattcggaagttcaaataattttaaggaatcagccagggatgtcatttatgggaacttgtcaacagagccaatagtagatatatcaagttgcgttgatgttgccaaagaagtagctgcctgcaactacgagattggcacatgttggggtcaggaggtacagccattgccacatgtctataggatgttactatgcagtttaatttactattctatatgtttcataaatgtcattccatatattcacaggttggttgggtctatggatcactgacagaagacgtgttgaccggacaacggatccatgcagcgggttggagatccacgctgatggaaatcgaaccaccagcattcatgggttgtgcaccaaatggagggcccgcctgcctaacccagttgaagagatgggcatcaggttttttagaaatactcatcagtcggaataacccaatcctcacaaccacatttaagagtctccaattccgacaatgccttgcatacctgcacagctatgtgtggcctgtgagggcacctttcgaattgtgctatgcattgttggggccttattgcttactatcaaaccaatccttcttgccaaaggtactactgcatcactaaccaatgcatcggttataatcttctgtactctccttgccttcttaacacagtgttgcacctcatttgcatattcaaagataaaaaaatctttccaattgaatggctagagagtgaggtatatatgaactattaactctactattgcagacatcagaagacggtttctacatcgcattagctctattcattgcctataacacatacatgttcatggagttcatagagtgtgggcagtctgcacgtgcatgttggaacaaccacaggatgcaacggatcacctcagcttctgcttggctactggcatttcttaccgtcatcctcaagaccttaggcttctccgagactgtgttcgaggtcacccgcaaagacaagagcacatcagatggtgattccaacaccgatgagcctgagccagggaggttcaccttcgacgaatcgacggtgttcattcccgtgacagcacttgcaatgttaagtgtcattgcaatcgctgtaggagcatggagggtggttttggtgacaacggaaggcttgcccggtggccctggtatcagtgaattcatctcctgtgggtggctggtgctgtgcttcatgccattgctgagaggtctagtgggaagtggtcgatatggcattccttggagtatcaagatgaaggcctgcttgcttgttgctatattcttgctcttctgcaaaagaaattaattgcagctggtgtgcagcaacaattagtccatactattatttgagcatgcaaacactaggtttcatcttcatattattatgtccgcaaacgttgactaagctctagaaaagggaacaattcaatcactaattcgaagcaaaaactggttgtttactgtaagagagaatctactcgtccatggcaagttgtcccaccggtgcaaacttgatcttagtggcatatatatagtagatttcctcttattgtacggcctgtatgcatgcatgaatccttcaaagtagaagcattggagcggtcccgtgcaaatttattttcttggatggatctactattataaaaattgaagatgtttttgctgatactttgatacgtcatccgtgtttgaatcggttgtaattttatgttttatttttaatctctatctctacctaaaaagaacaagaaatttccataatcggtaaaaaggaaaaaaagtccgactaaaaaggtaaaaaaagggaaaaaaaagtccgactcaaaaaccgataaaaaaaacttctgtcgtgaaaaaaattgtccgactcaggtaaaaaaaggtctcgccagtaaaaaaagacaaagaaaagtccctttttttttcatcggtgacttttttcacgcgaaatagttttaccgtacgcacgcgctattggttttttcgtctggttttttaaatccgatctgttcaccacgcatctccctggtgcttttggttttttcatcaatttttttatcaccgggtttttatcccatgcgtttttggtttttcttgtacgattttttaatccgatttattcgtggcacgtctaccgagttgaaccttggcgtcacgctggcgccatattaatcgtgcgtttttacttcaatttgattgcaaaaagaaatcgattcccactcatccctcgtcattttctccatgattttctgggctttatttcgccggatttaatctaatggttgccgatgatgacagcgatcttccccaattgtttttatcctgagttttacgctctgattttgggtaaaacaaccaattttgggtgattaagaaagattcgaccggatttgatgggtcgaacgaaacatgccaaatgagggaggtagcggaccagcctagggctgaaaactgcttcactcgtggctgggtggaaacaagaaggccaaacggagggaggtagcgaactggcataggattgaaatgtaaggaaggcttttggcccaaaactcaagaaagattttgggaaggaatcgggcggcgccgggcaaaggagggagggaaggggagcttcacggggtggcggtggattgggaaggccggcgcggcggtgtggagaagaggaggccggcggcggtggggatagagaggatggccagcgaaggtggggatggagaggatggaccggcgtggtggggaagggcgacacgaggagaggctgccgcgggcgacgccggcgcagccgtgctcggctgagcgtcggccgactccgcgtggcggtaggaatggagaggaggggaaaggttcgacacggtggggagctcaatccggggacgccggcatgctgcgatggacaggagtcggtggagaggggatagagactcgctcgcctgccggctgccacttgccccgctccatcggtcggggagagagaggggatagagagaagaggggagaaagagaggaggaagaagaggagggtgagatggatgacatatggggcccacgtgggtcccaccatttttttattattttctgtgtgagactaacttgtggggcccatgtgggtcccaccacttttttattattttttgtgtgagattgatatgtgggtcccgcagattttattatttttccagctcgaattaccacgtaagtgccacgtcaatgccacgttagatgaagaccgagtcaaattagccacgttggcgccacgtcagtcaaaaccgccctcaaaaccgtcgagggacctaatctgcaccggttttgatagttgagggacccgttgtgtctggttttccggttgagggatgaaatcggatttgttgacaagttaagggacctcagatgaacttattcctctgggtagcgacgcaggggacttgggagaggcccacgagccagccacatcggaacaagcaggggacaccgtagcacctgagcccagcgaagaggtctccacctctgtcggctgggagagaaataagttcactttaggtcccttaatttatcgtcgagtttgaaattcatccctaaaccaaaatacgatataactcatcccccaatttataataacgtatcaactttgatcctggcggtatagcggccgcttttggctgatatggtgagtgggacctacctgggctccacatgtcagcggacggagttaggggcggtgcttgtcttcctcttctctagcgcggtggacggcggggcagggacggcgctcggccttcctcttctctagcagcgaacggcgggggtagggtggactgtggcggatgttgcacgatcttctctatatcaccagcccatcccgcgactccgccttcgaggcttcaacttgtccgacaacaacgtagttaaattcatcctcaccacgtggttccccttcggcgccagcagcaatgcgtcgcagccggtgacgcagtccgtggtgtggttcgcgaagcagtcgttgtccggcgagacaaccgttggcactatgcattccgtgctcagcgtcacggtagacggccagctcgcgctcaccgaagtagatggccgcatgctatggcgggcaccggtctcccggctgatgcgcggctccatcctcgtgctccgtgactctgatagcctccggccggttcgtcggtgacgccagctgaaggatcgaacaacaagaactaagccaaccaaatgggggtgaatggttgtagtatacatacatattatacatacatcctagttatattattacttaactaataccctctttccgatgccctcctggtgcttcgagaagccacccttgattgccgagttccttacaacaatccgtcatgaccatccaactgtggctaaatacggaggagtacccgccccaggaaattaacttagtactatatacacgcgcggaggaatacccgtactgagccatcaccatcagcggcccacctcgcttctgcagcatataacctcaaataatgatatgtagtaatctaaacaccatgcttaaattaccaaatgctactctaatatcatcgtcatgacatagagtcatcataaatacgatcattatacccacaccatcgcatcttccagataagctagcatcatgataaatgtaactcgggcatataataaagttggtattcatatactcggatagtaatacaataccaaaatagtataaagaaatattttaataaaagtacaagtcttacaaaagaaggaaaagctactagagctatacccgaattcttccgaagactccgaggattgaagattctattctatttctattccactatactctataaactatactaaacttgagagatgtatgaagcttcttgcttgaggtgtgtcttgaaatagagagagtgatggccttaaataagcaggtaatgacagttatggtggttggaaaggtcggtaataccctccaaccgccatagggagtgaatctcgaccattcccttaaaaccctgaatccaacggagctggtgctggttcggctgaaccctaggctggcccaaccagcccacaacttgccaggtggcctcctggacttcttctcttcgtagacttgtgaaatttggaacaattggtcgtgtcatttttgagttcttggcccgttcattgataagtctgattctcgacatcgtccgattgattgatcgcctgttttgatgtcgattctcctccattttgtgttcattctctgcaagaggatagtaatcctagttctagtggaatatttattattttaacataagtatgctttgcaagcatgactagttctcctttattttggtagtattgacggacaaaactgatcgctaacgaccttcaacattaggagaaggctagcaacggaccggacgccgctaagcgcgactgaccgccgctaagcgcgaccaaccgccggtaggccaacaaagaaacatagccgagatcgcacaaaacccaacccttacaatcaacacaaagcctcgctctatccagtcttcaggagttagggagagagggtgagagagagaacggaactcctctcccccctaggccctccgacgcagccaacttgtagagactaggatgccgccacaagagaatgaaatctagagtgggcttgcaccaattggttgggggtttcaactaggggatgcctaaacgacgtctccaaggagagaaacgacggaaaacgccgccgccgccgtccgtcaaggtctcaaagagaaccgagactgggctttcacccgacatctacacatgagggatgagacggcacgacaacgccctcgggaggggaatgacacttcgagcgtcatcgttgccagcccgaccgaggttgagctgggttttcaccgaccgctcaccacctgcgagtccacggctggcgccccgatgctccaccaccatccatcctctgccggcatgtgggtccactacactagcatcccccaccggccagccttcgtgcgccgaagactgcaccgcactcaccggcagttccttctccttgcaccgtgcccgcctgtgtcactactggcctcgtccactgccggccacgcctcttcgcgccaggtcggtctcccgccaccggccgcactaccgctggctacgcctccttgcgccgtgccgacctccgctgccaccggcggaacctctatgcaccaagctagcctctgagcactcctcccgccgctgccgcgccggccaaatgctgtcatctgccacgccaccctggctagccgcccgaggccgtccttgcctcctctcacaatcgtcgtagcccgtttccagacgtcgacaccgcatccacaccttcctcgcctctacatgctgccaccggcaaccgacgccgcattcacagccgttgccgccgtcagccaccgccgtcgccagccacaaccgccgccagcagcgcctccagccgctactaccaacggccggccggccgctgtcgccgtaggcctcacgccgccatcgacctgccgcgatgggcgctcctactgagagctcgcccgctatcgccgacccatcgccgcgagctccgctgcccccgctgcgagctcgcccaatctgaccgccgggtggccagatccgcctccggggggccggatccggcgcgccgtttacatccctgcctccgtcgacccagccatgcctctaccgtcgtcgtcgccatccccgccgccagccacccccccctcctcgggcagatccggccagagcggcgtggatctggcggtcaccgccaccactatccttgcggccacgcggcttggccggcggccgctcaggcggcggcgaggcgaaggaggaagatggggggagggtgtggtcggagctcgtctcctcccgtgctgcccctggtggagggcgacgcgagagcgagaagtgcaggcttcctctgccttgatccagagacccggtgttgctgtgcatggtttgagtttttcctttcccgcatgcaacaaaatcaccactatgggagcgcgtttggacttccagaccaaaggagagagcaacactatttgtgtagagtcactacaaattgccttatagggacattttcctaatactatgtaggcatttttaaaatgcctttacgatgttttagagacattttaaagaatgcctcataggtgactttttttagtgaattatctctataaacgaaaatgcattttatataatatctctatgccttgcggcatttttgtacatacatttttatatctataagaaaatagagacactttctagatgcacttcgttgtgcaggaactatagcaaatcaatgtgaaaaaaaaaagaaaaaatatcataccatgccaatcttggaattcatgacctcttgagttcataacttttatcttcaatatactaaccatctcaacctcaaatcattatttgtgaatatatgtcttgtattagttatatctagtttcttagcatacattaagatttggaaaagtgcctctacatagctaggttaaaatgcctttacaaatgaggcaatatttaaagtgccaaaaaaaatgtctctacagcataaatttaacaaaatgtgttataaatgcctttgaagtgcttatagattaaaagtattctaggagattttgaaagtgtctctaaactgtaaactgtagaactcctgattttagtggcaaattaaatattctctacaaaagtacgtctatgtaagatttttcttgtatgagtgctccagcgaggattaatggagattaccaatctccgatacctcggaaaaagctccactgtgttcttattattattgcttcttgcttttcatcaactataatttgtagaattgcaaggaaaggctataggttgtaaaacttgggctacactctttaaacctagacacttaagctagtatgcttacacttaagcttgtcccagctgcagcttttcccaaaagctgcttctgctagaagctgcccaaacagtccatagcttctgagaatttgtagttacagattctgaaaaatgaactaagaagtcagaagctggagaagctaggtttcagagcttttccaaattctcagaagctggctaccaaacagctgcttctcagaatctaaagctcccccaaacaggccctacgtataggattccaatttaccaccctctacaacatctttgaacatacaaggcaatcatccttgtgttgcttaaaagcatctcaattgacaatttgacaagtctatggtatgtaagtattacatatcagaaacaccaaattcatagaaattttacatgctatatgccacgccttacttccttaaaaggcatgatatgttataatgttttaatggagtactgttaattacaaaccagcaaacaaatttattgtaaatctataggtagcagtgacgttgaatgtgaacctcccgtgatagcattcagtagtcttggcaatggtggcattttgagttctagtagaccctctaggaattgcaccacctcgcccattgtcgggcggtcaaactcactgtcttgaatacaccaacaagcaactttgcaaactcgttcaacctcctcgagattcacatcaccatgtaattttgcatccaccaaattttcaatccctccattgataagctggcgggcaacttgcataggaaaataggccgaatgacccctacaatattcttgatttgagttcctccttcctgatattatttcaaacaaaaccatcccatagctgtaaacatctactttagatgtaacaacagtcccgctaatccattcaggggcaagatatccaatagttcctcttactgtagtaagagcatgactaaattctctccccaaaacctttgccattccaaaatctgctattttgggaacaaaagatgcatcaagaagtatattctctggcttgatatcacaatgtataatgcaatctcgacaactatcgtgcaagtaagcaaggcctttggcaactccaatagctatttggtacctaatattccactccaaaactttatcattatccttaaatagatgcacatcgagggagcggtttgtcatgtattcatacacaagtaacttcttaccatcttcacagcaaaaccctatcagtttaactaaattgatatgctggattatcccaattgaatttacttcagctctgaattgcttcactccttggcaggcaccgtcaagccttttcactgcaatgataattgagtcatttaggtatcccttaaacacagaaccaaaacttcctccccccaacttctctgaaaaatttttggttgcgcattgcaaatcggtatatcgaaatgccctgatcccaatgccttcctgagcattttccactccacgagaaaaccatttctgttttctcatccaaaacaccagtacaaatatcatcaaacacaaagcactcatgcttgcagcaatggtgacaccaatgacggttccgctctttttcttcctttccacactttgcacctcatttgcagcaacgcgaatgtaaagagtttccccatttccatcagcagatccatcagattgttgccttacattatacagcgcgtcatgccaaacagagcatcctcctttcccataggaatatgcagtacaggagcaattgctcaagcaaacttctgagcattgatctttactgccagctgtctgcacactcatggcattatggggcaatataatgttttgcacacagtagaacttatctgtgaaccctttcttgttcatggtactgccacaatttaaaggagtattcctcatacaacctcctgatcgatcttctagatcccaattcttgggtgatcttatagagaaacccttcaagcagtcacagaatggattgttactgtcattgcagactgagaaaggtccacagattgcgtaaacatcgcagtgaagtatgggcatcctgtagttgatcaaccaattctgcaagctgtccaaccatatacctgccaaacctcgaccattgacatctattccagcatgtgtaatcttctccttcgtcagggtatatgagaggtaaacctctctgtcattgttgacataagtgaaattgggtatggttgcgccaatcatctctggcgctaagccgaagaaatgcccattccaatccccagtggaccaatatactacagttgagttccataacaaatgaccagtaccattgatatcaaactccaccgagtataaaccagcagcctggtcaatcgaatttttcctagaaacaagacggttcttctggccagtcactttgttcctgaaaatctttgcgccagcgaaaaggctatctgtcgggtagtcaaagctctgccagaaaaccttggatgagtttgaggagctctgcagtacaagattcccgttgttcaacaacactacaatggtgtggttggttctggtgttcacatgggtggaccatatgatgttcttggtaacctgatccaagatgaccatgtttccatcacttgatattgccagctccggcgaagcggggtccacgaccgggttttcgccattggcggaccacagaggagttatcatagggagcttgctgtaccatatgcaaaggtaagagttgtggctggcataggaggagttcttactctccgtcttgaagaagccgagcacgaacttgctgttgttggagacaagcctatcgcttccggtgagtgcatggccaggtgacacggtgtctgtggcggcagagattctcggagggtacagggagaataggaggaagcaaagaaggagagacatgtagagaatacagtgaagagaagctaagtggaggagtggaatttgtaaggaaaacgattgatgctcacgaacgcaatgcaaacatcaggtccaatggtttagaagccagaccactgatcagttgtctgtagagctcgcagaatctcaggtcaacgtggtggtgcgggtaaaacgtcctaatcagtctgtattaacaactgatagtgtgctgacctcgatcttaataaatcttccctcattgatcagacatcaacaaatggagcgttttgactgcgtaatgatctgtggtttgtgcatattcaagagaaatctgtttggcatctcttccagcaacttccagttgaggtattcttttaagaggactcttttttttaaaacattgcaattaggttgacttctcaatgcaattggcgctgcttgttggagactctttcgattcttccccttttttgtcgaccaatcatggatttatttccaaagtgaaaactttagccaaaatgaaagctcagtttcacaactgatgagatcaatctgatattacttgtccagcaggaaatcaatgtcataatgatcacagatttgggcaaagcattaccaagcgatgtgagataattgatggcaacttaaaatgggttttgattttggcactatcagaatgatgcataatccagtccatggcaaacaaaataaaagtgcagatatgcaattagtcactgcggaatgaagtaatagtaattttactatccttgtaccacattgtttatataaaatcttcagaaattatctatcttgagataccatcattttacagaaaaattgagtaaattttataaaaccccaggtactataatttgtttcaaagaacccaaggttttgggccaaaatgtttcaagaaacctcacgtttaagcatattatcacaccccgatccggcaccgccgtacaacggcacctgacaggagcgtgtcgtaggaaaaacggcgcgaaccgcttcctacgaaaccgcgattacagtaccagtcccaggacatagtgctggtacccacggtgacaaatatgaaccatcgcaaatccttaaaataaataaaggacttatttaccttaacttacgttgcagctcagaacagcccgagaatgcaaccgacgacgcggacaaggaaaacaccaacaacagcagcagcagcggaaccaacggactaacacccaacaccacaggcgacggctgggaaccaggacaaaaccctattcttcacttcacttcatcttcagcttcaggacggaggaactatatatatatttatatagagcaagggtgagtagttttgtactcagcaagtcacggggatttaggtgtttaatgcaagcttggaagagaggcaaggttgttttgcaaatcctttgtttgaaatcttttgaaatcactaagtgatttatttctttctaagtttgggtcgaaaagagacttgcgtctcgatttgacttaagagatgcttttcaataactcaattggtaatgtaccgacctcccgggtcagatcattacttctcggctccaagagccatttcacttgattaatcggctcccagagcctttttcattttctcggactcccagagtccagctgcccagcagcaaagcaatccgcttcctctcgggaagcctagtctataatgcccgcagacatcccgaatcacacagattcgtttctgaccactcaggtcatccatctgccacataggctgatctggttacgattcccatcccacaacaacttttcacaaagcacaggcaaacaaatctacgcaacaggaaccacctcacatccgcccatgaccgtgggcacggctgtttgaacagttagttaacctctacagaggggtacactttacccacaagatacgaacttattctgaacacccgtcggtatcggaggttcgcaacaaagcctttcctaagccgacccagggttacctcatgccacgtagaaggatcaaatcctcatataaatataggccattttagttttcacaaatcaaactccaaccacctcgatcggtaatctggcaagcttcgcgttcttgccttaccaggaacccgggttggctccaaccgaccctgccccggcattccccaactattggcatgcgaggtttccctgaaccgactagttacttagctagggtgtcccattccaccttgtggttgcactttgttatgcttgatgaatttcccacaggaatcggtccttatatgcgaatacgggacagtgccacacaggcacaacccccgcatcgcgagttatcacaattcattttatttttaaacacaccgacaccacaggttgggttttcaaggcttctcaaacccatttcccaatttttggacaatcaacagtgtatgtgggatatttgatatacgcgctcaaagagcacggataccgaagtcccacaagggtggagcgacaaggaatcagggtagtacaacctataggaattagtgcgactactgggtaggtccgtcggtttggcacgcaaaccgaggccaagcaagttaagtgtgtgactctaataatgcaagttgcaaacaaaacaataatgattttccaattataggagcaattggtcaaaaggtgacttgccttgctcaaggtcttcacggagcttcacgaatcttcgagaaaacccgcgatcggcgaaaatccggtaaccgcaactatacgcaaacaaacaaaaacctaaacaaaagaccaagaaaaagaccctatttagactaaataatagtgccattaaatagatctcaatttttacggaattactggaaatagaacggagtcaatcggaagagcggttgggaagatatgaattttggaagtttaattggaatttctggaagacgagaaatggtttatggaatttatagaaataatattctcaagaatattattgacagtcactgacgtgcgggaccaaaggaaaatgattcatggaattttggaataaagaattttatttatggaacaaaggaaaaagatttattaaatcccttggaaaattaaagggatgagggatgtgatttggacttatctcgggtggcattggtgcggcccaaagggttgaaggaggctcggccgagccattgggccgggcgcggccacggggaggcggcccaacagagggggcgcgggggagagagagacggcccggtggaccgattccaccgcgcggggtcccgggtggggcccgcttgtcggtgatacggcccacggtgggatggacgcacgcgagggtggcgctagggttcggggggggggagaagcggtccacgcgcggcgcgcgggtggacgcggtgtgcggcgggcccacgcgcagcctgttggctctccgtggaccgtgcgcgagggtgggggacggagggaggtggctgaccgaggtcagctttgacctggtcgcgtcgaggtggcgccgacgtggcagctacgtggcagccacgcgggccgggcgagaggaggaagaagaacaggagctccaaccaacggtggccgacggcggggtttcaccggagcacgacgtggcgattcgatcgagagggagttcaccggtacaaaggggagcacgagaggggttgagccaatggctcggatccttcgaagaggggccgacgacgacgaatcgcggcggcgcacgccggcggcgagaaaagggggaaacggcggaggggtgacggggattcaattcaaggcggtgggagcgtgtccggggttcaagaaatccgtttccggcatcggatggggtggaggagcaccgaggagggctagcgatggcggcgggctccggaagcgggtggcaatggcggcgaggccatgccgagcggcggcggagctcggggcggcgtctacgcgcgttcgaggggctagtagagctaccacacaagctagagagggcgaggaagaacgaggaaggagaacggagggagtctctaccgagttaggacggcacggtgacgagtggccgacggcgcggagtgagttctccgttctcagaccggggaaggggaagaaggagggtgctcggagtcccgcgtcacgcgtcctcgcacgcaccggcctccccggtgcttggcgacgaacggcgacggcgagagcggagcgagcaacaacaatagcgcggcggtgttggaagtgaaacgagaggaggattcgatgggaggggctcgggttttataggtggccgggtgaggagcttcgaggggaaggaactgactcgggagaggcggtcaaggagaggagctggcggtcacgcccgtggtccaggcggcggtaggcggtcacgggcggtgtcgggcaaaatggaaaaagggggggggggcaaagggagctctgttcttgccgaaacggggaatgggagagggagagaagagcgcgtgaggcagagagtcgcgctgcctatatgtcttggacgcacgcgcgcacagggtgggggcgagcggcagggcggcatgggcggctgcgcggcgcaggcggccagggctgacgcggcggcgaccgagcggtctgccacgcgcgggcgagcgcgtgcgcgacgcgagggcgcggcggaattcagaggcggcggcgggaatcggcgccgggaggggagagagcagagagagagagcgaagacgggagagagaaagaacgagagagcgagagagctctctctcggctcggctcggcgcgtgcaacgcacgtgcgaggctgagggaggagaaacggctgagagagggaggtgggctaaggggggaaaacggcccacaattggagtttgtatttggattcaaattcgatattcgaactcgagggttcagggaggaatcaaggaagactcaaggtagggtttgatatttttcggaattgggagcgagtatttgccgaggattcaaaggatgcgattgaatttcggaatttgatttggagatttgagtcgaaggaggaatttcgaggtggaggattttgattttgatgagagggaacaaggggattgaattgagatcctggcacgacttagactctcacacaaagaacgaaaattttcgtaattaggattttgccgaattagttttaaacgtctcacgaaaagcggagcgttacacatatatattttaatatatttatgcataatatttgtaaaaaataatatgagatattccggagtatatataccttagcctcttttaaacgattatctttgcatcaattattggtagtatgattaatgtttatctatacaagtaattaccaattaatacatcactattagtaaggttgtctaatgtttttcaatcgtgcaatgtaagagtagggaaaaagatgaagtgcacgagaggggtatgtattttgagcctactaatgtaaatatatactaaaaatattatatataataataaaattatgagtatgtgataaacatgtggtttattgaaacactttacccccaaaatctgatattcattgaaacaaaacataatacataaggttttgcattagatgtatctcaaaacttggagttttctgaaattctaaaaaatttggtatctgtagataatctactaagaactgtaaaattaccctgaattaacaggagtcaattgtaatatgtatgtttactgttgacgtgctgagacgcaaatcacttggtctctgatttggacctcctttcaattattaattccagattggtgaagtgtcctgcccagttgatctatattggcagatcatggtgtgatgccaatcctagaattctttcaacgccaaagatcaatattagatcactgctctataagctctatgtgccaagtcttctgtttctatagcccactagcagcaaccacagaccggctccttgtaagggcatccacaatgttgctttttagccagtaagaagcatttaatgctctcttcctactgggtaggaagcattgtgagagtggcacagagttaaaacccggccatacctctactaccgatgaagaagagataaagaatattatttgtacagtgtttctgacagtactttaaaaaaaatgaaagttgccgttgcttttcaaccgttgcttgctacccgttgcttagtcactgcattgtgccattcttcagtctcatactacagaaataacacacaatatatatagattgttgaacaacacagatacattctaccagatagttgagatggatccctccaacagagttttcacaaacttgttgaatcaagggtccccaagccaatattctgggaacagtagccaaaactcccctcctactcaattcccctcaaccttcacccaatcacagtatccccaatccccacagtttccacaatcgcaagcactaaattttcataacttccacccttttggtcctccagcaaactatcaattatatggcaatcctcctccaagttttcatggttttcagcagcaaggcaattggttaaaatctgcagcattaagctttcaaggttttcgtcatcaagaaagttggatgcactcaccaaatcaggttggtggatctgcttcttctcatggatctgaatcaacttctccatgccctgcaacatcgcaagccaaaagtgttgttaacattgaagagtctagtggcaacaatgaagaagctgggaggaaagggacatgggtcaactggactgaagaagaaaatctacggctccttagttcttggttgaacaattcagtggatccaatagatagcaatgacaagaagtcagagtactattggagggctgtagctgcagagtataacaacaatacacgtcgtaatgatcgcaaaaggacagtcgtgaaatgtaagacacattggggtggtgtcgacgacggcaagagagtgcgacgggatggggacgagaatcgtgtcgccggcggcaagagagtgcgacggactcgagagagaaattgggggtcgagaacttgcaggaaggaatcacgcggcagtcacggaattttactatcggtgatttttttttgctggccccaccttattcccctccgacgcgcagaaacaatgtggagggtgcgatggcttaataccgcctgacccctgcgcccacagtattgccgaactcagcaacaaacattgcgcttgccctaagggagcatatgtgtgcgattccatgtcaagaagttgagccaatattttttttatttcgatggttcctgttcattgccacctatattatagatattgaagtaaaatgcattactggtataaacttataaaagagtgcaatctagttcatgaacttgtaaaacgcttattttgttgtatgaacttgtctcgtatgtgcgacccaagacatataatggcatgataaggcaaattataataagttgaccacaaaggagtacatgacatgttatatgaggtggaatgcttttggtttctactttatccttcttcatttctaccccttgcattattatttagtttgagaaatttgcatatgtgtgatacttaaaaggtggtttcgctacaatatatgccatcgttaaaatatgattctctcggataccattctcaagtcatgggcattcgctaaaatgccattttcgttgtatctttcatttgcaaaacatttttcatccaaatattttttttctcagacacttttgcccctgactatggttgaaccaaactacatcttctacctcaagcttctcaggaccaggcgagaggagagaagggcgaccactccggcgccgccgcccgccagacacgctgccgccttccccaaccgagctgtgccacctctccccaccatccgcgccgccttgcatgccatccatttgcccccaattccacgccgccgcttccccccccccccaccatctgagccagactaaggagctgcagttgctgaaactggagggggcgctgcagctagaggaggcacaacacgcagaggaggaggcgctagcgctcgccgagatggagaagaccaagttccgaggtgcgcacccgccaggagggcgacaagaaggtgcgcgcccgccgggaggctgacgggaaggtgcgcgcccgcaagtaggccgatgagaaggtgcgtgtccaggaggccatctccagccacgacttccactaccgacaacatcgagctcaccaccgagcgcttcttcgacgggcacaagatcggcagatggcgggggaaggcgacgcggtcagggaaggtggcggcgcagatggcgggtggaggcggcgcagatggtggggagaggcagcggcatgtgttcacgggcggtggcgcagagtgagagagacgacgacgacgctgtccccagccgccccctgccgagccgagcctccttccccaactgcgccggtgtcacctgctgccgagccacgtcgcctccccgtcgagcgcgcggcagatggtgggtgccatcggcgttgtcacccctggcgccgcttctctctcggttcgtgaaaaacgcggtcaccagaaaaagaaagaagatgtggtttggttcaaccacagctaggggcaaaaacatccaacaaaaaattatttggatgaaaattattttacaattgtaagaaatagcgaaaatggcattgtagctaatgcccatggcttaagattggatgtgtagcgaatctcattttaacgatagcatttttacgaagccagttccaaagaatggcacatatgcaaatttctaatttagttttgtatctctttctttatgcgattgttatgcctatgttttgctgaataaatatgtctacttgatatccttctgagatactccctctgttcttttttctacgatgttggttagttcaatttgacaaaccaacgtaataaattatgggaaggaggtaggcatgtttacacagcattcaaaaacaacaaaatcagcaagattaaccttgttgtaccattttgaccttggttaacatgcaccggataagtttgtgctctaaaatgagcattttacatgttcaaacactagatcgtagagtttgtgtatcaccaatgtaatttattctagatatttgctcaacttatttatttgttttatacaaattcccacaacaacgtgtgagcttttttctaatttctaataaaggaaaattgcaaaactcagtccaaatgtcactctgaatttgatattcctccatgtaagacgatttgttgcaaatgcctcttctaattcaccttgagatccccacaacccccccccccccccaaaaaaaaaaagccgttgctcatccattaccatggaggcaacaccacatgtactaatatctctgttattataaaaaaatgagggctgcag

SEQ ID NO: 6393 - DNA, 25486 bp, Oryza sativa
  unsure (1)..(25486): unsure at all n locations
agaataactattatacaccacttccaacccaaccactcctactctcagcctaacccaatcagcccacactatcccatcgccccatccctcacccccctccttgatcgatgtctttttttctcatccattttctcgtttctttttcaccttttcttttctcccaatcatcctgatcctgcatctgtgtttcaaaaaaaaaatcgtcctgcgcctctccctcttcttctaatcaactctcttttctcctcattttctctttttttttctcttcgaaatttccctcctcataaatatttttcttttgaaattatcattgtttaaggtatagatggctataaggcccgcccggcacggcccggcccaggcatggcccacggtcgtcgagccagcatggcacggtcagcacttcgggccgtgccgtgccagcctgaaggcaagggtagcccatcgtgccttcattaaaataagtttatttcccctcccttctttttggctgtgatatatatatatatatatatatatatatatatatatatatatatataataagtctattttacgtctctactctttgtgacgtgctttacatatgtttgagaataagtctgtttcgcatccctaaactttgggccgggccgtgtcgtcccagagtgccgaggaagcagcccaagcatggcacggctgttgggccgagccggcatgggcacgaccggagtcggaccgtgccgtgcttgggccgggccaaatttatcgggccttgggcgggccatatggccattgttgggatttcttaacgacattactagaaatataattccccgcaatggcgcagaaatacttctggtatattatggttacagagtgtatccgcaagcgcatggatataccattgtaccatttcacccgagagtattccaagggtatcgtatttattttatcccgtgggaagatcatgtagagagagattgactaatagtttatatattccttgtgataatcatattctaaacaggggttaagataatccaagggtagagtgacacacaagcatagagtgacacacaagcattaacaactcattctcataataaatgatctaagctaggtggaaagaaaagagaaagagaatctattcctatacctctaatatacataatatacatatattctagttaactgatatactagcaaataccctctatccgatgccctcctggtacttcgagaagctacccctgactgtcgaattccttacgacagcacgtcatgaccatacaaccggggctaaatacggaggaataccctccccagggaattaacttaggattatatataggcgcggaggaatacccgtactgagctgtcaccatcagcggcccacctctcatccgcaatatataaccccaaataatgatatcccgtaatctagacaccacgcctaaactaccagatactactctaatatcatcgtcatgacatagagtaattgcatatgcaaacattataccgcaccaaagcatctcccagataagctagccgtatattcagtataacatgaacataatgtaaagtaggtactcatatacttagaaagtatttcaataccataaatgtatatagaagagtattctaataaaagtacaaagcttacaaaagaggaaaggaaagctgctaaagccatacccgaactcttctgaaggcttccgaactcctgattcctgttctatttctatttcaccagctagatactactaaactaaacttgagagaaatgagagagctcttgcttgaggtgtgtgttgagtgaagagagtgagctccttatatagaggtagttatgatggttgtggaaggggaattatccaaagtgccctccaaccgtcattgggatgcaatcctggacatccacgccaaaacctggatccaactgcactaggattggttcggccaaacctggggctggcccaatccagcccaattttggctggtggcttcctctattgctccactctgcagacttgtgaattttggcccaattcatcgtgtcagttctgagttcttggcctattcatacacaagtctggttctcgacatcgtccgattgatttatcacctgagttgatgtcgattctcctccactttagtgtcattcccttcaagaggttagtatacctaatactagtggaagtttattattctaacagatatatgcattgcaatcatcactagttctcctctattttggtaatattgacggtcaaaactgatcgataacgaccgtcaacggccatctatagtttaaggtgtgtatggtgcaagtttgttacattgcaaatacttttcatctatagtaaaaaagactttcactaattgaataatcaaaattttaatctttggtcaatatgatatagcaaaatacccattcatcaatttatggaatagacatccgatcgatttgcgaggctatggaatggtgtatataaggtattcttcgtgtgatgacgcatgaggtgagcgctatcgggttcaatgttatatatgatttctgacttttttttgccattgttttgttagtcttatttcagtttgtcttttaaattggttgagtttttatcaattgtaaaaattgtcttcacctgttgctacacacatgcatttttgctagtgaatactaataggtgaagagccatgatcgttagtcatgtcggccatgccctatgacatgatcgtggcatcccaattcaggaagcccggcacgtcgttgggcggtagtggtcacgagtcttcttctaaaacattgggggcactacatgatgaattgttgtgcttacttcatggggttcggtggtggatgatttctttggtagattcaagatgataaagatgagcttggtgcaacacttaggtcactgttagtagactggtgagaaaagaagtcatagaatacatgcagacaaaggttaatgaatgcatggacaacggcaattggggaggactcacacaaagctaaatagtagggcgtattagcaataaatcattttataggggggaatcttaaactcaaggagatatttgggatggtttttgcatttttttattttagttaaccatggagctgttacacgccgagacgatggtatggcagcgagatggtgtaaaaggggtgcctagactagagaggagagtggtcgaataggaagttgcggagtgggtatcaggatcgctcacaatcgccttttgggactaacaagagttctttcccacactacaacatattcggccttccttgacggattgcctttgacaaatagggaatatgtcattgatgtttgacaaatattaaaagaagtcggcataaagttccgcctcaactgattctagtgatgactcaagtgtgatcataaaaattggtcacggaggcaaacgtggtcatcacaaataccgtgaaattcatcattagaatcagggatatcacatgcgaaaaagtattgtgtcataggagaattggtaggcaagatccacataggcccatagcaagctaatcccatttgtaagtatgagattgtacggtgaaattcatcatagactacccatgctatgggctagcacgcggtgatgaagtttttttttcatagaactaaccaataatagttgtaaggaggtctcacatataagtatgcaaaaaccttagaggagacagtttgtcatgtgtttattttgactgtgtgtgtttgtccgatgtttacttggtgaaatgtttgctaattcatacacaactgtggaagaattggcaggcaactgatttttgcaagtttgttacaagacttatagtgcggacatggtaaatcaagggttttactagagtcccttcatataaaatctttctatcgtataagcatgttgcatttagtgcacttctcaagttgttagcgagaagaacacaacaaactgtcgccactggctctgtttcacttgctcctagccgagtctaggattccaggattgactatccgtgttggatggattgagcggagaccggacgaattaatgaaggatgaaaaaaaatcaatgtgcctcgcatggcagatctgtcacatgttttgttccctcgcattgcgtcgagtcattgggattgatctaaaatgtatataatgaaatctcaattggaatctcatgccactaatcgaggtgcaaaaaaccttatagcgatggacgagagcgcttggtgacgatcggaaaattgcaaactttttaagtaggttagatttgatcaaaccaaaagaaatttgattagaaaaaaaaagtaaaagcgacgtataatacaaataatacaaaataaaggtattatgtagttttctgttacattcatttaaactagccataaatttgatcatgtttaagatggtttattagtttaccttagctcttaataaggttttgatataagttattttgtttataaagtatctatacttggctagaaacctccgaaaatttttatatggttagcccatttgtgattttgttttaatacatgcaatctttcgatccaatggccattatttatctgaactctttatctgacggctaatatatttttgatgatgtggcgcatcctggtaccagaaagcttgttgcttctgacggctaatatatttttgatgatgtggcacatcctcgtaccaaaaagctctgctttccctatataagataagattcgtagttttattttatttataaatgacaaaaatctattcctactcacagatcttgagtgattttttttaattatttcctaaataaaattcccggccaacggagtccggagccgtccaacaagattgttcctcacgccggcgtgccccccgccaccgcgcgccatcgccgtagaggctaccactgggacttcgaggtcgctcctctctccatctgggccgccgcccctctcgcgcaccgcgcggcctctctccctgcccctcgccctcgccacctcgccgatggcctccggctgtgcggcggcggcgggatgctggcttctcccagccgatatctaggccctgatccgagaggtgtgttcctcatctgtgatgcctaaagttttccttcgcttgttgcttggaacctcccgtagataatttgtgagaaccatacacgacctggtaatttttgtttaggtcggcattgaacgagctttagattttggggaagctttcttaattaggtgaggctggttgtttgctaatgttaattttgagagtggattgcgagatactttaaatttcgacgagtccacaaaaatgggtatttgtattggtcgaaattaaaaatattctgtttggatagaatcacaatttggaatcaaatatcaaaattgagttcaaattaatacggtgcgtcctactactacttatcgtactttggacgctaagatgtgttcttttgtgctctttggtgatagattttgacatggatctatgaatatggccagcagcactaaattaaaaggtgaggagaggctggataagcccaaagggtgcccccacgtctctccgtactacaatgccgccgatcctattatcatcaatggcaaagggattgatccctttgagctgagtgaaggtatggataaaagaagagtggcttcaattcttcaaagtttcacttgaggcaaccgagagaaaccacgctgcttcacaaggcaatggcgattccaatacggacagtagcagcctctggattctagattctggaaataaaagaggtattgctgaccataatgtgagtaaatgaacgaaatcttttatactgctggtgttatctacttggttcagagtttcagacaggaaattgcacctagtcctaggtaatgtgtgattgttttgttagctttatgaagacatcttatgtccaaattgctctgacagagggcattcgtcatgctatctggccagccagtaacattttcaattaaaatatcttgagtttgttttgcataagttgtctgctatgttaattaccaatcataatataacatatcagatcctgcacaatgaaagctggccaggaaatttgctttgtactttgtactcactgtcttatgtggcaatttttctcattaaaattggccagtgttcccgttgatggtgcctctgtagagttctactaatactcagcagtgcaggatttgagtgatccattatgtagttatatcatccatcgtagcaggagtaatcatatcatcctacagttatttcgaatcatcacttcactcatatcatgattaaagatgaaacccttcacttgcttaggggcgataggttgtgtcagtatatatgttggaaaacataaaaaagttagttatcccatataaggaggtccaatctactccaaatggttttgtttgggccttgtagaaagggtacagcactggattgaactttgcagaatatgcaaaaacagtaagtcatatgaagttgtgcacattcacttgcaattgctatgttagtgttcatcctagcccgtagaatgtgcttatttccttggatcagcagttaggctgcatatttttgttagtctatatccattactgcttcacatgcatgtcatctgtgcatatatcagtatgacttgcaggttgtcagtacatttctctatattggactcaacaatgtactctcaactgggaaggaaatcttcctgtgttgttaaaagcatctcaactgacaaaatgacaggtctacggtatgtataacatgtcctactgtgtacagacacagagatatggatcttattatgaacactgatgtttcttattttctatgcctagttttcttgaaatgagacagaaactataattttctcataaactactggaaattacaaattagcatacaaatttacggtaaatctaaagatgacagtggtgttgaatgtgagcctcctgtgatagcattcagtagtcttggcaatggtggcattttgagttctagtacaccctctaggaattgcaccacctcgcccattgttggtcgatcaaactcactgtcttgaatacaccaacatgcaattttgcaaactctttcagcctcctcgagattcacatcaccatgcaattttgcatccaccagatttccaatccctccattgataagctggcgggcgacttgcattggaaaataggcgaatggtcaccatccttgaaatattcttgacttgagttcctccttcctgataagatttcaaacaaaaccattccatagctgtaaacatcaactttagctgtaacaactgttccgctaatccattcaggggcaagatatccaatcgttcctctcattgtagtcagagcatgactaaattctctccccaaaatctttgccattccaaaatcagcaattttaggaacgaaagattcattgagaagtatgttctctggcttgatatcacaatgtataatgcaatctcgacagctatcatgcaagtaggcaaggcctctagcaactccaatagctatttggtatctaagattccaatccaaaactttatcattatccttaaatagttgcacatcaagggagccatttggcatgtattcatacacaagtaacttcttatcaccttcacaacaaagcccaatcaatttaactaaattgatgtgctggatcattccaattgaatccacttcggctctgaattgtttctccccttggcatgtgccgtcaagccttttcgctgcaatgggagttgactcatttaggtatcccttaaatacagaaccaaaactgcctcctcccaacttttctgaaaagtttttagttgcacgctgcagatcaatatatcgaaatgcagtaataccaatgctgccttgatcattttccgctccgcgagcaaacagtttcccttttctcctccaaaacatcagtagaaggatcatcaaacagaaagcagcagtgcttgcaccaatggcaacaccaatgatgactccactctttttcttcctttccgcactttgcacctcatgcacctcatttgcagcaaggcgaatgtaaaagttatcaccatttccgacagcagaagcatcagactgttgccttacgttatacagctcatcatgccaaacagagcatccacctttcccataggaatatgcagtacaggagcagttgctcaagcaaacatctgagcattcatctttacttgcagcttcctgcacatgcatggcattacggggcaatataatgttttgcacatagtagaacttatcgctgaaacctgtcttgttcatagtactaccacaatttaatggagtattcctcatacaccctcctgttcgatcttctatctcccaatccttgggtgatcttatagagaagcccttcatacagtcgcagaacggatcattgttgtcattgcagactgtaaaaggtccacagattgcgtaaacatcgcaatgaagtaagggcatcctgtaattgatcaaccaatcctgcaagctgtccaaccatacacctgccaaaccttgcccattgacatctattgcggcatgcgtaattgccttctcattgttcagagtatatgtgaggtaaacctctctgtcattgttgacaaatgtgaaattgggtatggtggcaccaaacatctctggtgctgagccaaaaaattgcccattccaatccccactggaccaatatgttacagttgagttccataccaaatgaccaacaccattgatatcaaattccaaagagtacaaaccagcagcctggtcaattgaattcttcctagaaacaaggcggcggttcaggccagtcaccttgttccagccgatcttcgcatcggcaaaaaggctatctgttgggtagtcaaagctctgccagaaaaccatggatgagtttgatgaactctgcagcacaagattaccatcgttcaacagcacaacaacggtgccgttggttgtggtgttaacacgggtagaccatatgatggacttggtagcctggtccatgatgaccatgtttccgtcgccggatattgttagctccggtgaagcggggtccaccactgggttttcgccattggcggaccacagtggagttatcatggggagcttgttgtaccatatgcaaaggtaagagttgcggctggtgtaggaggagttcttactgtccatcttgaagaagccgagagcgaacttgctgttgttggagataagcctgtcaccgccggccagtgtttggccgggtgacaccgtgtccgtagtggcatagctcgtcggagggtgcagggagagtaggaggaggaagccaagaaggacagacatgatggacaggacagtgaagaaagggaaggttagtggaggactggaatttgtaaggaatatgatcgattctgacgactgtgatgcaatgtttcgaagccagaccagttctgtgttttttatttagacaatatcagttctatgatcagttctgtgattttttagacaatatcagttctgtgttcagctctcagaatccaggtcaacgtcatggtgtgggtgcacgtcctaatcagtctgtattaagaactgacagtgggttaacctcgatcttaataatcttctcattggtcagacctaaacaatgcatcgttttgactgcgtaataatatgtgcaaactattcaagaaatatgtttgacatctcttccagcaacttccagttgagttaatcttttagagaaccccttttttttaaaactttgcagttcagtggaagttctttcacgacatcaatgcaatgggcgctgcttgttggagacttcttccattttttggaccaatatatcatgcttttatctccaaagggaaaacttaatccatgccaaagatttaagcactgatgagatcaatctgatattctttttccaacaggaaatcaatttcatgatgttcacagatttgggcaaaagcatgaccacgcgatgcgatacaatgatgccaacttcaaatcatcaaatgggttttgaatttggcactatgagaatgctgcatagtccagtacatggccgacaaaaaagtagtccagatatgcaagaagtgaagactgaaactgaattagggggagtcaaccagacgagtaaaagaaaatgttcagcacaggcttcatatcagaaagaatgacgcgcattgcatgtttgcatgtgcgcctgtgtgtgttgactgttgactgttgactgttgacgctgagccgcaaatctatctcgtggtcacgccgagatctgcaatttttggaagtgctagctggtataaagccaagagcatttttaagagtgggaggcaaaggcattttctaatttgaaaccactttggattgcaatcggagagcatactggagtagctctttctttcttttttaaataggctacaaaaatacccgtgcgttgcaacaagtgaaggctattttaatcttgttattgttatatggtttaggtaggatgaaatttattgtgttaaaatcgcttggatatatattttgttagaaaatcatgagttacaattaggagtccgatcgtcttaagttgacatacgagctttttttaatgagatttcttatacgatttcttttgtatttacaaaagtgaacgaacttaaaaacgggcttaaatacggatctgtgtttccaaaagcgaatgaatttaaaaactgactcatagacggatggcgtaccaaagtaccggcaaaaatatcttcaatttttataatagtagagattaagctgatttatttttaccgatctgtcctatataaaaatttagtccatataatacaattaatacttaagttatcaagtcatgataaaataaaatatgtttagtgatttttttaaattactagaaaaaatgcccgtgctttgcaacaggtgaaactattttttcactgaaattcactgtgagaattcatttagatatatatttttctaaaaaatcatgttaagttagcatgcgagttttttttaaaagaatttcttatacgactctttttgtattttcaaaagcgaatgaacttaaaacccgactcaaatacggatatgtattcccaaaagcgaacgaacttaaaaaccgacttatatttggatgtgtcagggttacggataagatataccctctacccttggatgtacgctatacgacaatattgtacatcggcgcgtgtacggacattctctgtatacgttaaggaaattcatctcgaagtccaccaatgcaaaggttcctacccgtataagactgggtcgtcaatatatcgtgcagagtccgatgtctctgagtcctacttggagaccacctgacctgcgatataaaagggaccccccgggaggacctaagggatcgaatctcatagccaacacagtgaccacaacctacgaagccagagtttgcaggagccaagtcaccgggtgatctagtcgaatcaactcgactacgatctcgtcagtatcatcgagttctgttatttcctttgtaatttgtggttctctccatataatcccatatcaattggattagggctattacctattaaggggcttgaaccagtataatctttatctcttgtttccttgatgtcatgctacgtagatcctcgtaccagcgtaccccaataccctctatatccggtctacgggtacccaccgtcgacagtggcgtgccaggtagggggacttggtgctcaagattctactactatgacatcaagcttcatcgacaacatcatcaacaccggccccattcaaggagtccctacttcaacaatgctgttgtggactcaagtcggcgaaatcgtcttcccggtttacaccacggtaccaatctcggctgatccatcaatgaccgatcccatgtcgaaggatcctcccgctgtagcggagaacggaacatcgacgtcatacgagcccgagaaggttcctagtgcggccaaaccttgtccttccgacaagaaccgcgagccgacaaggacaacttccgaggtaacaaagttctggtgtcctatccacaagtccaggaagtacaacttgcaagcttgctgggtttttctcaacgtacaagctgaaattcgtgcttgcaaggagcatggaatccagcgtacttctctaactcgtgatgtctattgtcctattcacaagacgaagaatcacgacttcttaagctgcaaggtctttctccgcgccatgaaaacgacgcttcctaaggtccagcagtcaggaacctcccttaaggatacagacaaggaacaaggagcgacgttgacctcggatcgattcattggagtaatcgacatcgatccccacgagccatcagtcctacacttgctcgaagactatggctcgtcatctgacagtacaccacgcgacgtgtttgccatcgatgggactagcacgtctgcacacgctaacgcagaggcggagaaccagacggtcacaccggcccaacaccttggcaccgtcaacgcaatactgagagaagctccctatgaccccgtgcttaacgatgatctcgcacgatggacagaacgactacgggaatcggtagctaatctcagtaacgcgttcgaggaggccgcaaccagagcacaaccagaacgaccgacaactgacggtgccgacggcgaaccaccggagcagcggacgtcgcctagacgagctacccctccacctcgcggcaccagcgatctttgcgaccatctgaatggccgccgagaagcacgacgcgcgcgagacaacgagaatcgttcccgacatcgtgtttcttcacgacatcgcgagaacgaagagcgaggaggccgctcgaacgaagaccaacaccaccataatcgtcacaaccgccgcgaccacgacaatcgcgaacagcggacaccagacgatgctggtcgaggccgtcaacatgacggtgatgataatggggatcggcgccaggacaacaatggtggacgacgacagaattctcgagaacctgaacgtcgccctcggaatcgcacaccggagccgagtgaatcatcgtcatcatcttcatcttcgtcatccgatagacatcgacggaggacacacgatcgccgacaacccaccgcccccagcgccgggtgtagagctttcaaccgttctctacgtgatgttcgatggcccaagagattctgacccggagcaatagagaagtacgatgggagcactgaccctgaagaattcctccaggtctactccacggtactatacgctgccggggcagacgacaacgcgttagcaaactatttgccaacggcgttgaaaggttctgcgtgtttggtgctgatgcacctcccaccctactcgatctcttcatgggcagatttgtggcagcagttcgtcgctaacttccaaggaacttacaagcgccacgcgatcgaagacgatttacacgcgttaacatagaatccgggtgaatctttgagggactatgttcggcgctttaatgagtgtagaaatacggtccccgatatcaccgatacttctgtgattcgcgctttcaaaactggtgtcagagatcgctatactacccaggagttggcaacaaggcgaatcacaactactcgaaggttgttcgaagttgtcgatcgatgcgcccatgcagacaacgcactgagacgcaagaacgacaagccaaaggcgagaggagagaagaagccagccaaggacgcacccaaatcaagcaagaagaaaagcggcaagagtaggaagaggaaagctcaaccggaagtcctcgcatctgaatacgagcgcccacccaaacacccaaacccacaaggcagtgatacgaagagaatatggtgccccatacacaagtcggacagacattctctggaggagtgcctcatcttcaaaaagtcgctggaaaagcaactggctttggagaagggcaagcgagtacgtgtagtcgagaaggccactgaggcaaccactcaggactcagactcggcgtacctagattccgatcttcatgtctcgcacatcttcggaggttccacagcgtactcttcaaagcgagaatacaaaaaagtggagcgtgaggtttgttcaacatggtatggggttgtcacgcccggaatttctatccaaaattccaaacgcttacatgtgtgtgaaccctcgtccaggaatcagccgaggcacacaataacaaattgataatagagtacaaatattactctaattaataagcgaataaaatgtcattacagaggtagatagttcctctcaatcaataaagttctagcagcggaaattaaataaacggcgcagacggctccactccacaggcagcttgaccaaggctacacctaatcctccacaccatcagcctcattgtagaactcttcctctgatgaatgattgcaaggtgagtatatgacatactcagcaagccacgcagcaaatatgcaagtgcacaggataacaaaggatggcataatagggttccatttgcaaaagcagcatttagcaaacatttgagaattttaacaaaacagttaagtaattaaacaatattaatccaacactatacaacataccctgttgtataggcccaaccattctgaacaaccaccccggctgcacagtcctatctccaaaccaggaatgtaccattccaaaccaggagctaatcaaattattaccaattatagcatcatttactatggtgagaagggtgagactaatcacgaaagacattgttagacccgcccataaccgctggcacggctattcgaatagttttactctgatcagaggtgtaccactgtacccacaagacacaaccccacatcatgtcaccatgtgcctcaataccaccacggtacctcggaaaggagttgtgacaataccccttgcataacacaatccaccgcagcgcaccttcctggatcataatcacccccttataaacaaggcatggactccccagcgacccccgtgggcttatctccgccacttctcagtctggtgccccgcaatgaaccatgctatacaaaagataaagccgttgcccatgctggcttgtggttggcacggttaatgtttcacaaccgaaactcgtgaaccggtccttaattgtcatgagcacgaccatcaaaaccatgtgctcacaacccaccattaccaggttttagttggcacattaattaattaatcaatcacgattgaccatcgtgaactatcattaggccatcattaaataatagtgagtcataagttatcccaatagtgagctaatgtttctaagcaaggctaagcaattatatctaatatctagttgaaccaatataaataaagctcaactagtcaaattgtaataacccaaggtatcaaggaataaggtaatcaatgtacaaaagggccataacaaagaataggtcaattccacccaatgacattcgaaaatagatgcaatagttgaatagaaacaatagctttaaataggatcaacatgctcaaagggttgtttgggatctgtgtgacttgccttgctggccttggaactcttcaaactcttcttccgcgaaaacggactctccggaaacgacggaatctaagcagaaaagagcaaaatcaccaaaacagcacataaacaagcatgaacagtacatgtggatatttttaatgtgtagatctcaattttagaaaaatttagagacttgaaccaactaaatcggagctaagatgaattagttatgattttttaaagattaaatcggattaaaacacttaaatcggtttaaattgaattatgacgcaataatgaattatttttgaaaaggaaaaggggatttattgcgtcagcgggctagggtttgggtggaccggcgcacgggcggcggttcacacgaacggacggccgagattgatccaatccaaaacggacggccaagatcgatcggtccacgaccggctcacgggagaggatcccgatgacgtcaacgatgacgtcaccgacggcggcggcggctcggcagctgggtcggctcgggcggcgcacgcttgccggcgaacggcggcgcgagaacgcaaacggaaggcaccgggacgaagcgggcggcacggcgaactcaccgacgaccaaaagagcgacggagaagcaacggacggcgacggcgacgaggaggaagcggcggctaccttcgggttgtcgacggcgacgaagctccggcgggttccgacggctgcgaaggggcggacgaggacggcggcgacttggcgatgacgacggcggtcttcccgagcgacggcgacggctggaacgacggcggcgcacggctggagcggcggcggcgaaggcaaagctagggcacacggcgctagggctactccggcgacgagaggcgaaggcgagggctgcgacgggtagaggagacaccgggggtccttttaaaggggctcagaggcggcggcgaaggcccacggcgacggcaacggcgaaggaaaccttcggcttggagagagggaaaaccgatccgaatcgaactcgattccaaagctttccaaagcgatttaaccaaagattccaaaggagaaaaggtagaggagatcccgaggatcatttcccctctattgattcggccggagaaggaaaggagcggccggatttggaaaggaaacggcggcggcgcgaaactagggtttcgggcggcggcggccgaaggtagacgacgactgacgggtgggccccacctgtctgcgacagcgcgctcgcgcgggcggctgcggactgggccggactgggccgagagagagaacggttttgggccgactttcggcccaaagccaaaagagactttttaaaacctttttcaatttaaattattccttaaatgcaattccatttattaaaaatactttcttagctcaaataaatcccagaaaaatctaggaattatagaattaagcaaagtatttaatgaaattttatctggcccctttttatattggaatttattaattaaacttagattttcttttcaagacttttaaaattatttctaaaaattccatttaaacaacaatttatatattttgaattttcagggtgtgacaggggttgcacccaagatgaagtggtctgaacagaagatcgagttctcagatgaggaccgccccaaggctactgttatcccaggacgatatccgatcgtggttgaacccactattcggaataacaaggtagtgcgagtcctcgtcgatggcggcagctccatcaaccttctcttcgccagcaccttggacgcaatggggattccacaaagcgtgttgacacctaccgatcaacccttccatggaatcactcagttttcgtccaagccattgggcaagatcacgcttcctgtgactttccgccaagcgagcaacttacgaacacagcagataacatttgatgttgctgagtttgacacagcatacaacgccatcatcggaagaactgcactcgcgaagttcatggccgcatctcactacgcgtatcaggtactcaagatgcccgggccgaagggaacaatcactattcaagggaacgcaaagctggcggtccaatgcgacaagcggagcctcgacatggtcgagcacacgcccagcccacccgccacagccgagccacccaagaaagtgatcagaacgactaagacgtcgaaatcagacggcacaatcaaaatcgttccactctccagtgccaaccccgacaagacagtcaagatcggagcatcactgaacgagaaataggaactcgcgctcatcaccttcctccacgacaatgcagacatattcgcttggcagccgtccgacatgccgggggtccccagggaggtgattgagcacaaactcatggtgcgacccgatgccaagccagtaaagtaaaaactgcggagatttgcaccagatcgaaaacaagccatacgagaagagctcgataaacttctcaaagctggtttcatcagagaggtactccatccagagtggctagctaacccagtcatggtgcggaaggccaacgggaaatagaggatgtgcatcaacttcaccgacctcaacaaggcgtgccccaaggatcacttccctctccctcgaataaaccaactagtggactcaacagctggttgcgagctgttaagcttccttgacgcttactccggctaccactaaatcagcatggcaaaagaggacgagaagaagacaacattcatcacgccgttcggtgtattctgctatgttaaaatgccgtttggactgataaccgcaggaaataccttccagcgtacgatccaaggggcacttagcgatcagctgggtaacaatgttgaggcctacgtcgatgacattgttgtcaagaccaagacaggtgactcattcattgatgatctacgggaaaccttcgataacctcagacgatatcgcctcatgctcaatcctaagaagtgcacgttcggggtaccgttaggcaaactgctcgggttcctcgtctctggcagaggaatagaagcaaaccccgagaagatcaatgcaatcgagaacatgaagtcgcccacaagactcaaggaggtacagaagctaaccagatgcatggcggcactaagtaggttcgtcgctaggatgggagaacgaggacaacatttcttcgctctgctaaaaaagcaagacaaatttgtatggacacaggcagccgaagaggcgttcatcgcactcaagcgctacctgtcaaatccccctgtacatgttgctccccaacctaatgaagagttatttctctatattgccgccacgccctactctgtgagtactgtcattgttgttgaaagagaaaaggtgcagagaccagtctattacgtcagcgaagctctccacgacgcgaagacaaggtacccacagatccaaaaactgctctacacggtaatcatgacgtcaagaaagctacgccactacttccaagccaacagggtcatagttatctccgccatccctcttggcgaagtcgtgagaaacaaagacgttgtcgtccgcattgcgaaatgggtagtcgagctaagccagtttgacgtccactttgtaccacgaacagccatcaagtcccaggttctcgccgatttcgtagccgattggactatgcctgaaaacaggttagacagtcagaccgacaacgaaacatggacaatggcgttcgatggtgtgctcaacagccaaggagcaagtgcggggttcatcttgacatcaccttcgggagatcagttcaagcatgcaattcaccttaactttagggcgaccaacaacacagccgagtacgaagggctactcgttgggataagagctgcagccgcacttggggtcaagcgactaatcgtaaaaggggattccgaactagtcgcaaaccaggtgcacaaagattacaaatgctctagcctgagttgtctaagtatctcgcagaagtcaggaagctggaaaaaagatttgatgggatcgaggtccgacacgtatatcacaagaacaacatcgagtcggacgatctagcacggcgtgcgtccagacgagagccactcgaacccagcacctttctggacatcctgacaaagccatcagtgaaagaggcaaacgacgaagatagcccagtcacccccgacatcagctcgggggctacagaggcagagcgcgatgttgccgacatcgagaccacggacgactggcggaccccactcattaaattcataagcagcgacgagttacccgaggatgatgcagaagccgagaaaataacccgtcaagcaaaaatctactgtatgatcggcaacgatctatacaagaaggcgccaaatggggtacttctcaaatgcgtctcgtccgacgacggcaaacacctcctcctcgacatacacaaaggggtctgtgggtcacatgccgtcggtcgtacattggtcggaaaagcctttcgacaaggatttttctggccaaccgccctcaaagacgcttgcgacatggtacaacggtgtgaaggttgtcaatttcatagcaaacacacaaagctaccagcgcaagcactgcaaaccatccctctcacttggccgttctcatgctgggggctcgacatactcggtccattcctacgaggacagggcagctacaaattcctattcgtggcaatcgacaaattcaacaaatagatcgaggcaacatccacgggggaaatcaaggctgacaacgccatcaaattcatcaaggggatattttgcagatatggattggctcaccgcatcataacggataacggctcccagttcatcagcgccgatttccaagattactacgtcggactgggagtcaatgtcacgcccggaatttctatccaaaattccaaacgcttacatgtgtgtgaaccctcgtccaggaatcagccgaggcacacaataacaaattgataatagagtgcaaatattactctaattaataagcgaataaaatgtcattacagaggtagatagttcctctcaatcaataaagttctaagcagcggaaattaaataaacggcgcagacggctccactccacaggcagcttgaccaaggctacacctaatcctccacaccatcagcctcattgtagaactcttcctctgatgaatgattgcaaggtgagtatatgacatactcagcaagccacgcagcaaatatgcaagtgcacaggataacaaaggatggcataatagggttccatttgcaaaagcagcatttagcaaacatttgagaattttaacgaaacagttaagtaataattaaacaatattaatccaacgctatacaacataccctgttgtataggcccaaccattctgaacaaccacccggctgcacagttctatctccaaaccaggaatgtaccattccaaaccaggagctaatcaaattattatcagtttaagcatcttttacaatgatgagaggtgtgagactaatcacgaaagacattgttagacccgcccataaccgcgggcacggctattcgaatagttttactctgatcagaggtgtaccactgtacccacaagacacaaccccacatcatgtcaccatgtgcctcaataccaccacggtatctcggaaaggagttgtgacaatacccctcgcataacacaatccactgcagcgcaccttcctggatcataatcacccccttataaacaaggcatggactccccagcgacccccgtgggcttatctccgccacttctcagtctggtgccccgcaatgaaccatgctatacaaaagataaagccgttgcccatgctggcttgtggttggcacgataaatgtttcacaaccgaaactcgtgaaccggtccttaattgtcatgagcacgaccatcaaaaccatgtgctcacaacccaccattaccatgttttagttggcacattaattaattaactaatcacgattgaccatcgtgaactatcaataagccatcatgaaataatagtgagtcattagttatcccataagtgtactaatgtttctaagcaaggctaagcaattatatctaatatctagttgaaccaatataaataaagctcaactagtcaaattgtaataacccaaggtatcaaggaataaggtaatcaatgtacaaaagggccataacaaagaataggtcaattccacccaatgacattcgaaaatagatgcaatagttgaatagaaacaatagctttaaataggatcaacatgctcaaagggttgtttgggatctgtgtgacttgccttgctggccttggaactcttcaaactcttcttccgcgaaaacggactctccggaaacgacggaatctaagcagaaaagagcaaaatcaccaaaacagcacataaacaagcatgaacagtacatgtggatatttttaacatgtagatctcaattttagaaaaatttagagacttgaaccaactaaatcggagctaagatgaattagttatgaatttttgaagattaattcggattaaaacacttatattgattttaattgaattatgacgcaataatgaattatttttgaaaaggaaaaagggatttattgcgtcagcgggctagggtttgcggtggaccgggcgcacgggcgacggttcacgcgaacggacggccgagatcgatcggtccacgaccggctcacaacggacggggacgatgacgtcagcgatgacgtcaccaccggcggcggcggctcggcggctcggacggcgcacgctcgccggcgaacggcggcgctttggcacgaacggagagcaccaacgggtagcggacggcacggcgaactcaccggcgaccaaagcgacggcggaagaggaacggacggcgacggcgacgaagaagaaacggcggcggtcttcgggttgacggcgacggcgatgctccggcgttcttcggcgactacgaagaggcggacgaggacggtgacgacttggcgatcccgacggtggccttcccgagcgacggcgacgaccggaacggcggcggcgcacggctggagcgacggcggcgacggcggcgctaggttgcacggcgctagagctcttccggcgacgagaggcgaaggcgagggtggcggcgggtagaggagacaccgaggagccttttaaaggggctaggaggcggcggcgaaggcccacggcggccggcgacgagaaggaaagatcggggtttgaaggaaaaagaccgatccgattcgaactcgaatcaaacacattccaaaccgatttagccgatgtttccaaaagagaaaaggtagaggagatcccgaggatcatttcccctctatcaatacggccggagaaggaaagggacggccggatttggaaaggaacggcggcggcgcgaaactagggtttcgggcggcggtggcgtgacgaagatgacgaccctgacaggtgggccccacctgtcagcgggcggacgtgtgcgcgcgcggcggcggactgggccggactgggccgaggagagagagagcggttttgggccgactttcggcccaaagccaaaagagatttttttaaaacctttttcaatttaaattatttcttaaatgcaattccatttattaaaaatacttccttagctcaaataaatcccagaaaaatctaggaattatagaattaagcaaagtatttaatgaaattttatctggcccctttttatattggaatttattaattaaaattagatcttctcttctaggcttttaaaattatttctaaaaaattccatttaaacaacaatttatatattttgaattttcagggtgtgacaagtcagcggccggctatatctcgtggctgaacggggcatgcgctcagctcgaaggcatcggcaagcatatcgacgaggccctgaagcaggagtgccgtcgatcgagctggtttgccgaagggcacgtgctggcatgtatacgagatcatcgtccgcagttgcacctcgagttcttccacgagggattttctcgttctcggaggactcccgcggaggtagacaacctggcgaagtcgatggcgccgctggcggagaaagtcttccagtcgatggattggcgttggccttcctggtagtctttgtatatctgtgacaagcatcttagattaagtgtaatatattttggaattttttgcagcctgtaaggaatacttgtgaaatagaaaggaagtctatctaactaagctttcttactctggatgtggtgtgtacgagtgtcttctcacttcgcgacttcgatcattcacttgagttatacactcttcctagcccccagccttgtcgtcggagaattcttctcggaagataaggctcttagacctttgacttgccttagttgaataaacactgatcctagcccccagccgtgaagttggaaaatccatttccgattacacggcttggttaatacgcacggcgagaactcttacacgaccagatcttatatggtctttcgtctctgaagaatccgacaaggccttatcagctctgggcatccccagccgaagttcccttagattcctcggaggccttgtcaagacggcgtaaagggacatgtgaataggtttcaacactaggtatcatctgggtaagggatcatcgggaagggacactttgattgaaatttgcatcttaaaacaggctttattgaagttgtaaggtgtcttacaagtatggatactattgacttatacataaaatttacgcaattggtcaatcttccacgaatttgctaactcgcaaccgtcgccgtctgcaatcttgaatacgcctggccgcaagacttgtgtgatcgtatacggtccttcccatttgggtgagagtttgtttcgccctgcttggctttgaactcgccggaggacgtagtcgccgatcgaaagtatgcgtgctcggatgcgcttctcgtgatagcggtggagggcctgttggtagctagctgccctaacggcacccgttctcaatgttcctcgagttggttcacgtcatcgtttcgctattcctcctgatcctcgtcagagtacttctgtactcgtgtactctgatgtcgtaactcggtagggagcatggcttctgaaccgtacatgaggaagaagggtgtctccttgttggacattgtcggtgtggtgcgcacggcccatagtaccgaggggagttcttcgacccacttcttgtcatgtgacatgagcctgtcgtagatatgggtcttgatcccttgtagtactatgccgtttgccctctcgacctgtccgttactctgagggtgagaaaccgaggcgaagcagatattgactgtcacaccctgaaaatttaaaatatatataaattgttgtttaaatggaatttctagaatttattttaaaagtcttgaagagaagatctaagtttaattaataaattccaatataaaattgggccagataaaatttcattaaatactttgcttaattctataattcctggatttttctgggatttatttgagctaagaaagtatttttaataaatggaattgcatttaaggaataatttaaattgaaaaaggttttaaaaagtctcttttggctttgggccgaaagtcggcccaaaaccgttctctctctcctcggcccagtccggcccagtccgcagccgcccgcgcgagcgcgctgtcgctgacaggtggggcccacccgtcagtcgtcgtctaccttcggccgccgccgcccgaaaccctagtttcgcgccgccgccgtttcccttccaaatccggccgttcctttccttctccggctgatttgttagaggggaaacaatctccgggatctcctctaccttttctcctttggaatctttggttaaatcgctttgcaaagcgtcgaagacgagttcgattcggatcggttatccctctctccaagcngaaggtttcataaaaaaaaaaagtcgccgtggcaaacaccgaa

SEQ ID NO: 6394 - DNA, 13899 bp, Oryza sativa
cgagtatcgaaaccagacgttgagttgttttggagaaaagtgctatttaatgcgaacaattattttttggtagttggcccaattttgcattgttctttaaagagtagaataatggtgcaaagttgatccttttaaaaaataccaaatgtgttgggcactatgcaatttattatatctttcctaatattgattataaagaaatacgtgtgcgatacaacggattaagacatatttgtggatagcaaccattagacacataattgtgagtccatatataaattttcagacataatcaaggccgggacccccctcctgatccagccgataactgtcgtctgtatggccggtctcaatttaccctagcccacaagtaaagcagttgcattgtctctatttaacctatcccacatgtaaaacggtagtcctacctcatataaccgatcgacgttttcaatatctggtaacagtctcgtacatgtagtatgctaagcctaatcatcccatcaaatatatattcaacatccgtagtatgctaaaccagtctattccttaaaatctgatttaatatttctcgatcaatcttaggaacaaccggtgaagtaaagagggaaatgcgcccaacagggtggtacccccccccccaccaccaattttgccaattaaattacgcaacctgactgtgtaaccattgacaattaatattctactggctagttgaacgataaataacatctggtgatattaaaatagcccaactgcgagaacaaaatatttcagttgatcttgactttgttcgtacttcgtagggtgaataatgaatgcgtaaacgtgtttgacatgcagccattctccatctaagcatttttgggcgacatgcagaccagagtgcagaagaatactccctccgtccctattgtgatattttgcttacactatttgactgttcatcttattcaaagaattttagaattattatttattttatttgtgacttattttattatccaaagtactttaagtataactttttattttttatatttgcacaattttttaataagacgagtggtcaaacagtgcaagcaaaatatcaaaatcccttagagcaaggttaatagtacaaccaactgctagctccaaatcatttatagccaatttatacaatagttgcttactatattattaatatctggcctcacatgtcatacacacattatgtcttggagtccgtgctacaggtggctacagatttatagtccgctgatcttctctctcctcttttatctctttaaaatatgtttgtagttgacttatagtctgctattgtacatgctcttatatcagggacggagggagtatagaataggaatccattgatgaactagacttcgcatatggtacaaagtactccctccgtcctagaatatagcaacctataaccggatgggacatatcctactactacgaatctggacagaagggtcttaggttgctatattctgggacggagcctctgtccgcaaccataagtttccgcgtctaattttgatcgtccgtcttatttaaaattgttttataattagtatttttattgtcatgagatgataaaacatgaatagtactttatacgtgacttatgtttttaattttttttcaaaatatttttaaataagatggatgattaaagttgttcatggaaaattatggctgcacttaaaataggatggagggagtagtcacatacccttgtaacgggacacgaggaacatcgtttaatttttttttcatgtatttttgtttttaatttctaatacgtaggatgggtgggaagcagttttgatggtgttggaatggaagaaagacaactgtgcttttatagagtagatacaagaagtgcaaaaaatttgtggccactaaccagttaccaaccaagttctctctgtacactcaccggcatacacacggatgcattctctatacacgcttgaatactgttggaacagacactcataattctagcatgctacgctacgctagatcggatcatctcagatagcttatctgtgacgagccaaaatacttcatcatagatgccctcatctgtgatggattagactagatgtcgttacagatgaggctacaggcgcaggcccatcacagataaggagttatccatggcgggtccatatatgcacccgaaacgtctgacgggctcacctgtcagcccgtcacaaacctaacacttatgacatatttataaatttagtacatcagaaaaaaggacgaaataacctaaaatgactctttattttacctgtcactggtaactagtgtaaccttatctattcgccccatccaactgaaccttatctcttcaacccgccccccctctctcgatccccccatcctctttctctctctcaatctctctctcgattcaccgctcgcgctcgcgctcgcgcccgcaaccacaaccctttcaccgccaccgctagttcgtgctggccgatgactccgtccgcatgccgaaggctgctttctccgccgtgagtgccgactgccaactcctcaacctcaggcaccagctatcgactctgcctccgccatgggccagccaccgcctctgcctctaatggcaggggagttcttctatttgggattatgtgattttgttttgtgcccagatgaatctgatagtgatgatttttgtgattctatcttatgcctagatgaatatgaatgtgatgctttttgtgtttcatgaatgcttaatgaaggttagtgattagctaggcggacggctaggcggacggcatttttatttttttgccctatttttcacgtttgtgataggtcccagttatgacctgtcatagacaaagatcaccaatgacaagttaaaataattccccgtcacagataaaggttacctgtgatggattttagttgcggtccgtcaaaggtaactttacctatcacatataactcaaagtcatcggtgaccatttatctgtgacgatggcttaacctgtcataggtaagggtacgagcccatcacatatgacctgatccagcatagtgctagaatatccataaatctgcacaagttttcaactggtggacaaccaagatctagaggtgaatcttgaaaagggatttctggatgattgaattctcatgtgatcctttggaacaaagaaatttgatcctttggaacaaagaaatggagctcgcaaattcatttgaaattcctatgtactcccaccggattgttaatacttatcgttttggacaagggtacggtctccaaaaagtagctttgataactattttctattataaaatatatagaaaaatctttcaagactaatctgcacatatggtttgcatatttttaaaataaatattttagaaattatttatagtcaaatattttaaagtttgactttacatttattcaaaacgactaatattgtcagcccgagagagtagtgggtagttttctacgaattttggaggaagacatcatggtcgttagtcttctgcttaccaaatacaatttaggggaataattgaatcagcatcggtaaggccaatttgggagagttgagccccgacaaagtgcaagattttcggttggttgctgctacaaaacatggtatggactagagattgcctgcagcttagggaatggcaaaacgactactactctgccaactttgtttcatgaatttggaaacaatgaacaacctgatgttctaatgcccaatctcgaagcaaatctagacaggagttctaataaggctgcggcatggtcatattaattatcctcaattggagcatgagccaatccttattggacttgtggacacaacgaacaacaagcccggatgcaaccacaagaaaaggcccgaaataaatgttcatgctcatagcctggaaaattaggaaagaatgaagcgcaaagatcttcaataagaatgaagcaacatttcagcgagtaatcaaccgcatacactgttggtgcgcaaaacatattgcgagattattaccttaagatctctgggtgagctgaggtttgactggcgtttgaaaagaagtgttgtttgagtgttaaagttaggtttgactggcgaaagtttctatgttttttcctactgtgtgttactccctccttctctaaatgtttaacgccgttggcttttttaaacatgtttaaccattcgtcttattcaaaaacttttgtgaaatgtgtaaaattatatgtataaataaaagtatatttaacaataaatcaaatgatagagaaagaattaataattacttaaattttttgaataatttgaacggtcaaacattttttaaaaagtcaacggcgtcaaatattttaggatggagggagtactaaacaacatgttttatttccatatttcagcagatattcaacgctacgtgattctattcacgcgtttcgtttttttccctattttttagggatcatacgcgtcatcatatcagaaatcctcatctaactaatggttagggatgacttgaacgacatgttcgcaaggccatagtcaaggtcaaggtagtactaattatttttgtctcggttatatatcttgtgggatgattaagcctatctgtccatacgtccttatttcatttttacggcagctcatccgtagcttacgagtctaatcacttcaagagtccgcttcagatgagcatatataacatacaattaaaaaatatcattaaccattatttttgtatataccaatgtgttaacaattacatatatttgttactgatatatagaccttttaatccctcgttattctttttcctttaaaaataatagatagttggtaggagatgtttaacatatggatatgggcctgctagccccacctgtaattttttttctcacaagaaaatagaagtatgtggtgcacgcagcaataaaaccaacatcatcactactattttttttaaagaagtatagataacgttcttgactgacttttgataagctgtttgatagttcatatctctgctattataaaaattaaagatatttttaccgacactttggtacgtcatcctgttgacggttggtactcgtagaccggatatagagggtattggggtacgctggtacgaggatctacgtagtacgacatcaaggaaacaagagacaaagattatacttcaggccctttaataggtaatagccctaatccagttgatatgggattatatagagagaaccacaaattacaaaggaaataacagaactcgatgatactggcgagatcgtagttgagttgatttgactagatcacccagcgacttggctcctgcaaactccggcttcgtaggctgtggtcgctgtgttggctatgagattcgatcccttaggtcctcccggggggtcccttttatatcgcaggtcaggtggtctccaagtaggactcggaggtatcggaccctgcacgatatagtgacgacccagtcctatatgggtaggaacctttccattggtggactttgagatgaatttccttaacgtatacagagaacgtccgtacacgcgccgatgtaccgtattgccgtatagcgtacatccaagggtagagggtataccttattcgtaaccctgacagtagcccccgacttctgcttaaataaactcctataaccgatcacgacttctgatgtcggagttgttgtcgttctcgactggtcgatctcggtgtggggatcgtagagacaaggagtgatcgacaacaccaggcgaagttcaacggttatgagtgaatttaaattgaagtccgagaaaccgcctcgcgcaacggacccagaaatttccgacggccatctctctcctttccttggaattcgcaccgtcggtagtgcgcctatttaagggagttttgggaatccatttttgagtccggctggtgcgaaaactttctagcctctaaacgctcttcgtcttctccgcttccacgcaaaccctaattcgctcgcctcggcttcttctccggcgatctccaacggcgatggacctcgacaagtccacctccagcagtgcgtccttgaagaaattgcaggaggagggcgctctcctcggtcgcaggactatggagagggaaccgggaggtactgaacctgaacccgtcctgggccgcatggttgcggttgaggactacattctctgtggttttcttcctccgccttctgagtttttccttctcgtcttgaacttctacggtctttctctgcttcatctgaaccccaactccatagccttccttagcattttttctcatctctgtgaggcctacattggggtagagccgtttcttgacctcttccgtttttactacgagttgcgctggatggaacctaaaaaggtatccgggtgtgttggtttttgacttcgggatggcttgaagtcgcgatacatccctttccagtgcccctcttctcgtagcaaatggcgggcgaggtggttctatcttcagatagaagattcggatccagtcttcattgttcctgaggagcaaccagacatgattccgtcttggaccaccaaacccgccttgaccccatccctacagtctttcatcgatatcatcgatgacctccgagtacgagggttgtcggggtatgaagtcgctgccgacttcattggtagacggatccagccgctccaggcttgagcctatccagcctttgactactctgggccggaggacgcgacccgggtttctcctcggggtatttttcttgtattctgggtttctctcctttgatgcgcattcctcctgacttatcgaaatttggttctcgatctacaggtttgaacagcgcaatcgtggagcgccgtgttgcctaggtgatgatcagtgatcccacgatggtgagcaacgcccccacccctctttgcgagaaagaagcggctgaacgcgaagccacaatcaacgtgagtgtaatcgatgaccctttacattttaacttttagatcgcatcgtgacttcatgttgtgcaggctctccccttgactgacatcatcgggccgctcgcggaccaccaggtggcggattcgttgaaggagggcgttgcccaggaagcgtccgacgcggccattgccgtcgctgctgctacgagcagcggcggcaaagttccaaggaaagggaggaagttttcctctgtgctcggcaaccgccggaaggcgcccaccccctcggtaagccttttgggttatcgattacatagtcgaaaaatgtcgccctcatatcgtacttggtttacttaggcctcggacgcgtctcccccgcctccatgacggtagaggctggtgacactcggcgagaagtaagtggacgagatttgaggcccttgacttgatcgggttctggcgttttgttatgatgactaacatggccgtctttcgtagggcggcgcgggcgaaggtggcgcaaaaggggtctggagggaactccagcgcgtctcctgcagtggcctcgtccgatgtcgtggtcgtgcccaggagccgcgaggtgatgcccagcggccctgccagcgatcttgcgcccggtcgaggcctgcctactgctgtcctcacctgggaggtgctccaagtcgagacgaggcgcctcctcgaggctggtgctcgcggcataagtcgcgagatcgcggaggcgagggcggcggcggcgtcgtcgacgaacgagcgcgacgacaaacttgcgcgtgacttggcggaggtctgcgaggacctccagaaaatgagggaactggtggccggcaacgagcggcaacgacaggggctcgagaaccgcatgtcggaactcgagaacaacctgtcggagatccgaggttcgttgcgggtcacctacaccggcctacaccagctcgccagggaatgtggtgccaaaactaccatcccggcgaaccctgacgagttctcattgacgtcttcgctcgcagaactggcgacggcgatggaggcgatcccctccaagcacgcggccaggatcggggaagagacgtccaatgggatcaacaccggggcgtgccacgtcctcgcatgcgtgaggttggcgcaccctgaactcgatctccaaaagatcttggatcagggggcggctagcgacgcgcgcaaggatgtgatggaagaagttggcgatctgggggagtccgttctcccacttttcgaaaagtagggacgccacttgcctgtaccccttaaccaatcgcgctttgtaaaactttcattggttccaactgcctttctatatgcagttatcgcctcagtttcccttagcgtcttgatttcgagtactttgtgttgcttgtagagacgttgatgtcgaggatatccagcagcgtgggcagcctgagttgcctgtaatcgctccggtactcgcacttgagccgtacgcgccgcaggacggtgtgaaccaggatatggcgacgattcctttaggttggttctttttgtctccatctcctttgctcttctatctggattggcttaaattgccgtgctctcggaaaaggagagcagcttaacttggttgtttgcttgccgagcagacctcgagagttcgctcgttgatcacgaccgtcgcatccaatactagaggacgaagttcgaggtcgccaaacttgagagggctatgttggaagtgaagaaggaccgggccgtggaggcactccgaggtcgcgaggtgtggttcaactcgtacctcaggagttgttgcacagcatggtcgtcgtctgccgggaactgcgagtacctcgcgggaatcccgaggagtcatgtcacgcccgaaatttctatccaaaattccaaacgcttacatgtgtgtgaaccctcgtccaggaatcagccgaggcacacaataacaaattgataatagagtacaattattactctaattaataagcgaataaaatgtcattatagaggtagatagttcctctcaatcaataaagatctaagcagcggaaagaaagataaacggcgcagacggctccacttcacaggcagcttgaccaaggctacacctaatcctccacaccttcagcatcattgtagaactcttcctctgatgaatgattgcaaggtgagtatatgacatactcagcaagccacgcagcaaatatgcaagtgcacaggataacaaaggatggcatagtagagtttcatttgcaaaagcagcatttagcaaacatttgagaatttaataaaacagttaagtattaaacaatattaatccaacgctatacaacataccctgttgtacaggcccaaccattctgaacaaccatcccggctgcacagttctatctccaaaccaggaatgtaccattccaaaccaggagctaatcaaattattaccaattatagcatcatttactatggtgagaagggtgagactaatcacgaaagacattgttagacccgcccataaccgctggcacggctattcgaatagttttactctgatcagaggtgtaccactgtacccacaagacacaaccccacatcatgtcaccatgtgcctcaataccaccacggtacctcggaaaggagttgtgacaataccccttgcataacacaatccaccgcagcgcaccttcctggatcataatcacccccttataaacaaggcatggactccccagcgacccccgtgggcttatctccgccacttctcagtctggtgccccgcaatgaaccatgctatacaaaagataaagccgttgcccatgctggcttgtggttggcacggttaatgtttcacaaccgaaactcgtgaaccggtccttaattgtcatgagcacgaccatcaaaaccatgtgctcacaacccaccattaccaggttttagttggcacattaattaattaatcaatcacgattgaccatcgtgaactatcattaggccatcattaaataatagtgagtcataagttatcccaatagtgagctaatgtttctaaacagggctaagcaattatatctaatatctagttgaaccaatataaataaagctcaactagttaaattataataacccaaggtatcaaggaataaagtaatcaagaacaaaagggctataacaatgaataggttaattccacccaatgacattcgaaaataaatgcaatagttgaaaagaaacaatagctttaaacaggatcaacatgctcaaagggttgtttgggatctgtgtgacttgccttgctggccttggaactcttcaaactcttctccggcgaaaacggactctccggaaacgacggaatctaagcagaaaagagcaaaatcaccaaaacagcacataaacaagcatgaacagtacatgtggatatttttaacatgtagatctcaattttagaaaaatttagagacttgaaccaactaaatcggagctaagatgaattagttatgaatttttgaagattaattcggattaaaacacttatattgattttaattgaattatgacgcaataatgaattatttttgaaaaggaaaaagggatttattgcgtcagcgggctagggtttgcggtggaccgggcgcacgggcgacggttcacgcgaacggacggccgagatcgatcggtccacgaccggctcacaacggacggggacgatgacgtcagcgatgacgtcaccaccggcggcggcggctcggcggctcggacggcgcacgctcgccggcgaacggcggcgctttggcacgaacggagagcaccaacgggtagcggacggcacggcgaactcaccggcgaccaaagcgacggcggaagaggaacggacggcgacggcgacgaagaagaaacggcggcggtcttcgggttgacggcgacggcgatgctccggcgttcttcggcgactacgaagaggcggacgaggacggtgacgacttggcgatcccgacggtggccttcccgagcgacggcgacgaccggaacggcggcggcgcacggctggagcgacggcggcgacggcggcgctaggttgcacggcgctagagctcttccggcgacgagaggcgaaggcgagggtggcggcgggtagaggagacaccgaggagccttttaaaggggctaggaggcggcggcgaaggcccacggcggccggcgacgagaaggaaagatcggggtttgaaggaaaaagaccgatccgattcgaactcgaatcaaacacattccaaaccgatttagccgatgtttccaaaagagaaaaggtagaggagatcccgaggatcatttcccctctatcaatacggccggagaaggaaagggacggccggatttggaaaggaacggcggcggcgcgaaactagggtttcgggcggcggtggcgtgacgaagatgacgaccctgacaggtgggccccacctgtcagcgggcggacgtgtgcgcgcgcggcggcggactgggccggactgggccgaggagagagagagcggttttgggccgactttcggcccaaagccaaaagagatttttttaaaacctttttcaatttaaattatttcttaaatgcaattccatttattaaaaatacttccttagctcaaataaatcccagaaaaatctaggaattatagaattaagcaaagtatttaatgaaattttatctggcccctttttatattggaatttattaattaaaattagatcttctcttctaggcttttaaaattatttctaaaaaattccatttaaacaacaatttatatattttgaattttcagggtgtgacaagtcagcggccggctatatctcgtggctgaacggggcatgcgctcagctcgaaggcatcggcaagcatatcgacgaggccctgaagcaggagtgccgtcgatcgagctggtttgccgaagggcacgtgctggcatgtatacgagatcatcgtccgcagttgcacctcgagttcttccacgagggattttctcgttctcggaggactcccgcggaggtagacaacctggcgaagtcgatggcgccgctggcggagaaagtcttccagtcgatggattggcgttggccttcctggtagtctttgtatatctgtgacaagcatcttagattaagtgtaatatattttggaattttttgcagcctgtaaggaatacttgtgaaatagaaaggaagtctatctaactaagctttcttactctggatgtggtgtgtacgagtgtcttctcacttcgcgacttcgatcattcacttgagttatacactcttcctagcccccagccttgtcgtcggagaattcttctcggaagataaggctcttagacctttgacttgccttagttgaataaacactgatcctagcccccagccgtgaagttggaaaatccatttccgattacacggcttggttaatacgcacggcgagaactcttacacgaccagatcttatatggtctttcgtctctgaagaatccgacaaggccttatcagctctgggcatccccagccgaagttcccttagattcctcggaggccttgtcaagacggcgtaaagggacatgtgaataggtttcaacactaggtatcatctgggtaagggatcatcgggaagggacactttgattgaaatttgcatcttaaaacaggctttattgaagttgtaaggtgtcttacaagtatggatactattgacttatacataaaatttacgcaattggtcaatcttccacgaatttgctaactcgcaaccgtcgccgtctgcaatcttgaatacgcctggccgcaagacttgtgtgatcgtatacggtccttcccatttgggtgagagtttgtttcgccctgcttggctttgaactcgccggaggacgtagtcgccgatcgaaagtatgcgtgctcggatgcgcttctcgtgatagcggtggagggcctgttggtagctagctgccctaacggcacccgttctcaatgttcctcgagttggttcacgtcatcgtttcgctattcctcctgatcctcgtcagagtacttctgtactcgtgtactctgatgtcgtaactcggtagggagcatggcttctgaaccgtacatgaggaagaagggtgtctccttgttggacattgtcggtgtggtgcgcacggcccatagtaccgaggggagttcttcgacccacttcttgtcatgtgacatgagcctgtcgtagatatgggtcttgatcccttgtagtactatgccgtttgccctctcgacctgtccgttactctgagggtgagaaaccgaggcgaagcagatattgactgtcacaccctgaaaatttaaaatatatataaattgttgtttaaatggaatttctagaatttattttaaaagtcttgaagagaagatctaagtttaattaataaattccaatataaaattgggccagataaaatttcattaaatactttgcttaattctataattcctggatttttctgggatttatttgagctaagaaagtatttttaataaatggaattgcatttaaggaataatttaaattgaaaaaggttttaaaaagtctcttttggctttgggccgaaagtcggcccaaaaccgttctctctctcctcggcccagtccggcccagtccgcagccgcccgcgcgagcgcgctgtcgctgacaggtggggcccacccgtcagtcgtcgtctaccttcggccgccgccgcccgaaaccctagtttcgcgccgccgccgtttcccttccaaatcgggccgttcctttccttctccggctgatttgttagaggggaaacaatctccgggatctcctctaccttttctcctttggaatctttggttaaatcgctttggaaagcgtcggagacgagttcgattcggatcgg
